United States Patent Application Publication US 2024/0301345 A1 - sequence listing, part 5

SEQ ID NO: 562 - DNA, 21634 bp, Unknown
  R48_24m  MAG No. k141_81617
gatgccgcggatgactcgtcggcagcgtcggttccggccgttcagactccggcgttggacgacgtgtcgttggatgtcgaagcgggatcgatcgtcgcactggtgggcgagaacgggtcaggcaagaccacgctcgtcaagctcatcgccggcatcctcgacgccccggactgcaccgtgaccctgccctcgggcgcggacggcgggaacggtcgtaccttggggtcgtgggccgaacggttgggcgcgtcgagcatggtgttccaggatttcacgcacatcgaggtgaccgtgcgcgagttcatcgatcccgctctgcggcaatcggacgatgagttatgtgacgggttgcgtcgcgcccgcgcgctcgacatcgtggatgggcttcccggcggcttggatacgcagctcggtcaggagtggggcggcgttggcctgtccggcgggcaatggcagcggcttgcgctggcccgcacgttcctgtccggcaagccgttgtggatactcgacgagccgaccgccgcggtcgacgccaccgccgaggccgcaatctaccatgatctgatcgccaaccgtccggcgggcaccactgtgatcgtcatcagccaccggccccgcgtgctaaccggcatggaccggattatcgtcctcgaccacggccacgtcaatgaaaccggcacctaccgtcaactggtcgaccgcaacggcaccttcgcccggctcgcacacgacagcctcgaatgagctcgatggcatatccggttgattgttaaaaactcagtggccggccgacagattcgtccgacgaggctcgcgcgagtgatcacaacgcgggtcgcgtcggatatgcgggagatggcacgccttatatcaaaagcgatgattttcaaataaggacacggccccatcagccggtcgcgggtactacagtgaaccacaacgttcctcccccgatggtttggggaaacacagaaagaggttggtcgtcggcctgatcatcattgcgattcgcaccggcttcttccgcaagaagctgggtgccagcgagaaccttcaggagtatttcgcctgaatcgggcttgtcgtccatccgcattccgcctcagctactcatatcgataacttactaacaatccattcattgtcttcttaccagtaaaggaaatcgccatgtccaacttcattcccaacaccgtttccgcagaacgcaagcccgtggacatcgtcaccggcacctatgtggactatgccggcgtgacccgtgccaaatccgttcccgcccgcaggcgtgaagccttcgaacgcaacggattgggcgccgccctggtctgggtggtgttcggcgcggacaactcgttcgccgaaaacgagaaattcaacgtgtccggcgatctgcgcctgcaccttgacacttccgcttctgcattgcgtgccatacgagcgtgaagcggcgtttctctgctcggtgcatgccaacgtatacatggatgtcagccttgccaatacgcatatgggagcgcaggtgagggaagtgctgcgcaatgttctggcgtggtgcgcatttgacaagttgctctatgcgtcggacggcgtcggcatcagtgaattgcattatctggccgcggtgctgttccgcaggtatattgcgcgaatcgccatcgactgggtatcggatggcgcatggaacgcgaatcaggcgaaacgggttatcgacgccatcgcgcatgccaacgcggaacggctatacggtttggcgtgaacgggtacttcgccggtgccgtcacttcccgaggaacgccgggatggcttcagccgccgcgtatcccttgcggtacatcatctccagaccctcgaagttcttcttcagggtgttgaggccgtacaggtcttcgggtgcgaggatcagcactttgccttccgcctcataatgcttggcgagttcgagttcgtcgttgtaggtcttgtaacgcatgcgcagcttctcagccgcagcggggtgggagcgttcgagaatgcgggccggagccagatccttctgctgcttgcgtacttcgtcacgcaagcgggaaagaattagaatcacgcgctcataaccatcatccaacgctttctgcaccggcaccggatcggcgatgccgccatcgaaatacggcacaccatccaccacatacggctcgcaggccaccggcacggcggacgaagccttgatgatgtcgaaatcatcgaagcgtacgcgtgacttgtcgaaatacttggtcgagccgtcctcggcattgcaggccaccacggtgaatccggtcggattggcctcaaaggcctcgaaatccaacggattctcaccgtcatggttgctcagcgtgccatagatatagtcgaggttggcgaagttgcggttcttgaaatagctctccgcgctcgcatactccttgcggaacgcgtatctggtgtagaaggtgtggttgcggccgtgctggcgggcgatgaacgaggtcatattggccgcgccggcggaaacgccgtagcacatgtccacgtcgatgccgtcctccagcatgcggtccataacgccgcatccgaaaatcgcgcggaacccgccgcccacatcaatcattgccgtcttcagtgccatatcagcctcctattcatcatcatgcatccgatcacgcattcagcaggtcgcgtgaaagccgtgtaacacgttcggacagatcggaattggcgagttccacgccgccggtcgcgtcttcgggtgccagtttgcccagggactccagcaccacgcccagatggcgcacggtgccctcattgccgtcgatgacagcagcccgttcgggcagcagctcgcggaagtagtcgcggtagaacacgaaatgcgtgcagcccagcaccactgaatcgatgtgctccatgtcgtactggtcgaagtagccatgcagcgtgcgcatcaccaggtcatggtcgccgagccgcccggattccacaatctccaccaagtcggggcaaggctccttgaaaatcgtgttgttggaatcgaatcgatccatcagtttggcgaacttccgctcacgcaaggtcaggggagtggccgccacaatcaccctctggggaatatgatgcgggtcggaaggcacgtcaccacggtcgcacgccactttcagggccggctccatgccgatgatcggaatatcgtagtgttcgcgcaaatcgttcaccgcggcggaagtggcggtgttgcatgcgatgaccacggccttgacaccttgacgcacgaaccgttcgacaatatcgaaactcagggccctcacctgctcaggcgtcttgacgccgtacggggcgttggccgaatcgccaaaatacagcacatgctcggccggcatatccttggcgatttggcgagccacggaaataccgccaagacccgaatcgaatacgccgattggagccgaagagctcatgcctgaatcctccctatagccatgcctgcaaccgtatgttgccgcgaccgatcacaaagccgattgttttgcggtgttgtttcgctccctagagtactctgaaagtcatgagtcttccgcaacgagtaaccaagacacacgcaaccggcaatgatttcgtggtgtacctcgacaagtccggcaaattcgagcccaccgccgatgaggtccgattcctgtgcgaccgtcacttcggcattggcggtgacggcctgattcgcctgacacggcctgatttcgtgtctgatttaagcgatgatcagctttcggacgtactggccgggggtgcgaaatggttcatggactatcgcaatgcggatggatcgttggcggagatgtgcggcaacggtacacgcgccatcaccttgttcgctcagcgcgagggcgtggccgactccaccgagccgttccgcctcggcacccgtgccggcgtcaagattctgacgccacgcggcaatatgaggccgtacggaaccaacgtgttccaggtcgaaatgggggagtggaagatcggcgaaaccgacgcctacgaggtcaccatccccggcgctgagggctcggcgcgcggcacgttcgtggatatgggcaacccgcatgtggtcgcggtaatcgaggacgccttcgcgtccctgccggtggtcgaggcgctggatctggtcatcaagcccgtggtgagcccgaccatcgaatccgaccagaatgtggaattcgtgcgggtcgacgacatcgatcagaacaccggcgtgggtgaagccacgatgcgcgtcaacgaacgtggctgcggcgaaaccctgtcctgcggcaccggcctatgcgccacaggcgttgtgctgcgggccaagaccggcatcagccactgggacatcaccgtacgtggcggtaccctgcgcgtggacgtcaccgacagcgacgtgaaactgaccggagcagccacgctggtcgccgatatcgatttgttgtaaaggaatcaggcagcgaacagggccgcgccttcggtgacgatgatgagtaccacgatcgccacgatccacagtatgtcgaccatgaggtcgatgttgaggcggtaatacttattgagtccggccggcaccgccgcgacatcggcctcgctgtcgccatcatcagccgccacagccttacgtgacggcaatccctgcactgccacggtcgcatggctcaacgccatgaactggatggtggtgaagaacatcagggtcaggcaccacgggcacagcgcgtgaatcacgaacagcgactgtgtgctcagccagtacgagtaggccaaagcggccagtccgcccagccacgtgcaggtcgcgaaccaacgcggcaccttcacacgcgccaaaccgatcaccgcgatggtaatgaacaccgattcggcggcgatgccgaagaacgcgttcggatagctcagcccgccgaacttcacgatttccgcctgccaggactgggccaccgccgaacaggacaccaccgagttcagatcgcagccgagcgcggactccggatgcctagccaactgcaaagtctcggcggacagaatgagcgaggcccccaatgccactgccgaggcgatcagcatgatgagatatgtccaagtggcactgtggcgccatccaatcaacggtcgcgcctccgccaagccaagcggcgtggtgttcgtggtactggatgatgtgtcggttgcggtgttacgagtcatcatgtccctttcgatagcgctgcgctccagattagcctttgcggttgtcagctgagtgccgaatgtctggtcttggccgttggcagaaggtgacgacctgtctgcgccttgcgtgggaatgctgagatgaggttacgatggaaggtatgactggatatgtgatgcctttggagccgcccgccgtcgggtgggacattcattgccataccgtcttctcggatggcacggaaacgccggccacattggccgaacaatccaaggcattgggactcaagggcgtggccatttccgatcatgacaccaccgccggctggccggaggccgaagccgcatcccatagggtcggtttgccgttgctccgcggcaccgaaatcaccgccacggatgagaacgtctccgtacacatgctcggctaccagtatgatcccacgaatcagcacatcacggacttgttcgccgatactcgagccgcacggttgcaacgcacgcagcgcatggtcgaattgttgtctcgtgattatccgattacctggcaatccgtgctcgcccaagtcaaggagggtgacaaaaccaccattgggcggcctcacatcgctgatgctttggtgagtgccggcgtatatcggactcgttcggaagcgtttgcgaatgcggtcagcgcctcatccaaatactatattcccacgccctcgccgacctctcatgaagtggtggccgccgtcaaaggggcaggcggtgtgattctgatcgcccatgccggtgatgtgagccgtaaccgcagactgctgtccgatgaccagatcgaagcgttgatcagcgagggattggacgggctggaggtatggcaccgaggcaattcaccggagcaacgagaacggctgctcaccatctgccgccggcaccagctgctggtcaccggcggatctgactggcatggcaaaggcaaaccgaacaaactgggggagaacctcaccgacgaggccactgtcgaagagatcgttcatcgcggcgtgctcccgttatatcggtgattcgcggcaatacaaagcggccttgagatgatgcccaaggccgcttatgcgcgattcacggtcacagcgtgccgaaaccgacggcgtgcttggtttcggagccgatgatcgcgtaaccgagtgccttggcgggcacgatgatgcgacggcccttgtcatcggtcatatcgatcgtcgcgttgtcggccacggcctgcgcgatggcctggctcacattatcggctgattcgtcggtgctgaagttcaccggtcgtgccacgttctgaatgcccagttcgatatccatataaggctccttgttctgccgtctttgtgacgaacatcatggtaagtggccgtcaccggccgaggttctgtactctattgtgccgcgtgtctgcgtcgtcatgtgcggtgttacgcgctcggcgtggcgcggaacaccgcacacgacattatttggatgatgtggatgattcggccagcggattgccctcgctgtcatacccgtccaacccggcacgggcatcgcgcagagcgcgttcttcccgctccaacagcggaatcaccgtggtttgggcactcgaggctccgtgctgaacgaaactgtccggagtatcgtcattcaccgcatcgtcggtcggggcggcggattgagatgcaggggaagcgtcggttgacgtcgtgccgctatgcccgttcatactgaggagctccttcagcgtgatcgtcaccgaagaatgggaagcgccatgtgagggctgcggtttggtcgatcccgtaccggttgcggtgccggagacactcgcttgcgggtgattggcggtccggtcagcatcgggttcgacttccggggtaagatccacgtcgccagcggccacgatgtcagcggaaccggtgcgatctggatcgggcgtgtcgtccgagacctcggccgccgcggtaccggtttcggactgctgcggttgtgcgggtacctgcgtggcgggtgcctgatgacggtcgtcctgcaacaatgtgccgacggtgattgtggagggggaaccgggctccgtcgacgaggcggcggccgaccctgcggctggggccgatgccggagtgtgcttgatcacgcccaactggtgtgcgagtcgttcgacctgtgccttgaactgcatgatgcgattgttgtccgcacggttcaacgcctgaatgaattcgcccacctgttccatctgcagccacaggttggccctgagcatgatgagatcgtcaagtcgagagcccatcatgcggccgtatgcggagagcacggcgttgcgatgggattcgtcgagcttgccgaaaatccaggcaaggtctcgtgccggatcgttgacctgcatatcctgccagttggtcaccgtggtgatggtggaaccggagaacaggaagtcgccgtcggagaatccgccgtgaaccgtgcaggtggagaacgaccacaatccctcggtgtccatgatgcgcgcccagctgtcggtgatttcttggggaacatggccggcggagcgtaagcggcgaatccaggcggtcagctgcgaacgaatctgaccggtggtgactaccggatatttggcattggccagaaaagtcgaaggcagacgatgaatggctccgatggaggtgccgacggccgcgcagtcatccaatgtcaacaggtcgagaggacgtgcctgaccatcacggtggacggcgatcatcacggtcgtctcgcctgtgggaccgggcttgcgcggggtcagcggtgtggactccgcctgggcctgctgccccacggcctgtgcggtggtcgtctggccgggttgggaaacgtctcccgggacgaatgcgaccacacggtccatatcgaagccgaggccaccaagctcgcgcgcggctgccagtgtctgcgccgctttcacacggcggatcagacgtgtacgcccttccttgctgtcagtggcgtatacgtcgtacaacttgcccgaggcatcttggatcacggtctgatcgatgcctttggcctcgtcggttgcgctggcctgcacgttctcgcgtacaccggccacccccagattcggcaggacggctgaggcgagtgccgccaacatataatcgctacgtttcatcacccttccacactaatacatccgtggcgattcgcaccgcagaatgacacgcaaaacgcatgattctggcgatgttttgtcgtgagcccgattcagccataggcgtgagtcgtgccgtgagcgcgaatcgtgccacaatggacgcatggaacaggcgcaggggattcttgaggggctcgatgagcggcagcgtaccgccgcgactacgttgcaagggccggtgcgcatcatcgccggcgcaggtgccggtaaaacacgcacggtcacgcggcggatcgcctatgcctgcgccaccggggcatggaagccggagcgggtgcttgccgtcaccttttcggtaaaagcggcggcggaaatgcgcgcacgattgggccagctcggcgtagggggaggtactggacgttccggtttgggtgcgggaactgccggagtcacggccgcgaccttccactcagcggcattgcatcagctcaacagcgtctgggcggacatatgcgaggctccattcccgcatgtgatcgaagatcagcgtgacgtcgtctcccgcgcgatcatccgcgccaccgcacgtaccgatgccgatccgctgaccgttcgcgatgtgctcgccgaaatcaattgggccaaaatctcgttggtggcggtggaagattatgcccgggcctgtgccatcgcccatcggcagccgcccgccggacttgacaccgctcggttcgccgacgtctacagcgcctacgagcaggaaaagacctcgcgtggcgaaatcgattttgacgatattctgctgctcgtatgccatatcatggatgattttcccgaagccgccgcccaaattcgttccaccatcggctggctcaccgtcgacgagtatcaagacgtctcgcccctgcaacacaggctgctgaccctgtggctgggcgggggagggcctgacggcaagagcgcgatgaaccgcaacgtatgcgtcgtgggcgatccggcccagaccatctactcgtttgccggtgcttccagctgggatctgctgcgtttcgccgatgaattcgggccgctcgccgccgatgtcaatctcaacaccgactatcgttcgacgccggaagtcgtgaatctcgccaaccgggtgcttgcggccgcgccgaaccgtgaggattacctgaaactggtttccgcccgcgaatccggcccgcgcgttacccgaaccgcttatgagagcgatatggaagaggcgcagggcgtggcggcacgcatcgcccggttggtcgccaacggagccaagccgtccgattgcgcgattctcacccgcatcaacgcccaacagccggtattcggtgccgctttgcgcgctgcaagactgaaataccgcgtccgtaaggattcgggatggcaatcatccgcgctcgccgacgatgccgcgtccaaacgtgcgctattggaggcgatgggtttggacgccaccggacttgccgcaaacgacgatcccggcgttacgatttccacgattcacgcatccaagggtctggaattcaagcacgtgtttctgatcggctgttcggaaggactcttgccgtacggttcgccggaaacgggggatgcgctggaagaggaacgccggcttatgtatgtgggcatcacccgagctgaggattcgctgcatttgtcgtatgcgcggaccaaggatggttatggagcgcaacacagacgcccatcacgatttttgtgacgggcgtcggtaatgaatgtgaatgttcctgaacgttcaggaacgggaattggctgaaggacggttgactatgcctgcgtatcctccgagttgccgttgccgccatcttctccgtcttcgccgagaagcttggacagttcggcatcccaatcgatatcgccggtcttgccatctgcggcagggtgggaggcggaaccgttggcatcggaagaggagcctgaaggggcgtcggatgacggagacgcgccatctgcgggcttgtcgctaggcagcgaaggcagcagatcgggatgcgaccacttggcgtcacggccttcagggccttcggcggcggtgatcatctcccacaatccggcggcctcgcgcatgcgcttggggcgcagctgcaaaccgagcagactttcgaacgtacgctcggcggggccacccatcgcgcgctcgcggcgcatcatctcacgcaactgttcgatatgaggcagatgggccataccggcgcgccacaccacgcaatccacccagccctcgaccatcgccagcagcgattccagcgaagccagcgcctcgcgctgttcgggagtgtcggggatgccgaccttggtgagattcaccgcgccggaaatcgactccggatccatcgacgtggcgtcacgcagctgttcctccatcgcatccagatcgatggagatgccgcgtgcgtacttgccgatgagcgcctcgaaacgcggcatcagccacggtaccgaggcatacaggcgggcgtgagccatttcctgcagggccaggaaggaaagcacttcagattcgggaattttctcggtggtctcgaatccggagagcgcagcctcgaacgcggcggcgtcggcggaagcatcggagccggagacttgggcggtaccgtcagttgccggagtatcgctgttgccggccgaagtgaagccaatgggattggcggaagcgtcggtggatgtggagaacggattgaccgagtcggttgaagtgccggccgtatcggcctcgggcgcaggagtctcaccgttcagcatcttcgcgtattcggtggcgttctgggcaatcagtccaccagccggattcttcagcaatgcgatgccctgatcgaaactgccatgcacttcatggctcagattgccggccgcatgccccaactgcatggcaaaggacgtgttgcccagcagcttcatcagctgggctggatctttcatgccgtcgggaatcggaatcggcaccggtccggcgaacatgccggcaatctcgccatcgccgaacgcgccgccaagacgctccgaaatcaccgaagccaaagcgtcgttcatcgactcggccacaggagctgcgaacttcgcccactggtcgatggtgccttccacccagccggcgcgggtcagcacatccggatcgccgggcgcgggattgaactcgcaggcggtatccagccacaggttcgcctcactcatcgcgcggcgagccgcctcgccatccacggcggacacgctggacgcggaaccggaggcgttggcctgctgcaaggcaatcgacttggcgagcttgacgttgatcggcccttcctcgacagtgcgctgcatatcgcccatcgtgttgagtccgccggcgctgaacgcggccatcatctgctggacttcggatggattgggcagtcggctggggtcctgactcatcagctgttcacggatctcctcaggcaactggctgatctgctgccaggccatctcgccctgaatggggccgaagcatttgatcagccactcgtgaatcgcgttgtcgtccatgcgtatccttctttgccgcggtgtgttaccccaagtgtagggtctgcccgggcctgttcgctcgtggccgagcaatattttcggtttatgttcgttttcggctgatttcggccctccgcttacactgtagggtatgtttgcacgccacaggaatcaggaaccaggcttcgtccaggagcagaagagcccgactgcggattcggaagcgggggatgggcgcatgccatcgttcgaagtgaagcatgattcgcgcctatctcgtggaatcagccgtgctcgggcctatgcggccgctcgtccgaaacgccatttcgtcggtgcattcgccgtgttgcttggtgtggtgattctgctgctgcccagcccgtacgtcatcgagatgcccggacccacccaagacgtgctgggcaaggtcgaggatggtgcggttatcgacatcaccggtaccggcgtgacgacgtataaggattccggcaagctgctgctgaccacggtgaacgcgtccggcgtgcccgggtacccgatcatcaacgcgcaggccgtctggggttgggccaatccgcaggtggaggtcatgccgcgtgaggccacggtaccggtgggccagagtgcggaccagtatcagaagaaagtcgaacaggacatggccggttcccaggattcggccagtgccgtcggtctggcgcatgccaaagcccatgcggacgaactgggcattgacgccagtacattgcaacacgtcaaggtgacgatgcacgtggacagcatcggcggaccgtccgcaggcatgatgtacacgctcggtctcatcgacaaactcacccccgccaacgagagcggcggcaagaccatcgccggcaccggcaccatagacaaggacggcaaagtcggcagaatcggcggcatagagctgaagatgcttggcgccaagcgcgatggcgccacatggttcctggctcccgcatcgaattgttcggatttggccggccgcgtgccggatggtctgcgcgacgtcaaggtcgccacgctggacgaggcgtatcaggcgttggtggccatcggcaaggggcaggccgacgatttgcctcattgcgaggcatgacacgcgcggccagtcgttgtttctggtgagacgactcgcatgggtctgcccacaatgcggcgattttcggccgcgttaacgcatttgttcgcgaagacttgctaatgtgtcccctgtgaatcaaacggcatcacagaacgctgaagaatttggtttcgagcccggcgatatcgtccaggagtggctctgggacgacgatgtggacgattccattcgtgcccagattgaagagctcacgggcgaggatctcgtggacgaggactacgactccgctgtggacggcgtcatcgtatggtggcgcgacggcgatgatgaggacgaattgtccgatacgatcgttgacgcctacgcggtactgggcaatgacggcccgctgtggatactgactcccaagcccggccgcccgggtgccaccagctcatccaccgtgcagtccgccgcacagaccgccggtatgaacgccgccaccccgctgaccgtcagctcggactggaacggcattcgcctgcgcgcattcggcaggggccgctgataagcctcaatcaatacgcttgactttaagcgtgttgactggcgtcgcgtgctgcgtagtgctgctgggcgtgactgaatgtcatcgcgattgagcgctacggcacgcgtatgcgacaccacgtgtcgcgcagtgccggccatacgctattgttgtcatttgcgggcaattagctcagttggttagagcgccacctttacacggtggatgtcgggggttcgagtccctcattgcccactttcatttttcatcacttcgtgcaatcccctcattccacagacatgggctgtgacgatattccctgacagtcttcggcaaggggttctgaaatctcagtgagatgcgcgcagaaggaaaccggcagtactgctacaaaatcgtgaatttcggtcttcttggtcagatgcgtctcaatagtcacgtaaagttgtggcagagtgtttatatccagcaggaggtcgaatagccgatggcgcaggaacttcgtgaaggggacggcaagtcgggcatcgcacgtgcgggcaagcgcaagtgggggtatgaccccgctcaggtggacgctttcctggagcgcgcccatgctttgtatgacagcgagggcatgaatctcacccagcatgacattcagaacgtgtcctttgatttgcgcaagaacggctatgtgatcgcacaggttgacgccgcgcttggacgtctggaacgtgccgtggtcgataagcagaccacatgggagatcgcacagcatgggcgtgtgacgtggaaggcgaagaccgagaagctgtatcacgaagtccagaaccatgcggagcgtaacgagcgcgaacgcttcaagtccggagcgcccaagcagccttcgtacgataagaagcaggtggatcgtctggtcgaccagattgtggacaaggcggcggccgcattgggcgttgacggcgttaccgaagacgatgtacggtctttggccgatctcaatgcgaatacggtcaacaatgtgatcttcacccagcgcaagggcaagaaaggttatgacgagcgacaggtcgattacttcctgaacgcctgcgtgcagttgctgagtcgcttggaatcctatgcacgtgtggccgatttcgtgtccggcgagcctgcggttcctgcccagaccgccacgaacgtgaccgttcaagcgaacggcgtctcaccgttgttcgcttccggaacgcagcgcccggcaactgacgaacgttttgcgccgtctgccgttgctcatgacgaatcattcgatgccctgcatcaggccgagcagagcttgttcactgctccggctccggttgctcccgcggcgccggccgcggcggcaccgatcgcctatgcgccggctcctgcatcgttcgatgcttccacaagcaccaatagcaccaatgcggaacagccggtttcctttgctcccgcagcatacccggtgcatgcgtccaacgagtctgcggcgaagcccgtctccgagacgccttccgtggctcctaccgcagctgttgcggctgagcctcccgccagtgccccgtccgcgccggtttccggtgtgaccgctggcagcgtcccctcgtttgctccggcacaggcagctcacgaacccgcagctccgtcatcgaccccgtcggtgttcgcggaacagcccgtggatatggtgcagaacgattcctctttggccgctctcgcccacatggctgcggtttctcaggaacttccggcagtggatgcaccgtccttcgctcctaagatgcccagccttgatgcaccgaatgcgctgaaattgaatgaggtaccgggttcggtttcatccccggcaccctccgccccggcagtacagcctgtgaatagcactgctgacgaggctgcgtccgctgccatgccggtctcctttgctcccaccagcaagccggatcgtaacacgaactctattccggttcgcgtatccgatagtcagcctgcagacagcacggtctcccgtccggctgtggaatcatctgaatacgttgccgcctcccacgacacggaagcagctcagccgtcacaggataagcacgattccaacgattcgttcccgctgctgttcccgcttggcggtaacttcgattcggatatccccgacctgtcgttccccacactgaacaatgacgatacgaagaaggaaaagtgagcatagcctccaactccactgtcatcattctcggatccaccggatccatcggcacccaaggacttgacgtcatctcgcgtcatcctgaacgatttaccgtcaccggtctggcggcgggcggagcacatatcgagctgctggcgcaacaggccgcacagttccatgtgtccgaagtcgcggtgtttgatgagaccaaggttccagcgctgcaagcagctctcgcacaggccggcgcacaaggtgtccgcgtgaccggcggtccggattcggtcatcgccatggccggctccggtgcgaatgtcgtattgaacggcatcaccggctcgatcggcctcgaaccatcgatcgcggcgctcaaggccggttcccagctggcattggctaacaaggagtccgtagtcgcgggcggtcatctgctgttcagcgcgcaagtgcgcgagaaccagatcaacccggtcgattccgagcattccgccatctggcaatccctgcgctccggaacccacgccgaagtcgccaagcttgtggtcaccgcctccggcggcccattccgcggctggaaacgtgtcgacatggagaacatcactcccgagcaggcgctgcatcatccgacgtggaacatggggccggttgtcaccatcaactcctccacactgatgaacaagggcctcgaagtcatcgaggcgtcccgcttgttcaatgtgtcgcctgaacgcatcgacgtgaccgtgcacccgcagtccatcgtccattccatggttgaatttgtggacggtgccacgatttgccaggcttcgccgccagacatgcgtctgcctatcgcgctgggcctgtccgcgccggaccgcatgaccaatgtggccgccgcgtgcgactggacgcaagccgcaacttggacctttgagccgttggacgatgaggcgttccccgccgtgcaactggcccgccactgcctggccgcctccgagaagcatacggcggtgctcaatgcagccaatgaacaggccgtgcatgcgtttcttgatcatcggctgccgtacctcggcatcgtgggcacggtcaaagccgtgctggaccagatggacgccgagcttcgtggtaacccgctgttcacggacgtggaggaaatgaaccagcttgagcttgaagcccgccgacgcgccgacaacctgataaacaagcaatgatgaataccttgaatacggaaaatcccatcgaaaagccgttccgcaaaaccggtgatccggtcgacctgaccagcgaatcgcccttgcacccgcgccgcaagtcccgccgcatcatggtgggcccggtgccggtgggcgggggagcgcccatctccgtgcagtcgatgaccaacacgctcacggccaacgtacctgccacgttgcagcagatcgccgaactgaccgccgccggctgcgacatcgtgcgcgtggccgtgccgagtcaggacgatgccgacgcactgccggaaatctgccgcaaatcgccgattccggtcatcgccgatatccacttccagtccaaatacgtgttccaagccatcgacgccggctgcgcggccgtgcgcgtgaaccccggcaacatccgtaagttcgacgaagtcggcccggacatctgcaaggccgccaccgacgcgggcatctcgctgcgtatcggcgtgaacgccggctcgctggacaaggaactctacgccaaatacggtggcccgactccggaagcgctggtggcctccgccttgaaggaagcgcacatgttcgaggacgtcggcttccacgatttcaagatctccgtcaaacaccatgacgtcatcaccatggtcgaaacgtaccgactgctcgcatccaagggcgattggccgttgcacctcggcgttaccgaggccggccccgcctggcaaggcaccatcaaatcctgcctggcgttcggtgcgctcttggccgagggcattggcgacacgattcgcgtgtccctttccgcgccgccggtcgaagaggtcaaggtggggtgcaaactcctggaatacatgggattgcgcccccgcaagttcgacatcatctcctgcccgagctgcggccgcgcccaagtggatgtgatccagctcgcatccgccgtcaccgaaggcctgaaggacgtgaccgcgccgatccgtgtagccgtcatgggctgcatcgtcaacggtccgggcgaggcacgcgaagccgacctcggcgtggcctccggcaatggcaagggccagatcttcatcaagggcaaggtcatcaagaccgtgcccgaagaccagatcgtcgacacgctgctcaccatagcgaacgatatcgccgcccaaatggaggccgacggccaagtgcccgtcaattccaccggcccggtcgtggtcccaatccagcatcccggtcactgattcggccgaataggccctcggcgtaaatatcgcggtcagattacaatagcgcacgtgtcgcaagaagaagagcatcgcctgactgttcgatccaagccgtggaccagcacccaccggctgatggtcagcctgcccatcttcattatcctgatcggcgtgctggtctccatttccaacctgaccacggtgccttggaacatcgaacccaccggccagtcgatggccacgctcaccgacgataccgaagtcaccttcgataacccgtccggagaaacgctgccggcgaaaggcacgtatgaggtcaccgagcgatacatcacgctgaacatgaccagcgacggcaatctgaccaaggagcctggtgatcggggcaaggccaatgcggacggcgtccaagccatcaaggtattgattcgggaacctcagaacgcatcaggcaagcgccccggcgtggtgttcatgcacggtgccggatacggcacctgtgacaactcctttggcgacgtggcctccgatatggcttcggccggctttgtgaccgcagtgctcgacaaacccgtctggagcaccaccgacatcaaccgcgattatccggcctcagccaaggcatatgatcaggtcatcgaatacctacgagcccaaagcgatgtagacgccgccaaggtcggcatctatgccacctccgaatcgacatggatctcctcatatctgctcgaggacgatccggacgtcgccttccagattcttctgagcccgatggtgttcagcccacgccaatcactgggatttttcgtcacccaggacttcactcttgtcggcgcgaacgagggctatcgatccatcgtccaacgcgtgttcagcgcggacaccggcctgttcggactgaacaattccgacctcgccacgctcaaacccgccgcttacgccgtacccacctatgtggcttacggttcaaaagacgtgatgacggcgcaggtcgacggtgtgcgtgcgattctctacaacgcccacaaagccgataactggaacgtgaccgtgcgcagctatccggtcgccaaccatgtgctgcgtttgggggatgagtccgaagcgggcaccccgtttgcggacgcctatgtggacgatctcatcgattgggccgtcggcacttccgccggactcacgcagaccagcgaaaaggtggccggcaccaatctgtaccaatcaatcggtctgccgggcgccttgaaggcaagacgcgtcggcaccatatatggtgtgatcctgcacgtcacggtggtactgctgctgctcgcatccatcgtgctggcactggtggcgctgggccgcaaaatcgcggcggatgcccgatggcggcgcgagaaacgcgaggccaaacgtgcgggcatgctgataccggaacggcctgtgatactcggtttcgcacatggtttcggcaacgcgctgctgactttgaccctcaccactcttgccacactgctcatcttctttgccggacttggacaggtgattatgggtgtggtcaaacttgcatggggcagcgctcctaccgagacgccgggcgtcatgtattggagctggccggtcatccaagtggtgtccgtgctggtgctatgggcttggtcccgcgtctttatgcatctgatagaggtcgcttccgcccgcggactgattcagataccccctcgtcgtgaatccgttcgagacatcgtcaccggtgccgacccggtactcgcctccacccgtctgggccgagtcctgttctggctggtggccttcaccatgctgtacatactgttggtgttcgccttctggggcctgtttatttactgactacttcattgagtagagtctgccgggcgtcgcggggaaaggagatgagatgtcgctgtaccgagacgaaggtgtggtgttgcgcacctccaaactgggcgaagccgatcgtatcatcaccatcctgacgcgtgggcatggcaagattcgggcggtcgccaaaggcgtgcgtcgcaccaaatcacgctttggtgccaggctcgagccgttcatgcgagtcgatgtgcttatcgctgaaggccgctcgcttgacgtggtctcccaggctgaagcggtcgccgcttacggtgctccgatcgcggcggattatgcggcgtatgaggccgccaacgtcatcgtcgagaccatcgataaactcgccagcaccgaacacgagcagctgacgaaccaatatcggctgctcatcggcgcgttgaacgcgctcgccaaacaatcccacgccccgcaagccataggcgactcctatgtgatgcgcgccttggccttggccggttggacgccacgattgggtacttgcgtggtatgcggcaaggcggagccggcgtacctgtccatcgcgtccggcggcgtgatgtgcgaagccgaccacactaccgatgcgcgccgtatcgcgccgttcgtgttaaaccagttcgatgcactgattcgtggcgattggtcggtgcttgatgccgcgcctgtggagcgggttgtgcaggagttggttgaagattggggggagtattacctcgaacgcccgattcgttcgctgcgcttgatagattcatgagtatggcttttgagaacgttgattacacgtcgttggacattcccgcagctccgttcagcgaccctgcccgtattcccgacttccccaagaacaaggtaccccgccatatcggtgtgattatggacggtaatggtcgttgggccaagcagcgcggcatggtccgcaccaatggtcatcaggccgccgaaccggtggtgttcgacactatcgccggtgccatcgaagccggtgtgcggtatttgagcctgtacacgttctccactgaaaactggaagcgttcgccccaggaagtgcgcttcctcatgggcttctcgcgtgaaatcatccaccgccgcgtggaacagatggacgagtggggtgtgcgcgtgcgttggtccggccgtcgccccaagctgtggaagtcggtgatcgacgagcttgaggccgccgaggagcgtaccaagaacaacaaggtcatcgatgtggtgttctgcatcaactatggtggccgtgctgaaatcgccgacgcctgcgccgccatcgctcgcgaagtgcgtgatggcaagatttccggcgaccgtgtgactgaaaagatgattgccgaccatctgtacaatccggacgttcccgattgcgacttggtgatccgtacttccggcgaacagcgcacctccaacttcctgccgtgggaggccgcctacgccgagctcgacttcgtgcccgaactcttcccggactgcggccgtgacgtgctatggcgctccatcgaccattacatccaccgcgatcgccgatttggcggcgtgaaataaagaacagtcctgtggactgtgtttgcggggtttccgatttggttcgggagccccgtttttgttgcgttttacgggttttgcttggtttgtgatggtttggtgtttgtgtctcggtggctctgtttgtgtcggtttgcgcgccttggggtatcatctggggtatcgcc

SEQ ID NO: 563 - DNA, 33759 bp, Unknown
  R48_24m  MAG No. k141_81988
agagacgcccggtcccattccgaacccggaagctaaggcctggcacggcgatggtactgcacccgacagggtgtgggagagtagcacgccgccgcaccacacgtacaggaagcccctcggagcacacgccccaaggggcttcccctatatccgaaaccaacaagacataggctctcgcacctagggtgtggccgaatcgaaagcatatagaagagggaaccctcaaatgacggagagttccctctttgcgtatctggacctataaaggtctagaaattgaaattgtcaggatcagcaccgttgcgcttgccggtgttgatggcggagatggcggtcatatcatcgactgataggttgaagtcgaagacctcgaagttctgcttgatacgctcggcatgagtggatttcggcagcacgacgataccgcgctggatgtgccagcgaatcaccacttgggcaggtgacttgccgtacttggcactgatctcggccaatactgggttgctcagcaggttgccgccggtaccgccgagcggactccaagcctcggttgcgatgcccttggcacgcagctggccaatgagctcttgattggtgaattgtggggaagactcaatctggtctacggcaggtaccatatcgctgtgggtcagcagctcatcaatatgatgcttttggaagttactgacgccaatggccttggcacggccagaggcataaatctcctgcaagtcatcccaggcctgctgccagccgtctgccggccagtgaatcagatacagatccacataatccacgcccaagcggtcgaggctttcttggaatgcatccttgccgtggcgtgcgcgaatatcgtcattccacagcttggtggtcaagaagaaatcgctgcgcggcacaccagcacggcgaataccttcacctactgaggcttcgttgcggtaaatcattgcggtatcgatatggcggtagccattctccagagccgtctgcaccgcgttcactgtagtatcaccatccggtgtctggaatacgcccaagcccacctgcgggatgacagtgccgttgttcagcataattgtcgattgaattgccataatgcctcactattcgtagtgttcattcaatttcctattttagaaacaagacgatgcaatgagccgcgtttcgcgggcaaagaattgcgtaatgatggcgtgattctcgttcattaggtcattattgcattcattaggtcaatgggtccagggtcttcggcatcagaacccagtcattacgccattcctgaagagccgtcttacggcataccgacctaatgaacgtgaaatcgacctaatgaatgcaacgagtaagcggctacgataataaccagtagaatcacaacccagattgaaggggagagcacgtggcagaggaatatgtggctgcattcgatgcagggaccacggcgttgaagggtgccttggttgataggcaaggccgtatcgtagccagtgcgagtagtgagcttaaccttattatcaacggcgactatcgggaacagagccccgatcaatggtggcaagctttctgctcggcctccaggcacatgattgagcaggcgcggcaatccgagtcagaattcaatgtgactcgcattcgtggcatcattttcagcggtcagatgcaggatgttattgctttgaacggcgagctcaatcccgtccgcaatgccattctgtattcggatggccgagccgaggaacaggccaagcaactcgccaagacatatcagggtggagtagaacgtttcctgaacaccgttggcaaccggctcgaaggctgcttgccgttgcccaagttgatgtggctgcgtgaacacgagccggaaacgtacgcgcgcattcgtcatgtattgatcagttccaaggactacttgatcgcccaattgaccggcgaatgcgtgggcgatgtggcggcttgttccacagccggtgccatgaatatccgtaatggccaatgggatgccgaattgtgcgaggccgcaggaatcgacatggccatgttgccacacctgcacaatccgcaagacaacattggcacagtgacggaatccgctgcacaacgcaccggtttctccgccggaactgcggtatacgcgggcattggcgatgcgggtgccaccacgctggccagcggtgtcagccgccccggccaatacaacatcaatatcggcacctcaggttggatcgccaccgtttcgcccgaaccgttcaccgacaagccaggtgctgcgaatctggcatctggtgtggaagaaggattcgtgaatgcggtgccattcctcaacgccggcgacgtgcataaatgggttaccggcgtattcgccgatggtgattacgcggaagcacatcagcttatcgaaacatccaaacccggctccaacggtgtgatgtgcctgccctatctggtaggggagcggttccccgtaatgaacccgaatattcgcggggcctatgtaggcctcgatccagacaccaccaaggcagacatgatgcgtgccgcgcttgagggcgtggccttctccattcgtcaaggtatggaaagctttgatgctgagcctaccgagatttccctgattggcggcggggccagagaaaatgcgtggtgccagattctggccgatgtgttggagcatcccatcgaagtgttcgccaatgccgatattctgccagcagtggcaatggcctcgttggtattcaatgtaccagacctgctgcaatcagtatgcgaatgcactgtataccagccgaatcctgacaccgcacgcacatatgccgacgcataccggcgattcctgagcctctacccgatgctgcgaacgatggattaggaactgagcatcatgaggcaatcagcgaatttggtccgcaaacatatagcggtcactggactggtgcaaggcgtgggattccgttattttacggtgactcaggcacgtcgacttggtgtacagggctgggtgcgcaattgccgcgatggctcggttgagctggaagcacaaggcagtagcgacgcagtgcaagccttggttgagcaattagccattggtccgcgatggtccgaagtgagtcacgtcgccgtacatgacatgccgattatcgatgagaccgctcgggcatttggcgtgcgtcaataacctgcatcacgaatccacatcacgcacgataatctcacgatacgggtgaacatgggcgttcctcgacgcttaggaccctcacattggtacgatggggctttatgagtgagaacatcatgcgaatcattgacctgcgtggtcagaaactgtcccgtgccgaactgctcgccgcgatgccgcgtgccgcaatgggtacttccgaagccaccgatctggtgcgtccgattctggacgatgtcaaggagcgcggcgccgctgccctgcgcgacttcgaggagaagttcgaccacgttcgtccgaagaacctgcgcgtgccggccgaagcgatccagaatgccctgaccacgctcgaccccgaagtgcgcgccgccatcgaggaatcggtgcgccgcgcccgcgccgtggcggccaaccaggtgccgaaggacttctacaccgatctggccgaaggcgctcgcgtcgccgaacgttggattccgatccagcgcgtcggcctgtatgtgcccggaggcaaggccgtctacccatcttccgtgattatgaacgccgtgccggctcaggccgcgggcgtcgaatccctggccatcgccaccccgcctgcgcgcgatgatgcggagggtctgccgaacaagaccattctcgccacctgcgccatcctcggcgtcgacgaggtgtacgcggtcggcggcgctcaggccatcgccatgttcgcctacggcgccaagggcagcgagccgcaggacggcgacgtgctgtgcgacccggtcgacaagatcaccggcccgggcaacatcttcgtggccaccgccaagtcgctcgtctccgcattcgtgggcatcgacgcggtcgccggcccgaccgaaatcggcatcatcgccgacaagaccgccaacccgagcctgctggcagccgacctcatcggccaggccgagcatgatgagctcgccggttccgtgctgttcaccgactccaccgagattgccgacaaggtgcaggagaatctcaagtaccgcgtgccgcgtaccgagcacgccgagcgcgtccacacgtcgctgtccggcacccagtctgccatcgtgctgaccgacggtcttgaccagtccatcgacgcggccaacgcctacgccgccgaacaccttgagattcagaccaaggatgccgatgctgtcgtcaagcgcatcaagaacgccggtgccatcttccgcggcccgtactccccggtgccgctgggcgactacatgtccggttccaaccacgtgctgcccaccggcggcaccgcccgcttcgccgcaggcctcggcgtgcacacgttcatgaagccggtcgaagtcatcgaatacgacgaggaaggcctcaaggctctcgccgcccgcatcaacgccttcgcggtgtccgaggacctgcccgcccacggcgagtgcgtgctctcccgcttcgtcaaggatccgtatgacaaggccaccctgcgcgagcaggagaagggagccggtctgcgatgagctcgattcccgaaaacctgccgctgcgcaacgacctgatcggtgaggagccgtacggcgctccccagctggacgtgccggtgtgcctgaacgtcaacgagaacccgtatgcgccggacccggccgtatgcgacaccatcgccaagcgtgtgcgtgaaatcgcccccacactcaaccgatacccggaccgtgagcacattgaattgcgtcaggcattctccgattacctggcccgtgaatccggtacccgtctggacgtggacgagctgtggggcgcgaacggctccaacgagatcatgctccagctgttccaggctttcggcggcccgggccgcaccgcactcggtgccgacccgacgtactccatgtacccggagtacgcccgcgacaccttcaccggttggaagctcgcccaccgcaacgccgacttcacgttgaacgtcgacaaggtgcttgaggccatcgccgaggtcaagccctcgatggtgctgctcaccagtccgaacaacccgaccggcaccccgttgccgatggaggatatcgagcgtattctcgccgcctgcgaaaccgccgaagtggccggcgcgggtgagggcgtgcacccgattctcgtcatcgatgaagcgtacgtggaattccgcaagcccggcaccccgagcgccgtgagcctgattaaggaccacccgaacctggccgtaagccgcaccatgagcaaggcctttgccttcgccggcgcgcgagtcggctacctagccgcatccaagggcatcatcgactgcgtgcgcatcgtacgtatgccgtaccacctgtccgccgtgacccaggccgccgcactggccgccttcgaacacaccgatgaacagctgagccgtgtcgagcatctgcgcgaaacccgcgaggccaccgccgcatggctcaaggaacagacctacaaggaccagccgcttgaagtggccgaatccggctcgaacttcctgctgttcggcgggcacttcgacaagcgcgaagccatcttcgacgagctcctgaagcgcggcgtactcatccgcgtggtcggaccggacggttggctgcgcgtgtgcatgggtaccgacgaggagatggaaaccttccgtaacgcccttgttgaagcgcttcgtatagtggaagcagcataagggacgtttctttccgattgcggcgagacccgaagcgattcgagtcccgccgcaatccaatatgacgaatcacacaggagacatgatggcaagaaccgcgcacatcgtccgcgaaaccagcgaatcacacatcgacctcgaactgaacctcgacggcaccggcaaaaccgatatcgatacatccgtgccgttctacaaccatatgatgaccgcgctcggcaagcattcgctgatcgacctgaccatccacgcccacggcgacaccgacatcgacgtgcaccacaccgtggaagatacggccatcgtgttcggcgaagctctgaagcgggccctcggcgacaagaaaggcatccgccgcttcgccgacgccaccgtgccgctcgacgaggcgctggccaaggccgtggtcgacatttccggccgcccgtactgcgtgtgcagcggcgagcccgaaggctacgaattctgcatgatcggcggccacttcaccggctctctggtccgccacgtcatggaatccatcgccttccacgccggcatctgcctgcacatgcaggtgctcgccggccgtgatccgcatcacatcgccgaagccgaattcaaggcgctggcccgtgcgctgcgcttcgccgtggaaatcgacccgcgtgtagacggcgtgcccagcaccaagggagccctgtgatggccgacgacaagttcgatccggacgaatcgcacttctccgacgaggagcttgaggccgcgctcgccggattcgagaaagaattcgcggacgattcggcatccggcgatgccagtgataccagtgatgccgataaaacggcggacgctgcttcagcgaagtccgattccgacgcgaatgatgatacggctgataaggcttccgctgattccggccagcctatgaccgacgacgtcaccggatcggtcgctgatgcggtgaatgaggccatggccgacgtggtcgacccctcgctcggcttcgacaacgaactcgctggactgttgggtaacaaggcgaaggtggcgctgatcgtcacccgtcttgcctccgctgaactgttggccgcgttctgccagctgtcggacatctccgccgcatgcgtcggtgccaatcagggggccgtcgcggtgctgaagaatctggacggcgacggcccggaagccgcagccaaggacctgaccaccgtggtatccggcatggccgtgattcttgcagtcaatcgtgccgacaagctcgaagtggccatgtacgtgcagggagaggccggacagagtttcgcgccgcccgtgctgttcacctccacaccgcgcttcgtcgaggacctgatgctcggcatcgtaaccctgaaccaactcaagacccaagggttcgaagtggtggattccgctggactcgaccatgaccaggcgatgcagattctcgccaaccataccaagcgtgggcgtggcggacgcggctcccgcatcgaatagacgccaaccaaccagtaggggataggagagaatatgaccacagcggttgttttcgattacggtttcggcaatgtacgttccatggtgcgtgcgctcgccaatcttggcgtcgacaccaccctcacctccgactaccggcagtcgttggaggccgacggtctggtcgtgccgggcgtgggcgcgttcgccgcatgcatggaaggactgaagaaggtcgacggcgaccgtgtgatctatgatcgcatccgcgccggccgcccggtgcttggcgtgtgcgtgggcgagcagatcatgttcgaacacggtctggagcacggagcccatgccgcgggcatcgggctgatcggcggaacggtgaacctgctggacgccgacgtggtgcctcacatgggatgggacacgatcgaggccgcccccgattcggtgctgctcaacggcgtggagaatgaacggttttacttcgtgcactcctacgccgcgatggaagtgaagccggcggatacgtcccgcttcgacattgatctgagcggtgcgcccgaacgcgtgagctggtgctcgtacggccggtcgcgtttcgtggccgcctacgaacacggcccgctgtccgccacgcaattccacccggaaaagtccggggacgctggctcccagctcctcaagaactggatcgccacgctgtaaaaagcatgaagctcccctctgacgagagagctcaaattatgtataagtaactgaagaaaggctcttcttatgtcgttgactctgctgcccgccgtcgatgtacgcgatggcaaggccgtgcgcctgcgccaaggcgaatccggttccgaaaccgattacggttcgccgtttgaggccgcccgtacctgggttgaggccggtgccgaatggattcacctggtcgaccttgatgccgctttcggtacgggcaacaatcgcgatcagctgcgtgagatcgttcatgagcttggcgaccgggtgaacatcgaactgtccggcggcgtgcgcgatgacgcttcgttggacgcggcccttgaggccggtgccgcccgagtgaacatcggcaccgccgctttggagaacccggattggaccgcttcggtcatcaagaagtacggcgaccgtgtggctgttggtctggatgtgcgcggtcacacactggcggcgcgcggctggacgcgcgaaggcggcgacctgtttgagaccatgaagttccttgactccgtgggctgctcgcgttacgtggtcaccgacgtggccaaggacggcatgatgtccggcccgaacatccaactgctgcgtgaagtcgccgaacgcaccgacgccaaggtcacggcctccggtggtatctccaagctggacgatttgcgcgccatcaaggaactggccgagatcggcgtcgattccgccatcctcggcaagtcgttatacgcacgtgcgttcacgctccaggaagcgctcgcagtcgcgaagtaggcaaaggactcgccttagcgagactgttaagctacctttgctcagctatcgcttcactcaggcctcgcctacggacagcccattgggctgtccgcttaacggctcagcaaggaaggtcgccggatttgaggagctttttgaagacggtgtagtcttcatcattctgttcggcatagctgacggcgaacgaggcaatggcctgatcgaattcgtcggtgccacccatgtaattggcgatcgcgatcgaatcgccggtgcgggcgtgggcatgcgccaacgaccatgcgcacatgcgcgacagatcgctcaatcccgaagcgttgagattgtcgatatcaatcgaacccttgccattccacaactggcgcacgtaatagtcgcgcggtcggccatcctcggccataaagctcgaccaacccaacagcacatcggccgtattctgaatcagcttctgcccctgaaccacgcgctcaccgtgcgtggcgtacggcgacgcgccgcagtaatgctcgagcacggaatacgtggcctccttcatctgaatcatcatcggatcgtcgatatcacgcgcgatccacaccgacgtccacgcgcgctggcccaccgagcccacgcccaccaccttgcgggccgcgtcctgatagcgcaaatgatcgaacacccaacggcgatcgtcgtacagggaatgccggtagctctcgaacagcgtgtctatacgtgcctgcaacgcatccaagtcggcgtaatcatccagctgatatcggcaccagctcgggcggattggcggatggggtgagatgatcttcgcttatagtcactaccatagtgccgtgccggcatgggcccgaaccatgcctgacatgcggaccggggcatgttgatgaaatctcgcgactcgcaggtgacaaacagtgagatgttaacgcccctcgtaacacggttatggaacgataggcgactatggataaacagcaggagtttgcgctgcgcacggtcgaagaacgcgacgtgcgctttattcgtctgtggttcacggacgtgttgggaacactgaagtccgtggcgattgctccggccgaactggaagccgcgtttgaggagggtctcggcttcgacggttccgccatcgagggcatgacccgcgtgtccgaagacgacatgatcgttcaacccgatcccgcgacgttccagatcctgccgtggcgcggtggcccgcaaggtaccgcccgcatgttctgcgacattctgaccccagacggcgagccttcgctcggcgatccacgtcacgtgttgaagcgtacgctcgccaaggccaaggacaagggcttcacgttctacgtgcatccggaaatcgagttctacctgttcgaaagccaggacgactggtccaaggccccgaccccgatcgacgagggcggctacttcgaccatgtgccgcgcagcccaggcatggacttccgccgcgccaccgtgaacatgctcgagcaaatgggcatctcggtggaatactcgcaccatgaggcggggccaggccagaacgagatcgatctgcgatacgcggacgcgctcaccatggccgacaacatcatgacattccgtacggtggtcaaggagatttccttggagcgtggcattcacgccagcttcatgcccaagcccctggccgacgcgcctggttccggcatgcacacgcacctgagcctgttcgaaggcgattccaacgccttctacgaggccggtcaggagttcaacatgtccctgaccgcccgccagttcgccgccggcatcctgtaccatgcggccgaaatctgcgcggtcaccgaccagtacgtcaactcgtacaagcgcctgtggggcggcaatgaggcaccaagctacatctgctggggccacaacaaccgttccgcgctgctgcgcatcccgcagtacaagccgggcaagggcaactccgcgcgcatggagttccgtgcgctcgacccggtggccaacccataccttgcctactcggtgctgctggccgccggtctcgatggcatcgataagcagatgcagctgggcgaacccaccagtgatgacgtgtgggagctcaccgacggcgaacgtcaggctatgggcattcagccgctgccgcgctcgctggacgaggcgctgaagatcatggagaaatccgacttcgtggccgacgtgctcggcgaacacgccttcggctacttcctggacaacaagcaccaggaatgggaggagtacaaccagcaggtcacgccttacgagctgaagaagtatctgccgaagctgtaatcgcaagcgttgcacatgtgccgaaccccgtcgatgattggtcatcggcggggttttctatagcgtgtcgtggtggtgggtagcgggcagaggtgggaatagtgttgtcgctgagttgatacgaaaaacgattgacgtaaccgacgaatcagcttgtagtacgagcgagagcactcaagagagcacccatgacgaacacacctgcgaacaccgcgcgcaccgaccgcttcttcaatctgccggtcaccatcctgatcttcgccagcttcatgctgggcatgagcgaattcgtggtagtgggcatcctgccggacatcgcatccggacttaaggtctccgaagtgaccgtgggtaatctggtggccatcttcgcattcgtgtacgcgccctgcacgccgctcggatccgcattatccgcccgattcccgcgctttctcacctatctgacgttgatgggcgtgttcctcgtcggcaatatcctgtgcgccttcgcgccgaactatccggtgctgctcatcgcccgactgctcatcgcctcggtgtccggcacgctggtggccatctccatgaccttcgcgcccgacgtgaccaccgacaaataccgcaccaagttcattgcctgggtattctcgggtttctccatcgcctctgtggtcggcgtaccggccggcacttgggtggccaatactttcggctggcgtgtcacctttgccttggtttcggtgctcaccgccgtgctgatggcatcgatggcggtgtctctgccacgcaactcgcatccggcgaagatcggtttcctgaggcaattccgtctgttcttcgaccgccgcatccagctcggcgtggcggatgtggtctttggcgcagccgcctcctacgtcttctacacgtatctctcgccgatcatgcgcgacgaaatcggtgtgcccgaacgctatatcagcgtcggcttggtggtctacggctgtgcctgcctgtggagcaacctgtacggaggcaagctggccgatcggggcaggggggtcgagccgctgacccacattcgaccgatctactgcgtgcaggccgtctgcctgtgcctgctggctttcgcctcgctggtgccggccggcggcgcactgctgctggtggcgcttggcatgctcatgtacctgcagaattccgcttcccaggtgctgtatatggatgtggcctaccaatcccatcccggttcggtgaatctggccgcctccctgaattccatgtcgttcaacatcggcatcgccatcggctccgcggtcggcggcctggtcaacgacctccttggcctgacctggctcggcccggtcggcgcgattttcgcgctgctggcagccggcaccacgacactgctgcgtccgtacgtcagcccggtcggggaatgacgggtggcgtgacgcgcgggaacgaagggtttttcccgcgtgtccccgcggcatgccttatccgccgattgccgtccattgataacctgctatccaaataaccgataaggccacagcatgtcatcctgctgcgaaaccttaatgttaggacaccggctgcagggggacccggctcacgggcgcccacctgcgcggattgatgattatcggcatgttcagcgtgaaaatggggatgacaatatgacggatgcgactgcgaaagccgcgccgaaggcggaaagacggcggcgcgttctccgttccggcgctcgctcatcgatagtggtcggcggcgccatcgtgctgttcttcgtgctgctggcgccgctggccgggccgttgtcggccatcaccggcaacgacccgtacgccgagcatcccgaggccttgggtgccgggtcggtgccggccggattcggcggcggcatcagtgcccggcactggttcggcgtcaccccgctgcgcggcgtcgacctgttctccatcgtggcgtacggctcacggatctcgctgggcatcggcgtcgtctcgtcggtcatctcgctggtcatcggcgtggcgctcgggctgctggccggctatttccccgggttggtcgatgcgctgatctcgcgcacgatggacgtcttcttcggcttcccgttcctgatcttcgcgatcgcgctgtcggcggtggtgccgcagggcttcccgaggccggtgctgctgacgctagtgctcggattcttcggatggcccggcatcgcgcgtcttgtccgggggcagacgctgacgctgagcaagcgcaatttcgccgtcgcgtccaaggtgatgggcgcctcgcctgcccatgtgctgtggcatcagatcctgccgaacctcatgccgctgctcatcgtcaacatcacgctgtcgattcccgggcgcatcggcgccgaggcgggcctgtcgttcctcggcgtcggcatgaacccaccgacgccctcatggggccggtccatctccgacgccgtgcagtgggcactggtcgacccgatgtatctgatcttcccgggcgccgccctgttcctgctgaccttcggcttcaacctgcttggcgatggcctgagcgacgccatcgacccgcgcaagggggtgcgtgcatgagaatcctgcaatacatcggcaagcgcgtggcgagctcgatcgtcgtcatcctgctcatcacgctggcgctgttcctgatcttcttcctgctgccgaccaatccggcgcagctgtcgtgcggcaagccgtgcacgcccgagcagctgcagcgggtctccgccttcatgggcaccgataagccgtggtacgagcagatgggcaattacgtggcgggcatcttcgtcgggcgcaccttcggcagcggcggcggcgccgtggtctgctcggcaccatgcctcgggtattcgttccgtctcaacgaatcggtgagccagctgatcctcgaccgcttcccgatcaccgcgtcgatcgcggtcggcgcggccgtgctgtggctggtcatcggcgtggcgaccggcgtgtgggcggccctcaagcgcgatacgctgatcgaccgcacgctgctcgggctgtcgatcgtgggcgtttcggcaccgtcatacctgatcggcctgctgacggtgatcgccttttcgctggtgctgcagatattccccagcggcgggtacgtgaacttccacgacgaccctgtcggctggttcacgcatctgctgctgccgtggctggtgctggccgtgctcagcgccgccggctacaccagggtcacccgcacgcagatgatcggcgagctgagccaggactacatccgcaccgcccgctccaagggcgtgcccgaatcggtgatcatcttcaagcacgcgctgcgcaacgcgctgctgcccgtgatgaccatgttcggcctcgatctgggcgggctgctcggcggcgcggtgctcaccgagaaggtgttctcgatgcaggggctcggctcgctgctgctcgattccgtgtcgaacctcgacctgcaggtgctggtcggcgcgacgatgttcgccgccgtgctggtcatcgtcgccaacctgatcgtggacatctgctacagcctgctcgaccccagggtcgcgctcggcacgaagtagtgcggctgcggccgcaacacgcgatacttgccggtctgctccacggaccggcaccgatagagaggaaaaccatcatgaagaacaacgcatggcgcgtattcgcggcgggggcttgtgccgcggtactggcgctgtccggctgcggcgcgtccaacgacaacgccgccaccggctcggcgagcggcaccaccgtcaagggcggcacgctgaacgtgctgctgtccagcacggagatggatctggacccggccaagagccagggtctgccgaccaccacgaacggcaacatcttccgccgcctgaccgcgtggaagatcaccgacaagggcgagacgaaggtcgtgcccgatctggccaccgacaccggcaagtcgagcgacgacggcaagacgtggacgtacacgctcaagaacgggctcaagttctccgacggcacgcccatcacctccaaggacgtcaagtacgggctggagcgttccttcgccgactcgctgaccggcggcctgagctaccacaagacgctgctcgagggcgcgcaggactaccacggcccgttcgacggccaggagctcagctccatcgagacgccgaacgacaagaccatcatcttccacctcaacgcgccgttcggcgactggccgtgggtcgtctcgctcgccgcgttcacccccgtgcccgacggcaagggcccggcgtccggctacggcaagctgccggtggcctccggcccgtacaaggtcgagtcgaacgaggccggcaagcaggccgtcttcgtgcgcaacacctactgggacaagaagaccgatccggtgcgcaccgcgggccccgacaagatcgtgttcaagatgggacaggacacctctgtggccgcccagtcgatcatgcagggcaccggtgaaggcaagaactcgttcctgtccggattcgtgccggccgcgcagctcgcgcaggcgcaggccaacccgaactacaagaagctgctgaccaccagcggcgacggcgcgctggaatacctcgccatcaacacccaacacgtgaagaacgcgaagattcgccaagcgctgcagtacgcggtcgacaagaaggcctaccagacggcttccggcggcgagatcgccggcaacttcgccaccacgctcattacgcccggcatcgagggccgcgaggactacgacctgtacaaggccgatccgaccggcgacgtggacaaggccaagcagctgatcaaggagtcgggcgagcaggccccgaccctcaagctcatcgccacctccgctcaggccgaaaccgcctcctcgatccagacgagcctcaagcgggccggcgtcaaggtggacatccagacactcaacgacgatgtgtattccgatacgctgaccaacgacaagggcgactacgatctggccatcagctcgtggcagcccgacttcccgtcgccctacgccaacatctccccgctgttcgactcctcgcagatcggccacggcaactacaacctggcccgttacgcgaacccgaaggtcgacgagctgatcaagaaggccaccgagaccatcgatcagaccgaggccggcaagatctgggccgaggccgacaagacgatcatggccgacgcgccggtcgtgccgctgatctattcgaagaacacgttcatccacggatcgaacgtgaccaacttcgtcatcggcaacttcccggcgtacccggactacacgcaggtctcgctcgccagcgcgaactgagccggcatccgcatccggcgcgcgccggcggcatggtccgctggcgcgcgcgccggacgcattccaacgcttgtgcatccaaggagcttccaatgagtgaaccacgcgcgatcgtgaccgtggacggtctggccgtcagcttcgacgagcgggaggtgacccacggcgtcagcctcaggctgttcccggggcgcatcaccgctctggtcggcgaatccggctccggcaagtcggtgacggcgatggcgctgccccgtctcgatccgtcggtggccagcgtgaagggccacgcgtacctcgacgacgcccttgtggatgacgggccggactccggtccgggcggcgacggcaaggacgccgccggtcgcggcatcgatctgctggccgccgacgcgccgctgcaacgcatccgcggcgaatacatcggcacggtgttccaggaaccgtccaccgcgttcaatccggtgttcacgctcggcgtacaggtcgcggaatcgctcaaataccaccagaagcagctcagcgccgccgagcgcaaggccaaggtgctcgaacagctgcgcgaggtcgggctcgacgacgccgaacgcgtgtggtcgtcgtacccgcatgagctgtcgggcggccagctgcagcgcgtgatgatcgccatggcgatcatcaaccgacccaaggtactcatcgccgacgagccgaccaccgcgctcgacgtgaccacgcagaaggcgattctcgccctgatctcctcgctggcggtcgacctcgatctggccgtgctgctcatcacccacgacatgggcgtggtgtggcaggccgcgcaggacgtgtacgtgatgcacaacggcgtgatcgtcgagcaggggagcgtcgcgcaggtcttccgccacccgtccgacgactacacgcggatgctgctcgacgccgtgccgcgcctgcgcatcgacgagcatgcggtagacggcgaacatgcggccggcggcgaacgcatcacggaaagtgacgcgcccggcggcggcaggcgcatcacgcaggtgaacgacgtggccgtgtcgtacaaggccggcagcttcgccgtcaaggacatctcgttcgatctggtggccggcaggacccgcgcgctggtgggcgaatcgggagccggcaagaccacgatcgccaaggtgatctccggccagctcgcgccaacctcgggcacggtgctcatcgagggggaggatctcgccaaggcgcatggcaggcgcaagcgcgagatcctgaagcatatgggctatgtgttccaggacagcggatcggcgctcaacccgcgcaagtccgtggcatggagcatcggcgagccgatgctcgtgcagggcgggctcagcgagacggaccggcgcaagcgcgtccttgaattgcttgatcaggtggagctgcccgccgatgtggccggccggttcccgcaccagctgtcgggcggccagcgccagcgcgtcggcatcgcgcgcgccttggcgctcaacccgtcgctgctcatcgccgacgagccgacgtcgtcgctggacgtgaccgtgcagcgcaaggtgctcgacctgctgcgccggctgcagcgcgagcacggtttcgcatgcctgttcatcacccatgacctgggcatcgtgcaggagatgtccgatgtgatcacggtgctgcgccacgggcgcgtcgtggagagcggagagaccggccgcgtgctcaaccatcccaaggccgagtacacgcgtaccctgctcgacgcctccccgaagatcgacctgtgagccgtgccgctcgtcatccggccggttctccggccgtgcggcggggcggcgacggcgcggatgacacctagccttaccgtggtttcggtttttgccgttcccgcccctatcggcgcgcggcaccgaaccagttggtgtatatgagggcgaagttgcggttgccgtagctggagcatgagtcgccctcgccgaacccggccgccagcgaggcgtcgttcggctggtagggcgtgtagatgtagagcagcgcggtcgccttgttctcgatgtacacgttggtgccgccgcacccggcatccgggtggtactggatgtagttcagcgcgttggcgtgatagccgtaggcgctttcatgcgccacatagtattggtagcggtgcgccgccccgtacacctgtctgaagaagccggcataggccggatcgcagttcgcgttgtccgggcagctcagccccatggcggccttgtactggaagtccgtcggatcgacggccgtgaccaggtgctgctccttctgcagcacggtgagcagcaccttctggctgatgccgcacgcgcgcgccgacttgtcgatgatcgcggccgcggtctcctttctcgcgccctcgtacgccgcgcaatactcgttcgccgcctggtcctcggtgtcgaaggtcatggttttcaggcaccgggaaccgctgcacgccgcgccctgcttgtcgaggaacgcctggacctcggcctcgctcatcgcattggcgttgaagaactggccgtccgagatgatgtcgccgggattgaagtcgtattgctgcgtcagctgcagctggcgggcctcggcctcctgcacgtcgcgacgccactggacgacccgcacagtgcccacgaccagcgcgaccacgcatgcggccgccaccacggtgaccagcacagccgcgacgcgctgcgccaacccggcccgcttccaccagcgcgccgggctgagcggatacctgcgattgcgcgggcgtttgcccgggcgacgtttgcgattgccgcctgacacgccccgccccgcgacaatcacgttcgccctgccgcgcggattggccggcttgcgccgttgcgtcgtcgccatcgctacgccagtgccttcttgatgcgctgcaggctcaccggcttggcggtgccgagttcctgcgcccacagggacacgtagaattcctcgagcatccagcgggcggcggtcgcctgcttcatcagcgtctcgtggcgggggccggccggctccgccttggccttggccatcgccttgtcgaccagcgtgcgggcctcgtcggcctgccaggcccacttgacgtcacggttcttatcggttttcgccttattgagtcggctcagatcggctctcaaatatcggctcaacgacttcagcgcatccgggggagtacgcccgatgaatccggggtagaccagcgtggcgatgtgctcgcgcaccgactgcagcaccgacagcatcggcaagtcggccttgccgccagtggccttgtcgacttcggcataagccttgagcacggcgatcacgtcatgcgccacctgatagacggtgtcctcgtacacttcgcgcacatcgagcaccgcattggccaacgcctcatcgtccgagagcctgtcgacattcggcatcagccgtttgactgtggccagctgcaggtcttcgaccagatccttggtggacttgtacggagcagaagccagcatcaacgcctcggtacccagccagcgcgacgaaatgcgttcggccggcaaccgcagcgcatccaatgcgccacgccagagcatcgtggcccgggactcggtggtggcacccgccttatgcaacaggttcgcctgactgaccagcttgccctgttctccagcctgatcggcctgcttcttgaccatctgacgggccgacgcctccgcctgcgcggcgaacttgcgttgcagcgccttcagatccttggacacacccagcaccttgacggggccgcgcgcatgccggcgtccacgagggtgcttgccggccggcagttgctgctccaccgagaacgtgaccctgagatacggggaaagacgctcgaccagttccggccccaacacttcgggatgaatctgcgcacccttggtggcgatggccgccttggtgaacacatgtgccaaatcaggccagccaacggtcgtgccatcctcatccaccggcggcagattcggcttctgctgcgagcccgagcccggcagatccgggtaatgctcgtcgatccagtcacgaatcgcacgcgcggcatccggggccggcacgaactggacgcgcagctgcttgggcagcgccttgatcatcgacagaatcagctcatccaacaggcccggcacattccatgtgaactggtcgggcgtgatacgcgagagcgccttcaacggcacatgcacggtgacgccgtcggccgggtcggccggatcgtatacgtagctcaaacgcaggtcgatgggttggccgtccgatccggtcgtatgccaatggtcggggtaatcgtccagactcaccgaatcgctggatgccagacgctccaccttggctgggtcgaaatcaagcagattcggctgacggtcatgctcggacttccaccatttcgccagatcggccacgctggtcacatcgttgggaatgaccgcgttgtagaagtcgaacagatcctcgtcggacacggtgtccgccagctggcgggtgcggctcgcgtcatcggcggcatcctcgagaatgtcacggtttttgcccacaaagtcgtcgtaactgaagcgctgctgaatatcgccctcgaccagaccctggcgaatcaggaagtcgcgcgcctcaagcggattgatgcgtccccactgcacggcacggtcctgtacgatcggcagaccatacagcagcacgcgcgcggtggccacagccgagccacgcgaacccgaccagtgcggctccgcatacgtggtgcgggtcaattggccggccaacggttcggcccacgccgggtcgatggccgccgaatagcgggcccacaggcgagaggtctccaccagttcggtgctcatcacccatgacggggtcttcttggccacggcggaggcggggaacagggcgaaacgggtgccgcgcgcgccctgataatcgttcttcgactgcttctgggcgcgtttcatcgcacgggcgcgcgccgcaccggtcagccccgcgaaatcggaggccttgggctcacgcaccacctgcatgcccatcatcgacagcaatccggcgagcatcgacttgtggatgccatccgcatcccacgagcagcacagcgaatgcgcggcctgctgattcaacggcagctggcgaatctccaagcctgggcgggaggcgggcaacgggtcgccgaccttgaacttcagctccttgcacatctggcgtagctgggagacgagatctttccactggcgtatcctcagccagctgagatactcggttttgcagatacggcgcagcgcgttgttgcttgggtcgccgtccgcttggaacacgcgatcccagatgttcagggccgtcaggaaatcggaagtctcatccgcatatcggttgtggatacggtcggcatcctcacgcttgtcgtccgggcgttcacgtgggtcctgcaagctcaggaacgccacgaccacgagcacctgggccagaagattcggcgaaccggttttcgcggcctcgataaccatacgtcccagacgcacgtcgatggggatgcgcgccagctgacggccggtatgggtgagcgtcacctcgccgcgctttcggccgatggccttgagctcggtgagctcattgaaaccgtccgacacggccttcatatccggcggatcgatgaacccgaagttcgtgacgtcctcggccgtgcgggccacgcccaccgacagcatgtgaagcaccacggcacccagcgaggtacgcaggatttccggctcggtgaagcgcggtcgggtctcgtaatcctcacgcgaatacaggcggatcgcgatgccgtcggccacgcggccgcatcggccggacctctggtcggcactggcctggctgatcggctcgatcggcagacgctggacctttgcggtcttcgaataccgggagatacgggcggaaccggggtccaccacgtagcggataccgggcacggtcagcgaggtctcagccacattggtggcgatgacgatgcgctgatgcaaatgcgattcgaacaccttgtgctggtcggcggcggacaatcgcgcgaacagcggcatgatctcgatggcgtccggtcggcgcatgtcgtcggcgcgcggaccgtaatgatgccgcagtgcggcctcgaactcgtggatgtcgcgctcgccggaagcgaagaccagaatatcgcggggaccgcgctcgtgggaggagtggatcaccagttcggcgcaggctcgagccacggccgtgggcatatcggtgatgccgtcatcggcataggagtcgtcggaccggccgcggggccggtcggaatcggattccgcgatggcgctggccagctcgtcgtaatcggcgtcgccggggcgggcgcccaccgcgaatcccggcacttcgcgcatcaacgcgggcgcggtgccaagcggctcatagaccacctgcacggggaaggtgcggccggaaacctcgattaccggcaccttctcatgcaaggcgtgctcgaaatgctcctggaacttgaccgaatcgatggtcgcggaggtgatgatgagcttcagatcgcggcgctgaggcagcagtgccgtcagatagccgagcagaaagtcgatgttaagactgcgctcatgcgcctcgtcgatgatgatcgtatcgtattgggtgagtttcggatcgcgctggatctgggcgagcagaataccgtcggtcacgactctcaatcgcgtgctgggcgagctttcgtcggtgaaacgcacctgatagccgacctcgtcaccgagcttcacgcccatctccgaggcgatacgttcggccaccgtgcgcgcggcgatacggcgaggctgggtgtgcacgatctgcttgccgtgcgtgccacggccaagctcaagcaggatcttcggcagctgtgtggttttgcccgaaccggtctggccggacacaataacgacttgggaacgtttgaccgcgctggctatctcatcacgcgcggcagatacgggaagttctgcaggatactcatatttcatgacggacttcaatgatacggaagcccttggagctcgcgtatttgctcgcagtgaacccctcgccgagcgcatcgtccagccaggggatcagcgaatcggaaccgagattcttctgcactacgagataggcggcaccgcccaccttgagcttcggcagccaagccataagcaatgtatgcagcgcttccttgccgactcggatcggcggattcgaccaaatcacatcaaacgtgaggtcgcccggcaccgtctcgcagaacgccggctggttctcggcgggcaggggagtgctggactcgtccacctgagccgtatgaatgttcgtgcgtccgttcgcctgtgcgttggcatgggtcaggtccagcgcgcgctcgttgacatccaccgcccacacgttcgcttcgggcgactcaaacgccaatgtcagggcgatagggccccagccgcagcccaaatccaggaaatcgccggtaagcggcggctcgggcgcatgcttcagcaataccgatgtaccgaggtccacgcgcgagccggagaacacgccgttcgacacctgagcggtcgcctcatgaccgcgcaacgttacgttcaatgtgcggcgcacatctttcgacgcgggttccgcagagaaatactgttctgccatggtcgctccatttctgcgggattcgccgctctcgtatgccgacctgtatcagccggcctatgccggtacgtgccgatctatgccagcatgtcacctcatgtgatgataataaaggaccatagaagaatcgtgaaccattccaaccaaacgaggcgcacttgaccgacaacacccagtacaccgacatcgaccgcggcaacaacgacgttacccctgaaggtgtgctggccgggcagtccgaagtgctgctcgacgacagccagcgcgcgaccggctggcacgaggacgccaaccaggaatgggaggagcgcgaggcccgcaacgagctcaagcatgtcgccggtctcggcgagctgcaggacgtcaccgaagtcgaataccgcaaggtgcgactggaacgtgtggtgctcgtcggcgtctggtcgtccgccgtcaccacgcaagccaaggccgaggaatcgttgagggagttggcggcgctcgccgaaaccgccggtgcggtggtatgcgatggtttgctgcagcatcgctccaagccggatgcagccacgtacgttggttccggcaaagccaaggagattgccgacatcgtggcgcgtgaggaagccgatacgattatcgtggacgacgacctgccgccgtcacagcgccgtgcattggaggacgcagccaaagtcaaggtggtggatcgcaccgcggtgattctggacatcttcgcccagcacgccacctcgcgtgaaggtaaggcgcaggtggagttggcgcagctcgaatacatgctgccccgactgcgtggttggggtggttcgctgtcccgtcaggccggcggtcgcgcggcaggcgcggatgcgggcatcggatcgcgaggcccgggcgagaccaaaatcgaaatggaccgtcgtgtaattcgcacgcgtatcgccagactgcgccgtcagattcgtgagatggccccggcacgtgaggtcaagcgcggttcacgccgtcgcttcggcctgcccacagtggccgtggtcggctacacgaacgccggcaaatcctcgttgaccaaccgtctgaccggttcggccgaactggtggaaaacgcgctgttcgccacattggacacggccgtgcgccgcgccaaaacccgcgacggacgcgcttacgcctacgtggacacggtcggcttcgtgcgccgcctgcccacccagctgatcgaggcgttcaaatccaccctggaagaggtggccgaggccgacgtgatcctgcacgtggtcgatggctcccaccctgacccgttctctcaggtcgacgcggtcaatgacgtgttggcggacatcgaaggcacggcctcgattccgcgtattctcgtattcaacaaggccgatcaggcggacgaggcgacacgtgaacgactcgccgcactgcagccggatgcgttcatcgtctccgcctataccggtgagggattggacgagctgcgtaccgcggtcgaaagtctgctgccggtcccgcatgtgcatgtcaacgctctgctgccgtataccgctggctccctgatctctcgtgtacgcgaatacggcaaggtggacaaggtggagtaccgcgatgatggcatacagcttgaagcggacgttgacgcccatcttgccgctcaggtggtcgaacagtccattgactaacgtgataaacatcacagtttgtttgtgagcgctaacaaccgttggaaacattaccataccgttatcagacagggtggtgtgctggtagcaaaacgtcttagcgggtttatagagtgaaaaccgttagttacaaggcctgccattcatcagcagaccgcctttgaagagaggttcatccatcatggcggaaactaccgttaagcccacgaagcttgctgttattggtgccggtgccgttggctccaccctcgccttcgccgctgcccagcgtggcgtcgctcgcgagatcgtgcttgaagacatcgccaaggagcgcgtggaagccgaagtgctcgacatgcagcacggctccagcttctacccgaccgtgtccatcgacggttccgacgatcctgagatctgccgcgacgccgacatggtcgtcatcaccgctggtccgcgtcagaagccgggtcagtctcgtcttgagctcgttggcgctaccgtcaacatcctcaaggccatcatgccgaacttggtcaaggtggctccgaacgccatctacatgctcatcaccaacccggtcgacatcgctacccacgtggctcagaagctcaccggtctgcccgagaaccaggtcttcggttccggcaccaacctggactccgctcgtctgcgcttcctgattgcccagcagaccggcgtcaacgtcaagaacgtgcacgcctacatcgccggcgagcacggcgactccgaagtcccgctgtgggagtccgccaccatcggtggtgtccccatgtgcgactggaccccgctgcccggccacgatccgctcgacgccgccaagcgcgaggagatccaccaggaagtcaagaacgccgcttacaagatcatcaacggtaagggtgccaccaactacgccatcggcatgtccggcgtcgacatcatcgaagccgtcctgcacgacaccaaccgcatcctgcccgtgagctccatgctcaaggacttccacggcatctccgacatctgcatgtccgtgccgaccctcctcaaccgtcagggcgtcaacaacaccatcaacaccccggtctccgacaaggagctcgccgctctgaagcgctccgccgagacgctgaaggaaaccgccgcccagttcggcttctgataaaaaatcgctgtacggagcgcctttcacaccgcacaaggttcgaactacctttgtaggccttcaccttgtgcggcacgaaaaatcgcacacgtacagtgattttttataccctgctgaatgcttccagaggaagcattttttattcgtggaattcgttggaggagggggagctatagccctcgggctcaagctggaaggtggtgtgggggaccgagaccgggaagtgctcgcgcaggcaatcctgcagttgggtgaggattgtggcggcatcttccatggtgaggtctttgtcgactaccacgtgggccataagaatcggcatgtcggtggacaccgtgctggcatggaggtcatgcacggcaagcacatgcggcacgtcttccagatgctcgcgtaccttatcgagatcaagaccatccggtgtttcctccagcagcaccttggccgcgttgtgcagcagcttgatggcgcgcggaatcatcatcagtgcgatgacggcaccggccacggcgtcgaagccattccatccggtggagatcattaccagggcagaggccaccacagacaccgagccaagtgcgtcgttcattacctcgaggaacgcggccttcatgttcatgttgtcttcgcgctgcgaggcaaggatgaagatcgagatgatatttgcgacaagacccagaatgcctacgaacagcagcaagccgatatcgtcgatttccgctttggagccgccgaacagacgcatgccggcctctaccaacgcatagatgccgacgataagcaatactacggcgcccgcggcagcggtgagcacctcaagcctggcccagccccaagtacgagtgttgttgggcttgcggcgcatcagtatggcggtgattgtggatgccaccagcacggacatgtcggtgagcatatgaccggcatccaccagcagggccagtgagccggttaagacggccgacaccacttcgatgaggaagaccgaaccagtgacggtcaacgtggcaatcagcctgcgctggtgcgcggcagggtttacggatgtggatggtgcgggtgtatgggtatgggccatgtgtactccttcgctctatcgagttgaaaccgcttctcaataccatttgcgatatggtctgaatacgacgaaaccccggcgcgaggccggggtttcgtaagcagtgtgcgactatagcacgaccagcgcgattcagcgcacgctgatcagctggtggcgaacaggctataatttgcgcagtacggtgaccaccttgcccataatcgtggcatgtgtgccgtcgatgggcgagtatgcggggttgtgcggcatcagccagacgtggccgttttccttgcggaaggtcttcaccgtggcctcgtcatccaacagagcggcgacgatatctccgttgacggcggaattctgttcgcgcaccaccacatagtcgccatcgcagatagcggcatccaccatggaatcaccgtggacttccagcatgaacagggtgccggagccggtcagccgttcaggcagacgcatgacgtcgtccacatgctgttcggcggtaatcggcacgccggcggcaatacggccaacgagcggtacgtcatgtgattcggcaatagcttcggcggggaattggtatatctccgccacattgctggcgctggttgcctcttcgctggcttgtgatggcttttcggcattcggggcggatcctgccatcacctcgatggcgcgacccttgttcgcgttcatgcgaatgaagcccttgtcttccaaaacttgtagctgatgcttgaccgaagacggacttttgagcccggcggcatttccgatctcccggaaagagggagcaaagccttgttcgtcgatatgcgtgcgaatggcgtccaacactttgcgctggcggtcggtcagggtggactcgtccggcttctgcttgggggagaggggaatggtgctcacgtcagggctcctttcgttatgtcaccagcataacgtgttgttcgtgtgaaatcaaacatctgttcgagcttcgacttgaccgtgtcgaacatttgtgccattataagaacagttgttcgatagaacatctgttcgagagaggtggtcgtgatgactggttcaatggtgatggccccggcccgtagcgcacgtgtagctatgcagcatgctggaacgtcccgccggaatgtgcgtgggcggattatcgcagtgatgatcgccttggcgctggcctggtgtggtttcggcgcgcttaccgctcagcgggcccaatcagatacgggtgccacgcaggtgaccagctatatcgtgcggccgggggatacgctctggtcatatgcttcggctattacacctgctggccatgatgtatcggaaacagtggatgagctgattacgctgaacaatctcgagtccggaacattgcaggccgggcagcgcattattgttccggttgagtaaatgaaacccgagcggcatggtttttccgcccgtacacgttattctggagagcatgcattgccctttttgccagaaccccgacaccaaagttattgatacgcgcattagcgatgacggtcattccatccgtcggcgtcgcgtatgcccgaaatgcaacaagcgttttaccacggtggaaaccagtatgctgctggtcactaaacgttcgggtggcgtggagccattcagcagagacaaagtgatttccggcgtacgtaaagcctgccaggggcggccggtcagagaagaggatctgaagctgctgggacagaaagtcgaagaggatcttcgctcccgaggccttgccgaagtcacctcagatgaagtgggcaaagccatcctgaaaccgttgcgtgacttggatgtggtggcgtaccttcgattcgcgagtgtgtaccagaactttgcaggtctggaggatttccaaagcgccattgatggtttgcgtgaataatatgcgaatgccatgcaccgtgatatgcgagtgattcgcaaaccatggtgcgaaccaatcatgaagccctgcacttatgaaagagacccgtcagcgtgaactgcgccccgattgttggacgtggtttattaagggtacctgattaggctgtgagggacatgttccggaattcctccggggtgtgtccctccagtcgtatctggcggcgtttggtgttccagtggatgatgtacgcgtccagttcgttcttgaactgttcgtatgaggcgaactcgcgtccggcgtagaactcgtccttgaggtggccgaacacctgctcggtcgcggcgttgtcgatgcagttgcccttcctgctcatggactggcggatgttcagtcccgcgagccggtcgcgccaccaccggtgccggtactgccagcccatgtcggagtgcaggatcgggttggcgtcttcgggcagcttctcctcgagcatggcgagcaggcgccactgctgggccatgtcgggatgccggctgacgtcccaggccacgatctccttggatcccatatcgtatacgggagccagatacgccttgccgtcggcgaccctgaactcggtgacgtccgtgcccagcttcacccacggccggtcggccgtgaagtcgcggttcagcaggttctccaccctcgcgcccgtctcgccccggtacgagctgtatttccggtacgggttcggcctgcgtatccggcattccaggcccatgcgcctcatgaccttcagcacgctcttgtggctcacccgcaccccgaactcgtgcacgaggcacatgcgtatctgccggtggccgcacccgttgggcgtgcgcgcgaatatctcggcgaccatcggctcgatgtccggccgggtcacggcggccggatgcgacagaagatggtaatacgtgcttttcgccagtccggccgccctgagcaggtgccggagctgatgtcccagccccgccagcatggagacgatcaccgttctgtcccggttgccgatctccacgccagcagggcgtcgactttttccaggtacgcgaccctcgccttgaggtacgcgttcttctcctcaaggagctgttcccttgtgggagccggcctcggcttggatttcgcgcccttgggcctgcccttcggtttcggacgcagcgcgtccgggccgccggaccggtactcgcggcaccaacgctccaacggggtgagactcgcgatcctgtacttctccatgacttcggccttcgtcagcccatgctccacatggtcgcgcaccgccgcgagcttcgtctcgtagtcgtatctcctgttgccttcgcgttctcccatgagcgccgcctccccgccaaaccggtatgacaacacccattttcccgcggtactgacgggcacgccaagccggcgggcgagagaacgcctcccagccccgccccggatcaggtcggcgacgacccgcatgaaaccgtcatcgtaatgacgcctgcgatccctacacatgagaaaccgcacctccgatcatcgaatctgaattacttcagtccaacaatcggggtgcggttcagcgacgggtctctttcatatcaatcgaggatgagctgcgtcagctgatgacacgcatgcgaacggtgccctcgatgttgcgtagtgcttcaagcgtggcggcgctgggcttctgagccacgtcggtgaccacatagccaagttcgccttcggtggccaacgactggaaggaaacgttgatgttctcttcgccgagcacgcgattgacatgagccagcacaccaggaagattgtcgtgcagatgggcgatacggcacacgcccttgcgttcacctaggttgatctgcggtaggttcacggacaatgaggtagaacccttgaaccagtaatcctcaagacgctgagagacgaaatggccgatggattcctgagcctccaaggtggagccgccaatatgaggagtcagaatcatattgtcttcgttggccagtgaggtctcgaacggatctccgctcttcttcggctcaacggggaacacgtcgaccgccgcgccagacagatggccggaatcgaggtgctgcttcagagctcccagatcggcgacgaaaccgcgcgaaaggttaatgaaaatcgcgtcctgcttcatgtgggcgaattggtcttcgccgaagaagccggtgttcgacttgcggccatccacgtgcagggtcacggcatcggactgttccagcagttcgttgagggtatcgcaacggtgggcgttgcccagtgccagtttctcctcgatgtcgtagaacaccacgcgcatgccgagggcctcggccagtaccgacagctgggagccgatgttgccgtagccgatgatgccaagggtcttgccgcgcacttcatgcgagccggaagcggacttgtcccacaggccatgcttgatgtgatgcgtgtgtgcgggaatgcggcgcatcaagcagatgatgtcgcaaatcaccaattccaccacggaacgggtgttggagtagggggcgttgaacacggcgatgccacgcttgccggcatgtgccagatcgacctgattggtgccgatgcagaagcagccgatggcgcttagcgtaggacgcgcatccagcacgcgggctgtgacgttggtcttggagcgtacgcccaccaagtccacgccatccagcgcgtcgatgagttcgtcctcgctcagggctcccttcatggtctcgacttcgaaaccgtgatcacgcagcgatttggccgcgtcggggtgaatgttttccaataacagtgctttgggcatgcttcataccttagatgttcagggacttttcgtccgttcttgtccgaactataaccagtttctgggtcggcctggtcattgccacgtacaggtccgaggcggcgaccaggcggctcggcgcgtcatcctcgatgagaccgggctcgaccaccacgacggcatcgaactccagacccttgaccgtttcggtgccgcagacgctgatttgctcatcccattcgggctgctcgatgagccttgcgtattcggccgggtcaagaacggcggccagtttgcggcgcacggcgtcgcgcaccggggcgatgagatcatccggacagatgacggcgatgcggccggtgccgtctgccgaaacgaattgttcggcaagcagcgccgcctgctcggccgtcgtttccagcaaggacgacatgtcgggcaccacattgcgggacaccgaatcggggatggtgcgcaccgcattgaccgtggagatgtagaggccttccttctcggcaaatcgtgaggcgagttcggaaacttcctgcggattacggtagttgatggtcaactcgttcagatcccagtggctttcgccgaacaggcggttcatcgatttgctccagcgtcgggtgccacccagcgccgaggtctgcgccacatcgcccacgatggtgaacgagcgggaggggcaacggcggatcaacatacgccagtccatggcggtcagttcctgcgcttcgtcgaccacgatgtgcccgtaggtccattcacggtcggccgcggcccgctgcgcggtcagctcggcgtcgtccccgttcatctggtcgagcagcatctgactggagacgatgcctccacccagaccggtcgcggccagagtgtctttggcatactgctcttcggcggcacgacgtgcgtcggcggcggactggcgggccaccgccttgggatcggggcccagcatatccattgcttcgtcgagcagcggaatatcggagcgggtcaacggggagcctttggggcgggcaagtgccgcgatgtcgttgtcggtcagccaaccagccagagacttcagacgttcgggatgggcgaacagctgatcgatgagccatggggcggtcatcggcagccagca

SEQ ID NO: 564 - DNA, 27698 bp, Unknown
  R48_24m  MAG No. k141_82487
ccatgtgttgcgtttgattccgcggctgaccgtggaggcgtgtctgccgatcaggccggcgatccgccgtatgctcgtcccgttgccgatctctatccggatgatccgccgttcctcttccgacaggtgcgaatacacttgacccaaggcgcgacaccccttcactggttatctggacaatctccaatctaaagggtgtcgcactttcaaatagacaacgggccacattttcatgctttatgcaaaaaatgtgaggcatacgcacatttcccatcaaacgcacaggtgcaagaatggcagcaattcgccattttttgaaatcaccatgtgcgtttgacggcgcgtaagcctcaccttgttctcagcaggaccgaatttctgtgagctccctatagcgcctccctacgcaatatgtccgcaaacgaccacaccacatgggcgatacgcgccaattcggcgtagcggccgatggacagccactgcacacggtaccgttcgaaccacaactccagatcggcggcaagacgggcgcggcgcgaggcacccagcgcacggccggtcacatccttggtgtcacaggcgtcctcgccgccagccagtaccagcagttcctcgcccagtctattgaacaaccgctgcccatccagcatcacccacagcagttccgggttcaatcctcctcgtgccgagccatcgagcaccgcaacaaccgcactgccgcaatcgatcaacgcccggtcgcaatcccggcgtcgttcgagtcgggcatggttccgcaggagcagccggcggcgcgcatcggcgcatcccagcgtacggtcaaacacgagctctcccccgcacgaccgttccacatacgatgccacatccgtattcagcatgccggtgccggaaccgtattccagctccagcacctgcacggcaaggtcccaggggaatgacaccccatcggagtcgatgcggacgaggcaatccatgatgcgaccggactcgtcgccatacaccagaacggagatccgacggttcatctcatgctcatcgatctcaatcggattccacgcgttctgagcgccataacacaggcccggcacgctcagacgcggatcgttgacgtggccgtaatcgccccaatcggtgaccaccatgccttccgcgccatacttgacacccgccaatgccatgtgatacgtgttcagccaggcacccgcataatcggggaagaaccggctccaagcccgcaccgcggggcacacgaactggcgacggccctgcgcggcgatggtctggatgttgctctcgtcgatctgcggctcgtacatccagttgagcatcgtgatgtcgccgggcagcagatccatcgtgcgcgggctttcgagcgcgatgtccgcccacaacatcggctgccgaccatggcgggcgagcgtttcgcacaaatccctgacgaaaccggcatacagttcatcgcggccggcttccggcgcgtcctgcgcggacctgccacgtcccaagtcgaacgtctcatcgccgccgatattgaaggacttcgaacggaacagcggcgcgtattcctcaatcaggcgcgaggcgaaatcatgggccttgggatcggcggcgttcagcgtgtgatgctccatgcgttcgatgaagctgaacgggcggtcggcgtcttcggggaactcacccagcccgcgatgctcacgggtgcgcagattcatgtacatgtgcccgaacgtggccaacgacggcaccaactcgatgccgcgacgcgcgcagtactcgtccagatacgtgatgtcggcggccgtgagcggatcggtgccacgccacgcctcgctgagctcgacgaacgcgaaggcatgctcgacatacagctggaactgattgtatttatataaggccagctggtcgacgaaccaggtgaggaactccatcgtcggcactcgtccgcgtgtcacgtcgagactgtaggcgcgcaccgcgaacgcgggcttgtcttggatatgcaggcagggaatggcacgcgaggtctgcccgatgatctgccgcagcgtctgcagaccgtaccgcagcccgctttcgccgccgccacgcacggcgatggtatctgaggcgaacacatccagcgtgtattcgtcatgcgccaatcgtgaatccaggcccagggatatgacggtgccgttcatcgctgccggcgcacccgcacgcgcatctcgcgcatcttcggcggcattggcgctggcgtcgtcttcgcctgtggctgcacggacacggcgcgtacggacggtgacgccgcagtaacgctcgagctcgctggacagctgctcaatcggcagcgtttcccaagtctcatcggcaccttcggtggcggcatattcgggaattcgtttctcgatcgtcaccagggacccgatcatagccgtgccatgcgtgtattccaatgtcaccggagcgggaatcagggtgagacacagcgttgcggcatcgactgtatattcgaatgtgggcacagctgttcctttcatactgtttttattattgttcgtccgctaatggcaggcgacacgtggtcgcgccgccatcagcggacgaatcgttggtgaggtacggcggcatacgctatttcacggcaccggtcgtcacgcccttcatgatgttacgctggatgagcatgaagaacaccaccaccggcagcgagaagatcaccgaagcggccatctgcccgccgaaatcggtgcccatggtgggtgtcgagaaggacgacagccataccggcagcgtgtacttcgattggtccttcatgaacgtgtaggcgatcatgtagtcgttccaagcgttgatgaacgcgaacaccgaggtcgagacgatgccgggcgcggccagcgggaaggtgattttccacaggatctgccagtcgtttgcaccctccacggccgcggattcgaaaatgtccttcgggatgttcaggaagaacccgcgcatgttccagatcgcgaacggcagcaccatggcgatgtacgccagaatcaggccgctgtatttgttgagcagcccaagctggttgtagatgatgaactgcgggatgatgccgccggaggtcatctggatggccagtacgaacaccatgatcggcttgcggccgcggaagcggtacagggtcagagctgcgcacgcgaagaacgcgacgataatcgacaggacgatcgagatggcggtcacgaccacgctgttcttgaggttggtcaggaacgaggtctgggtcacggcaacgatgaagttgtcgagcgagaggtgcgtgggccagaacacgggggttgtggtcatgatttcgtcgcgcggctttacggcggtgatgatcatccagtagaccgggaagaaccatacgacgcagaacagcagggcgaggatggtggtgccggcgcggcgtgcgattttgccggggttggttcggcggcggggcgatgcggactgcactgcgccctgcgatacggcctgtgcaggacttgcactcattgacgtactcataggtcctctcccgacttgagcaagtaacggatgtacacggaggtcagtgcgagcagcacgatggtcacaagcacggaggcggccgaaccagtgccgatctcgaagctgacgaacgccttcttataggtgaagatgccgatggtggcggtcgtgtcctgtgggccgccctgcgagatgagccagatctggttgaacacgttgaagtcccagataatcgagagcatggtgatgaccatgatgctcggggagatcagcggcacgacgatctgccagtagcagcgcagcttgctgcagccatccagctgggcggcctcgatgcaggactggtcgacctgggtggtggccgcgtacagcgtgatggcgatgtatggcacggcctgccagaccacgagcagccagatctccagaaatgcgagccaggtgttgtcgatccaggaggtgttggtcatgtcgccgaagacgtgcagctgggtgagcagccagttgatgacgccgtaaccgggctggaacagccacttccagaccaccgaggatgcgacgttcggcatggcccacgcgaagatgagcacgaagatgaccaggtagcgcatcacaccgccgagtttggtcatcagctgggcgactcccatgccggccagcacgctgccggccacgagggctgcggtgaagccgaaggtgcgtagcagggccgcatagaaggccgggtcggtgagtacggattggtattgcttgaggccgacgaagtcgaattcgccggtgaacagcgtgcgctggctgaaatccgtgaaggacgtgaagatcatgaatcccagcgggatgaccaccagtgcgatgatgacgatgccggcgggcgtcagcagaaacgccggggcgcgattgccgcgtttcttagccggccgtgaggccggggcctcgccgtgcgcgagttgcgttgagcttgtcatggtccaacccatcacttggcatacagctcgttggcgtgttcgtcgaacttcttggcggaggcctcggccttgctggtgtcggtggcgatgtccttgaacagggtcagcgagccgtcgctttcgatggtggtccactgcggggaggcgggcgtggccttggtgcgcttggcggcctcgaagaagccggtcagggcggtcgggaagtcgtcggaggccatggccttgtccagtccttcgacgttgttgggcaggtagccgtccttggcgaacacgtagtcgttctggatgtcagggctggaggcgatcttgatccacttcagggccagatcctgcttggagctcttctgggccacgccccacacggagccggccatcatcgacggctggttctggccgctcaggccgggcatcgggaaggagccgagttcgtcggcggtgatgtctttgttgtattcctgaatcacgcggatggaggcgctgttgccgattacggcgccgatcttgccttcggccatgagctggctggtgtcggggctatcggtgtcgagcgggcgggaggcttcggatgaccacttgtgctggaattcacgccactgctcaaggccggacaccgattccttggtggacagggagctgacccatttgccgtccttctgcacggcgtagtcgccaccggcgtcccacacccactggatggcggtcttccaatcggcacccggcacatagaacggggtgaagtcctcgccttggtgcgcgtccttgagaatctgcaggtcggcttcaagctcggcgtaggtggtcggcggctcgttgatgccggccgcggcccaggtcttcttgttgtagaccactgcgcgggcggcaccgagggccggaatgccgtacagcttgccgtccacggtggcaggctcttccagaccggagagccaggtgacgccctggcgcaactcgtcagcgtggtcggtcaggtccatgaggccgccgctggccgcgaagccggcgacctgcgtattgccgaggtcgagcacgtcggggggggtgctggtggacagagccgtggtgattttggtgctgatgtccttccactgctggttctggatgttgacctcgacgccggtctctttggtgaactggtcgttgatggccttgatggtggcctcgctttgatcgccctgcatgacccagacggtgagcttgccatcgctcgaaccggtgtccgaggatggtgcgcccatcgagcatccggcgagggtaagggccgctgccgtgacgatggccgtggcctggagcaccctgcggatggcggggcgtacgttgtgctgctgcttcatgatgttccttcccgtccagttgtgaaccgttgcggctcgcttgatctggccgtctccattgactggtgatttcttgtaaacgtttacgagaaggagtataacactcacgtaaaggtttacaaatatcatgtgcgtgtcgtacttcacttaatatcggtaaatctcttttactatttacttcgtacacccttacggcagagaatgtttaccgactttcatacgccggcacggcaatccacaggcaccggacatgggccatgcggaatcatcaggaaaatcgcgcggtacaatcactgtgaacggccctaggacaggaaggagacgggcatggccataccccgtaagccggccactatcatggacgtcgccgcggcatccggcgtctcctacgccaccgtctcccgttatctcaacggcaatccgcatgtctcggccaaggcagccgagcgcatcgccgccgccgtcaagcaggtgaactacacgccgaacaacgccgcccgatcattggtacgccaacgcacgcaaaccgtggcgttcgtggtgcacgggcagccggattcgctaatcgccgaccccaatatcaacaccatcctgctcaacgccaaccagacgctcggcaatgccgattatcaactcatcacgctgatctccgactcccctgcggccggcgcacgcatcgccagactcgcctccagcggattcgccgacggatggattctcaacacgttccataaagatgacccgctatttcagagattcgccaatatcagcgtgccggtcgccatttccggcgtcggctatggcagcgccatccccttccccaccgtcgatatcgacaatcgactcgcttcacgcaagctcaccgagcatatgttggggcgcgggtatcggcgaatcgcctatatcatcggaccgccgtacttgccatgttccgacgaacgactgctcggattccaggatgcgatggccggcgatttcgacccggcactggtcattcggtccgacggctggacccggcccgatggccgcaacgccgtcgtgcggctgctggactcgctggctgagccgtcgggtagccgacttgccggcgccgacgccagcgtgcccgagctcctcgccgagcatcatatcgacgcgctgatatgcggcagtgattgcatcgccgctggagccatgaattatctgctcgaccgcggcgtgcgtgtgcccgacgatattgccattgccggcttcgacgacagcgccgacgccacagccctgcacccgcagctgaccaccgtgcgccagccaatggacgcattcggcgtcagcttggccaccctagtgcttgaccagatcgagggccgaccgttccagcgcacggtgttcctgcccaccgaggtcgtggccagaggctccaccggagagtaggcgcgcagagaacggttctcaataatatctgtgcgcacttctctacgcccgaagcgcacatggaatatgccctaatcactgccatgtcgccatttgcgatgatgtgagattgttatgttcttgttcatttgagcgcacagatactactgagaaccgttctctgcgcaaatagacaatgtggataactccataagctggaaccacattgccctgcctggcttgcattcaagtccaaatcagctttacggtcgcatcatgagctcttttatgcatgaggatattgtcggccgacgccgagcagaacgtgaacgttgcaatgatgctgcgcgccgttcaaaaggtccattgctggtgggatacatcaatgcggccaactactacggcgcgcccatcccccgacattgcacgctatctgttgatgccgtgcacgcctgtgtttccagtgccaacaaacgcagacgaatcaaaggcgtggtcttccatgtgtttaagggaaaactggatatccgcaaaaaggactatgaacacttctggattgcctcgccggtcatgatgtgggctcagatggcccaatactccacattggaggaacttgcggccattggagcctctttgatgagccgcgataaacggcgcagaatggccactcgcaaggatttcgatacttacttggaaatcagtccgcggttcataggtcgtaacaaatgccacgaggcactgccctacatgacagagaacacggattctccgccggaaaacacgctgtttgggatgctgaaggattcgggcttgggataccccaccgccaactatcgcgtgaatatcggcaactcatacgtcatattggatatggcatatccggactgccgcgtcgcgttcgaatatcagggagcctatcacgccgatccggcacaaatgcgaattgacgcggcaaagcgaaacgcattgcaactgctcggctggatcgccattctcgtcactgcggatgacctgagaacagccgacacgcggcatcgttttatcgagatggcccatgtcgtggtgtcccggcaacgcaatctcgccgattggaaccgctcatgggccattacctcttagcatcgcaccgataatgcgctatgccgctatttaccgcgaggtgcccgccagacatcgggctcgacgtagatcccccattcataccaaggcagcgcggcacggcgtcctcgtccatgtgaatggcctgcgggttaatgcagcctatccacgccggcagtgcgctccactgcctcgaccaccaggtcgcgggtgctgtggtcaagcgattcgcccaccagcagcgagccggacttaaacgccagccgcctacaaaagtgtgaggctgcgcaggctcacactgccaacagccgttcggccaacccccgaaagacctggccaatgccatccgtgcgcaaggcgccatcgacatccagcaccgcgggacggcctgcttcgccgatctcgcgcacttcgggttccagcggcagctgggccatcagcggcacgtcatagccaagcgccgcgcttaactgttcagacacgcgctgaccgccgccggcaccgaaaatctccagcttctcgcccttgtgctcgtagtagctcatgttctccaccacgccacgcaccttcatcggcacctgcagggccacgagtccggagcgcacggcgatgtcggaggcagagggctgcggggtggtgaccaccacgagttcggcgttgggcagcgcctgggccacggaaatcgccatgtcgccggtgccgggagccaagtcgagcaagaggacgtccggctcgccccaccatacgtcagacaggaactgttccaaggagcgctgcagtcgcggcccgcgccacagaatcgcccggtcggcaccggcgaacatgccgatggagatcagtttcacaccccacgcggtgaccggcataagcataccgttcagattggtgggctgcgtgtgcacgccgaacaggcgcggcagtgagaagccatagatgtccgcgtcgatggcggccgtgtcgaagccgagggccgcaaacgtggcggccaggttcgcggtaaccgaagacttgccgacgccgcccttgcccgaggcgatggcgaagatgcgggtcttgacgcccggtttgctgaaggggttccgcttgcgttcggccttgaggtcggcgaccagatcggccagcttgtcacgactcatcgaaccgacttcgatatgaggcagcagctgtacgcccggataggagctgaccgcgccgttgatctggttggtgatggtctcgctcagtgggcatccgggaaccgtcagctcaacgtgcacggtgacgtcgtaagtgccggcgtccgacgatgcgggcgcggcttcgatagcggcaatcatgccgaggtcggtgaccgaacgaccgagctcggggtcgatgaccttgctcaggcgttcgtagatgtcggcttcgatctgacgtgcgtcgctcataaatccgtatcctcctttagggcctgttctaccctagcgtgtgatgcggcggcatgccagagggagtggagtaagtcacactggggcgggattcgcttttcctctcccccagtcagcctaaaggctgacagccccctcatcagagggggttaatgaagcgtctgagggggctattttagatggtgccggtggctaggagctgggcgaattgggcttcgcccagcatggggatgccgagttcctcagccttggtggccttggagccggcgtttgcgccgatcaccacgtaatcggtcttcttgctcaccgaaccggccgccttgccgccgcgctcgataatcgcctctttggcggagtcgcgcgaatagccttccaacgaaccggtgaccaccacggttttgccggccagcgtctgcggcaacgaactggtctcggcctcgtcgacgcccacgccggcggcctgccaagcacgcaaagtcgcgccgcgccagtcgccgggttcgcgggcggcggcgaaccagttcaccaccgattcggcgatttccgggcccaccccgtcgatggccgtcagatcttcaatcgtggcgttttcgatggctgccagcgagcccatcgccgaggcgatcaggcgtgcggtaggcggaccgagccggcgaatcgacaacgcgaccagcacacgccacaggtcggcgtgacgggccttgtccatttcgtcgaacatcttgcgcgtgttttcgccgggccgaacgatcaccggtacatccgtgacgccagtgcgcgtggtcttgtgatccacgcgcacgatgaccgcgtcggccggcacgtcatactcgggataggaggctgcggcaaagcccggcatggtaccaagtggagcctcagccccggtaggtgcgccggtcgtctcgctggcggcacctccctgtgttccggcggattcgactgcggcctcttcttgcgcgcgttcggccaactgcttggccgtgagctttttggccggcgtgggcgcggtccagaaggcaggcacctgatgccacaggccagagccgccgacacgcttacgcacctttttcttcttaccgttcgcatcgaccgtctcatgcacttcgacgattgcggcctcacgccacacacgcacgtcgcgcagatcggcggaggtcaggtcgaacaacccggattcgttggacaacaccggcttctgcgcggccggcaattccagcccctccaccggctcgtacggttcgggctcttcgccgggggcgaccagaacctcggtgatgttcggcgcgtaggtcgccaccgaatcaggccggttctcctccgggttggtcagagcgatggccgactgttcacccagatgctcgatgtcgaacgccttgcgtgaggccagtgaaatcacgcgctcggtcaactgggccgggcagctttccacattcgggcagcggatgtccttgtcaccctccttggcgggtgccagtttcgcgccgcatgaagggcagaactcgggcatgacgaattcgcgcagctggccctcacgccctttgcgccgttcaagcaccgggccgaccagttcgggaatcacatcgccggccttgcgcaccaccacggtgtcgccgatcaggatgcccttgcgtttgacttcaaatccgttgtgcagcgtggtacgagccacggtggagccggccacgtagacaggtttgagcacggcgaccggcgtcacacggccggtacgccccacctgcacggtgatgttgagcagttcggtgttgacctcttcgggcgggtatttgtaggcgatggcccagcgcggcgcgcgcgaggtggcaccgagggcgcgctgcaggcccaggtcatcgaccttgacgacaatgccgtcgagcgcgtgctcgatgtcgccgcgatgctcgccgtagtactcgatcatgtccagaatctcctggaatgaggtcaccgcacgattatgcggggagaccggcacgccccacctggtgtatagatcgtaggcctgcgactggtcggcgaccacatcatgggtgccgcgcggatggtccggcccccaggtgagctgccccagaccatgcgcatagaaactcaggcgacgggtggcggtgatgcgagggtctttttgacgcagcgagccggcggcggcgttgcgcgggttggcaaagggcgctcgtccggcgtcctcctgctcgttgttcagggtgtggaagtcatcccagcgcatgaacacttcgcctcggatttccacgaagtccggaacgtcttccttggggccgccgaggttggcgggaatggagccgatggttcgcacattcagggtgatgtcttcgccggtaacgccgtcgccgcgcgtcaggccctgttcaagcacgccgttgcgatagatgaggttcagggcgaggccgtcgattttgacctcgcagctcatgggcaggggcttggaatcaggccaatcgaggtcgcgaatcaccgagtcgtaccaatccttgagttcttcgatggagaagacgtcgtcaaggctcatcatgcggctggggtggcgcacggaggcgaagtcgttggagaaggagccgccgacgcgatgggtgggcgactgcggattgtccaatgaggggaacgccgcttcgagtcgttcgaggcaacgcatgcgcgcgtcgtaggcggcgtcggagctgacgggtgagtcgtcgatgtagtaggcgatctgatcggattccacccatgcggccacgcgagcccacaggcgggcggcggcctcagcggtcatcgtgttcacgtcgaaacggtcgaggcgtatcgcgtcgtcgtcagtgggctgcagtgcggctatccattgttcggagccaggggcaaaacgtgcaataccggtatcaggccggacctcggccacatccccatcgtcgaaatcccatgccagttgttcgttcgtgctcatggttgtctatcctagcgggctcggctcccctcggccggctataccgtcaactcccctcaggcggctacgcggatagcgagcgcaggaactgggcttggatgatgtcgatgttgtcgccttcaccgtcattcatgcgggccacggccaccgagagcgtgcgggccggcacgaacatgccctcatccacgcacacgcgggcggcgtcacgcacgatgtcggccacttcgatatgcggccagaccggcagatcatgcgtggcaagcacatgggcggccacctccaccgattcaggcaccggtatgcactgcgagtccgcacgggaaaccagttcctgcagttcgctctccagcgaaccaatggccccgggagcgatgtgatcgctcatgatgtaggctgcggcggctgtgtcgaaccggtcaagcatccattcggcgtacgcgaaccggtagtaggcgaacgcggcatcgtcgcggtccaaggccacacgcagagcattcaggcaggcggcgcgtgccgaatcccaatcctcattgcgggccagttggatggcgagcttcagatgtgagagtgggtaggcgggcgcgtacgccaccatacggttgaggtgcgggatggccgcctcggcacccttgatctggctcaacacgtcagccagctccatgtgtgcgtagaacagattgtccgggatgagcaccgtacgctcgtccaatgtggcgaacagccggttgtagaccacgcgctcggcataggagttgaagtatcgaggtacgccatggcctgccgcatacacctgatccaaatgggccacagccgcttcgaccgcttcgatggcctgatcggcttggcccgagaacagcatgtctcgggcgcgcagacgctccttgtcaagatcgtcggcaagcgtgaacgtgaagtccggggtgtccttgccatcgatcaacgcactggtgacctgagaggccaaaccggtcagttcgggatcgcatatcgattcgatgatctgcatggctcgctgggccttttccacggagccgagcgacgtgttcctggcgatatcatggaattcgttgacgccatgctgcagtaagtccactcgctggatagccagtccggcactattctgtgcgcccagcacgtgagcggtcgccgggctgaattgacggtcggccagttcgggctcctcctgggatccggtgggagagaaccggctgtccgccaagtcgaagtcggcgctgatgggtttcaggccgccttcgccgtccacgtccatcacggcaccgaacatgcggtaggtttcctcgggattgtcaagcccatcggtgtccagtcgcttgaggaaggcatcacgggtgaaggtgacggtgaccatattgcgcacggtgggattgcggcgcagcacgctcatcggatcatcgtccatgccggcggccccatcagcatcgtcagtgccgacgccctcgccgccgataccgcccaggtcgtcgcctgcgccggtatcgtccggcatgccgaacgccatttcgtcgatatcgacgcccttcatcaggtcttcgaactgcgaatcgatggacgcggcgccatcggcgtcagcggattcggccgcggcctgatccgtagcatccgcagacggtccggtaccgttgcctgttcccccggccgtgccgcgttcgtcaccggacgccgcctgcccgaacgtctcctcatgggtgatggggcgggtcgggtcgccatggaaatcaccatctttggggtcggctttggaacccacacgccccaaatcgccactgcgcagatgttcgaaggcgcttagggcctcgctcatcatcgcctcgatggcggaatcctgttcggcaatcgcctcttcaagaccaatggaatcgatgtgcaacgacacctggcgcacggattcgctggtgccgaaactcagcgctgccatcatcaggccgatacgcaggttgtaggcggcgctcatcgacgcgcgttcggcgctgctcagcgcacgccacgtacggcgagtggtgtcataccggctatcgggcatcatcgaggtgccggcagtggtgaagccaatggccacttcacccgaatccaagcgcgaccggaactccacatcaaaccgatacggcaaccgtaaccggcgcaacagtgaggagagggtctgacgatacacccattcgtcgctcctcgccggcgaatacgaaggccgagcggcttgagtgttggtgtcgctcttattggtccgctctacagcgccctcaacactctcagtactttcagcgcccgcagcattcgtcacacccgaatccggcacgttctgctgggtcagcacatctcgaggatcagggaattcactgcgaatctgcccagccgtgcgtgcggcgatatcgaccaggctcagcacggcccgacgctcctgctcgccatcatacgggtcaagcgccataatcgcagggttctcaatgagtttcatgtcgatttgcgcggcctcggcacgggtcaccgtatcttccgtagggttgcgccccaaggaagcgttgcgctccagccaagcgctcaccgcagcgaatcggttgaggttgccttcgatcttcaaggatttcagcgcctgcccgaatgccaaggacttatcccacgtaaagaaatagccgctcgaatacgtcgaggtgtacaggtgcaacggttcggcgccatgcaccgcttccagtcccggcgtggtgtcgagggcgccggcttcgcgcatcagatcggcgaagtgatcctccagaccggaggcccgcatgccgtgggctcgtgccgccaaagtgtcacgcaccgaacggcgaatcgcaccgattggcgcctcacggttgagacggcggaagatattgccggaaccgaatccgatgagcagaccattgatctgcggcaacatatacgtggcgaagaacgcgatggtaatggcatcgcggtattccaaatcatgacgcatcacaggcggcagattggcacgcatctgctcaagcgtgtaccggttgccggccttgagccatgaggcgagccacgtcatgcgtccggtgtcgtcacgccccaccacgccaccggtaatggccttcacgccgtcagcaccatgaccaaggccacgccccaaaccacgcccatgatgcagcgcacttcccaggccatggcctgcacgggagaaaccggaacgtgaacgcggctcgtcgctttcgcccagccgctcaccgtccggcagagtcacttccttttccttgccgaacatgaatcgcgcctgcatatcttgcacgtccatgttggggtcggtgcccacgaatacgcggccatgcgtatcggcgaacgccacctgcgcaaaatgatcgcggtcggggaaaatgccaagcgaaaagccacggcctctggtggagggcagctgcgcccatccaagcaccagcccttccggcacgttctccaattcggggaaggtgcgtcgcttgattacaggactcagcgccactgcatggcgagtcagttcgtcgataatgccgcctttacgctcactggtctcccgcaaggcatcgccgaacggattcgtatcgtgcttcttcggcttggacagtcccagatcggccgcgagcgcgttcatcgaatccttcagcccgcccagcagtggcgtgcggttgtgcttcccatggtccgatgtacgttttggcatgattcacattgtctcttgtttgcccgacatcaagcccgaataaagcctatagaataaatgcgtgcattccatagaccacactcgcgcagaccgtccgatgccgtcgaatcatgaacggcacctgcccagccgcccggatacccggcaccggctgcgtttggtgcgcctgctgatcgccttgctggccgccgtcgccgccatcgccgccatggagtgcatcgtgttcaacctgccgttctggcgtacgctcggagcgagcacggatacgaacgccgtgcataacacgctgggttcgggtctcacgcgccggaatgatggcatgttgaccgtcaccgatccgaccaaggcctatcttgaactgaccgcggacggcacgtcggattacctacgcatcgataccgagagcagcaaggtcatcgataaggcccgcgagcaggccgaggccgaatccaaagcgaacgacgataaggaagtcttcaaaccgctggcgaccattcatgtgcgcgcggatgtcgatggcatcaccggcaaggcccagtcgatgaatcccgacgctattcgcagccattatgtcaaggcgccgggtgccggcatcgtgcgtatttggattcaggaagagcgcggcgcgatcgtaccggtcaccgacgcccgcgccaacgtgcgcgtaccgttcgtcatcaattggatgcgcgtgctcgccatggccttggtgttgctgatgattgccgtctggaggccgggatcgcgcctgtggcgtatcacgcttgacccgtccagcactcggcaacgacttgctttcgtggggcttctggcgattcctaccctgcttatcggcgtatccatcatccacgaactgtggtacgcgtcttcgctcgtcttccacgtttccggcgattacacctatgattttgaccagtatgggcatgtggccgatgcgctggtcgccggccggccctggctcgacttgccggttcccgaacaactggccgccaccgagcacccctatgacgtagccacacgtgcccagctactcgccaatggagccagtccgctctactgggattacgcgtattatgacggtcactggtattcctattttggcgtgttgcccgcagtgctgctgttcgtcccctatcgtctgctggccggtcataatctgccgacatccgccgccgagtatattctcgtgctgctgttcatcatcttcttctccttgctggtgctgcgcgtcatccatcgtgtgatgccgaagacttcggtggcggccgcgtcgttagtagtggtctcatcgttggtgagcgcgcaagtggggtatttgctgtatcgcacgaacttctatcagataccgttcgccgcatcgctgacgttgacgtcgctgggactatggctatggctcggcgcggacacgtcccgccgtccgctgagaccatcggaccgatggcaggcgggcgatgccaagcctctctccctgccacgactggccttgggcgccttgtgcattgcggcgaatttcggatgccgaccgacgttcaccttggccgcattgcttgcgttccccctgttctggccgcagattcgcgcgctgggcaccggtctgcgcacacgccgcatcaagccgttgcaggcgttgcgcgcgccgctggcggtaatcattcccgccattctcgtcgtgacgcctctgatggcgtggaacatggttcggttcgattccccgttcaatttcggcaatgcgtatcagttctccatatccgatatgacccggtataccaccccgtccgcggatatgcccgccaacatctggtattacctgttcctgccgctgcgcttcatggatcgtttcccgtggctggcgggctctcccgccccgatgccgcaatggggttattacgaggtgatggtcggcgcgattttcacggccacgccactgaccttgatggctttggcgctgcccctgctgcgcagattggaaacacacggcatgcggccatggctgatgtcttgcttggccgtggcggcggtgctggtcgtattcgacagccgcgtcggcggtttgggatggcggtattccgccgatttcggctggctgatctcgctggcgtccataccggggctactgtggctggtcaatgggcgcgaaccgagccggtcattggcgggggccaacgacgccgcttcaggcgatggcatcgcccgcgtcactccgtggcgttggctgatgcgctgggtcgtggtgctggccgtattgtgggcgctgggcatagccatactgagctgcttcgtgcagtcgcgcagcgattcgatgatcgacaacaatccgacgctctggcatcaggttcaggcatggttcacgatgctctagtctcgtatcggcgtcggatcaggtcctcataaaacgccacagcctcagccggcgctccgtcaaacacgaccgcgtgctcgtccagcaccagtatgcggtcgatggcgtattcgggccggcggatcatatccgtgtcatgcgtggcgaaaatcacctgcttgttgtagctgaacaacgccttggccacatgcgcggtgccaatctcatccaatcccttgctcggctcatccgccacaatcgcactcggctcaaagctcagcgcggccgcaatagccagcaggtgccgtttctcggagtccaattcgccggccttggccttggagacctgcgccaaatcaaaatgcgcgaacagattaccgatgcgcgcatgacgttctgactcgggcaccttgtgctttttcaacgcttcggaaacagcctcggaaatattcgccgcttggtagaaactgttcggaatctcctcgcggcgaactttgccgaccagattatcgatgcgcttcgcgtccttcttcacagccgggtcaagacgttcctcaccgcccgcaatggtcaccgtgccggcgttggccttcaacgaaccgtccagcagacccagcaatgtggatttgcctgcgccgttcagtccgatcacggccacccgccgctcgctgatggtgatgtccgtgggagcaagtcccacgtgcccatcatcatacgtatgcccggcctgttccaaagtgaacgtcagcgatgccgggtgtggcagttctttcggtctaaacaagaatcccatgccgccattgtacgtggagtacaggtgtggtgccggcaaacaccggcctatcgcagcaaagcggcgacggtattgagcacggcgcggatgccacgctcgaattcgtccggttcgggcagcagggaaacggccaggtatccattggaggtcatgtcgaagaagtagccgggctgtccggtgagttggtgctcgtcaatcagccgcaacaccagttcgttctcatcgatgacggaaggcactcgtaacagcacgttccagccgccttcggcccgtagcacgctgaccagcccgttgggatcggcgtcaagcaactcgtgcaacttggccaggttattgcgcacgcgctcccccacccgtctggtctgtgcgggcgcggcgttcaataatgcgggaatccgttcggcgatgatgtcgcccatcggcagataatcgtcggcgatgacgtccagtcgacgctgggcctcggcaacgtcctcggcaggtccggacacctgaatccacccgactttggcgtgcggcgcggccagcattttggagaatccgtctagggcgaaggtgagcacgccgcgctcccccgcgagccgtgcgtcgccggggaaaggttcgagagagtaatcgaagaacacttcatcggcgataagggcgatgccgtgcccacggcacaatgtcacgatacgtgcacgctcggttggttttacgtacgaaccggtcggattgttcgggttgatgagtaccaatgctctgacgcgttcgccaccgggctcgctgagtagccgctcgagttcggcgatgtcgatgaaccaggagccgtcgaattgcaactggtattcgaccgtatcgacgcattcaagccgtgcaatcgactcaatcagcggatagccgggtttgggtgccagcaccgcgtcgccggcatcgcaaagtaacttaatcagccacgaatacgcctcggacgtggagctcagcaggtacagggcgtccgggtcggcgccctcgatggcggtattcacattggtgaaagcggcatggcgctcgttcctgccctcgccggcggcgggcgaagccaactgagggctgcttgcgtctaccacgtttgccgtattgaggaatgcggccaatgattctcgtgccgcacgcggtccacgcgggtcggccgtatacacgctcggcaccaattcgggtgccaacccgtggcgggtcggattggaatcgttgagtttgctgagtgcgatgccgtttgccttggctgccgcctcggccgccgcaatgggattcggcgcagaaatatccacacgagaagagaaatgcacgctcataccctccacgataaaaccacccctgccgagccaggtatatcgaggcctcatatccaccagcatccagcactacgacaatcgtgcggcacggcagcggagtcgtcagacatactatgacttcaatccacatcgaataacggcctagctacattcattaggtcattttcgcgctcattaggtcactgctagtcgagcctcacaattgttgatgcttgaaacgccgccattccgagcccattgcaattcaggtttggaatgggagtgacctaatgaacacataatcgacctaatgaacgaattactcattaaaaaaggccgcccgaaatacttggacggccttacatatggtcaatacggctcctgcgccagcagaaataactcagctcactgctgcttggtgctggcgtagtaggcggcaccgacgatgccagcctggttacgcagcttggcgggcacaatcggggtcttgatatccacgtacggcaggaacttttcgctctgacggctcacgccgccgccgacggtgaacaggtccgggttgaagtacttttccataaggccgtagtacttggtcagacgcttggcccacttcttgtagcccagttcctcgttctcgcgaatcgcggaggaggcatacttctcggcgtccagatgcttggcgctcaggatgatgtgtccgagttcggtgttcgggatgagcacgccgttgtagatcaaggcggtgccgatgccggtgcccagtgtggtggcgatgaccagaccatcctggcccttggcggcaccgaactggacttcggccaggccggcggcgtcggcgtcgttcaccacgacgaccgggcggccgcaggcttcggagaacacttcagtaacgtccacgccaatccaagactggtcgaggttggccatgaagtcgagcttctggccgggcttgatcggcgcggggaaggcgatgccaacgggtgcggattcaggcacttcgaagtggtcgagctgctgcttgacgattttggccacggcctgaggcgtggagacctcgggagtgagaatcttcaatcgcggctcggcgaaatcgcccttggtcagatcgacaggtgcggccttgatgccggaaccgccaatgtcaacaccgaaagcctgtgcagtttcaatcatcgttgaccttcctttccatacgttttcatcagttcgtagggttgcgcccagtctaacgcgaccatcacgcggacgcgccggacgggccggggcagggccgtcactcaagcgacggcatgggcttccaggtggggtcgtgcatcagcttgcgcgagtcccaccagcccttggcaatctgcaccaaaccggtcttgaggtgttcgcgatccaccatcaccaggcgaatgacttccttggccgcggtgagcacggtgcccagtccaaacaccagcggacggaagtcgccgtaggtcatgaagtaccgggccatatagccgcggttgcgcatgatgtggtaccggttcatgtcggacgtggagttgagctggcgcacgccggcgatatcccagttgccgatttcgcgcgtacggcgcaaaatcacgtcgggcaccacaatcgggttggtgaccttgctggcgcggtagccatacatcgtgtcatcccagtagatgaagaagcgcgggtccggcagaccgatttccgtgaccacacggcggttgaacaggccgccttcgaagcacagcgtgtccatcactcggtatccggccgggccgaatgcggcgggcgcgatcgggttcgggatgcccagcggcacaatgaagtcgtactgccagtagaacgggccgccatcgtaatcgaatcgggatccctgaatcacctcgtgcttgtcggtccacttggacagcttggcaatggcgtccggcagcacggccacatcgtcgtccatcacccagaaccatgcggcgcccagatcatacgccttggccacgccggcggagaaaccgcccgcgccacccaggttctcggtctgcggcgcatagaccacgcgctcttcgttgccggactggtcggccacggtggtgccccactggccggtcaccttgccggcaaacgcagcgaccatgtccgccgtctgatcggactgctcattgtccacgatgacaatgcgccacggtgcctgctcaagcgccagaatcgaatcgaacagtacctcgagcagctgctgacgtttgtaggtggtgacgatcagggcaagcttgtcaatggtgttgttgggtttcttcacttcagccatggctcccattgttgcacttgaccggcacaagacgaatttctgcacagtgaaacgcgggttgcgtacgtccggcgcatggcgtatgaataagcctgtcagtttcagggaaggtgcaattccttactggcggtaacctgcaccccgggtttcataacggggatggtaggaagcccgcgacccgcgcaagcggctgatccggtgagattccggagccaacggtatagtccggatggaagaaacgagggctcattatgagcgtatcttcgcgtatccgcatgcaagttgttcgttctgtggcgcccgaggccgagggttcggccagcgcgtccaccgccagcaccagcgccaaactcggctcgcacaccactggtgtggccgattccggccgctggtccacgcgccgtatcgccatgtatgcactgttcgtggcgctggcgatggtcaccagcttcattgaattcccgattacgccggtcacttggctgaagtacgacccgtccggcatcgtctgcctgatcgccggctttgcgtacggtccggccgccgccgcaatcgtgtctgtgctcggctttttgccgcacatgttcgccgacccgtggggttcgctgatggctgtgctggtggcgctgttcctgtctgtgccggccgcgttcatctaccgtaagatccgtacgcgcaagggtgccgccatcggcattctggtgggtgcggtgctggccatcgtggtggcgctggtgggcaacctcatcatcacgccgatttacgcgcacatgacctaccaggctgtggccgcgatgattctgccgattctgctgccgttcaacgtggctaagatggcgattcacgccgtgatcaccttcctgatctacaagccggtctccaacctgctgtccaagcagcagtgaccggcctgagacgggcctatgcccgccacgactaacgaccactcaacgaccactcaaagaacaagaacgcagaactccggcccttgccgggattctgcgttttcgcctatcagttacggattgctgtttcatgaccgttgcaccccattccttcgacgccgacgagttccacgattccgccgagcccgctccccccgccgccgtactcaaggacattcgtttcagctatgaccgcggcacttcatgggctttggatggcgtttcgctcacggtccatgccggcgagcgcctatgcttggtcggtccgaatggatcgggcaagtccacgttggcccgtctgattgcgggattgaccgcgccggacgatggcgaagtgacgctactggaacagcgcgtgtacgcagccggcccgaatgccgacgcctatcgcgctgcccgccgcggcatcggtatggtgtttcagaatcccgaggatcagctggtcaccaccgtgttggaggatgacgtggcttttggcccggagaatctcgggctggagcgcgggctcatcggcgagcgcatcgttgattcattgcaggccgtggggttggcgaacttgcgtcagtccgacccgacccgtatgagcggcggacagcagcagcgcgccgccatcgccggcatgctggccatgaacccggcgatgctggtattggacgaaccgaccgccatgctggacgaatccgcacgcgccgaagttatgcgcattttggatgatttgcaggcgcgcggcaccactattgtgcatgtcacgcatcatccggatgagaccgttcatgccgatcgcatcgtgcacatggaggccgggcgaatcgttggtgtcactgcagccgccgataatcgacccccgctagcggaggctgtctcgcaaagcgagactgagggtggtatcggcacagaagccgcccccagtcgtcctacgaacgacagcccccgccagcggaagcgcgaagacggctccgaactgccgctgctctccgacggcatcggtgatacgacgaaccccattattcgcgtctcgcatctgacctatcgctatccttcggccaaacgggcggttatcgatgacctgtcgttcaccatcgcgcgcggtgaaaccgtggcactgatgggcgtgaacggttcgggcaagtcgacgctggtgcgcatgctgtgcgcgctggccgcgccgaccgccggcagcatcgaggtggccggcgttccggtggcctcgaccggcaaacgcggtcgcaacgcgcgtccgaagccggcgaatcgcaggcaattggcgcaattgcgccggcatgtgggttacgtgatgcagcatccggagcatcagctgttcgctgacacggtagccgaggatgtggcgtacggcccgcgcaaccaggggctcgccgaggccgaggtggccgaccgtgtgcgcgaatcactggacctgctgcatatcgggcatcttgccgaccgctcccctttcgacctgtccggcggacagcagcgattggtggccatcgccggcgtgctggcctgcaatcctgacgtgctcatcatggacgagccgaccgcgagcctggacgtccaggccaaggagcgcatccatgagctgttgcgcacgctcaaatcgcgtggcgtgaccgtgctcatcatcacccatgaccgagcggaggccaagcatatcgccgatcgcgtggtacgtatgccgattgccggcgcggctggtgctgagagcatctcggcaaccgagactgccttccccgccgagtccgtctcccctgacaaacccgcgcactcggtgatccaccgacttgacccgcgcgtgaagatggtgggtttcctggccgccatgttcacgatgttcgcggtgaacacgcccctccagcttgcgctgggcatcgccatcaccctggccgttatcgcggcggcacgcctgaacccgttacgggtgctcgaatccattcatccgattctgatcctgctggggctgatgggcgtggtcaatctgtttgtggtacgcaccggcacgccggtggtggcgctgggcccgctgagcatcaccgatcagggcgtgaccatagccgtgctgtacgcctgccgtttcgcgttggtgatcatcttgggcgcggtgttcctcaccaccaccacgccgaccgccatgaccgacgccttcgccaccctgatcagcccgctcaaccggctcggtattcatgcccaagaaatcgcgctggtcatgagtctggcattgcgattcattccaacgctgaccgacgagacccgtgccatcgtcgatgcccaatccgcgcgtggcggttccatcgaaaccggttcgctggcccagcgcatcaaggcgatgagcgcgattatcgtgccgattttcgccggcacgttgcgtcacgcggacaacctgagcctcgcacttgacgcccgctgctacgaggagagcatccgccgcacccactggcgtgccctgaccatcgccgcgcaagatctcgtgttcgccgtcgccgtcatcgcctacatcgccgccatcatcgcgctgtagggcggcaaacagcacagacagcaccggttgctatgctggtgtggttatacgaaagatgtaaggaaattcccatggcattgaccaagaagcaaatcaagcagctgcgcgcgatggcaaactcgctgaagcccctgttctatgtgggcaagaacgatttgaccgagtcggccgtcaatcaggccgatgaaaccattgagaagcacgagctcatcaagtgcgccgtgcaggacggttctggcctgaccgccaaggaagccgccgccgagcttgccgagcagctgaacgccgaagtggtgcagtccatcggcaatcgtttcgtgctgttccgtcgctcccggcgcgacgatgtggagcatatccgcttggtgcgcgagtagcgttcgctctgctcgatcccgtagcttgatatgagtaatggcggttggaatcagtccgattccaaccgccattattcatattcgcccagcgagcaccgtcactgatccaagatggacccgacgattcccgcaacaatggtcagaaccaaggaccccagtaccgaccaccagaaaccgtgtacgaagacgcccacgccgaacagactgaccgccagccagctggcgagtcgcatgaacagccaattgataatcaaggtgaccagcccgagagacagaatcgcaaacggcagtgcgatcagatgcacaatcggcttgattgacgcattaatcagcgccatgaacaaagcgaacgcggcgatgccgagaatcggaggctcccccaccggggtcatgccgggagtcaccgcgaccatgacggcggcggcgatagtcataatcaaccagctggtcaggaaacttttcatggcccaatcgtagcgcggcaggttttactattaggcaaaacgtgagatgatgttgtgcagaaacggtaagaaggtactgccgttcccgattgagaagggatagacccacatgactgataatcaacaacaaccgtacggttcggacagtgttccgcagccggcacaacctgcacagccggcacagccgtcgtacggccaagatgccgcacggcagccgcagggctatggcgccccacagcccaccgcatacgctcaacccgccgccggaagctacggccagcagcagccgcaatacggccagcccgccggcgcatacgctcagtctcagtacgctcagccgcagtatggccagccgcagtatggccagcc

SEQ ID NO: 565 - DNA, 14895 bp, Unknown
  R48_24m  MAG No. k141_82808
acgtcagcggcggcgtttggtgctgtgttttcggtcaccatcctgccttccttgtatcacacttaaccctatgaaaacctagcagaacccaagtgcaaacactagctgccctgacgcatattggctgtgggcttgattacatgcgggcgccatcgggccatgcggcatcacggatggcaccaaacggcgaaggcgtggcggcgaagcatcctgagatgccgtgccgtcacgccttcatcgtgcgcggaccgaccgcgcgggatccacggtcagcgggccgcctgatggccgagcgcggccttgaccagaccggcgaacagcgggtgcggcttggtcgggcgagacttgaactccgggtgagcctgggtggccacatagaacgggtgcacgtcctgcggcagttccacgaactcggtgagctcgccgtccgggctctggccggagatgcgcaggccgccttcacgcagacgatccttgtaggccacgttgacttcgtaacggtggcggtggcgctcggtgacatgcgtggtgccgtacagttcggcgaccagcgagccttcctccagctcggccgggtaggagccaagacgcatggtgtggcccatgtcgcccttgccggccacaatgtccttctgctcttccatggtggcgatcaccgggttggcgcaatcgggctcgaactcggaagagttcgcgtcttcaatgcccagcacgtggcgggagtattcgatgaccatggactgcagaccaaggcacaggccaagggcgggcagcttggtttcacgggcgaacttcagggcgccgatcttgccgtcgatgccgcgaatgccaaagccgccggggatcacgatgccgtcgacgttgtcgagagcggcggccgcgccttcagtggtttcgcaacggtcggcagcaacccatttgacgttgaccttggcccagttggcaaagccgccggccttgatggcctcggtgacagacaggtaggcgtccggcagatcgatgtacttgccgacgatggcgatgttgacctcgtgcttggggtggtggacgcgctcaagcaggtctgcccattcatcccaatcgacatcgtggaacggcaggccgagctcacgcaccacgtaagcatcaaggccctcttcgaacaggatcttcggtacatcgtagatgctcggcgcatccacgcagttgaccacgccttcggcatcgacgtcgcacatcagggagatcttgtctttgatggactggttgagcgggcggtcggaacgcagcacgagggcgtccggggagatgccgagctgacgcagcatcatcacggagtgctgggtgggcttggtcttgagctcgtgggcggcggaaatgtacggcaccagggaaacgtgcacgaacatgcagttgtccgggccgagatcgcggcgcacttcgcgggcggcctcaaggaagggctgggactcgatgtcgccgacagtaccaccgatttcggtgatgatcacatccacgtcatcggaagcctgggcgcgcatacgagacttgatttcgttggtgatgtgagggatgacctgcacgcactggccgaggtattcgccggcgcgctccttgcgcagcacttcctgatagatctgaccggtggtgacgttggccttctggctcaggaagacgtcgaggaaacgctcgtagtgaccgatgtcgagatcggtttcggcaccgtcttcggtcacgtagacctcaccatgctggaacgggttcatggtgcccgggtcgacgttgatgtacggatcgagcttttgctgcagaacatggatgccgcggctgcgcagcaaacgaccgagcgaagatgcggtcaggcccttgccgagagaggaaacaacgccgccagtgacgaaaatatgcttggtgacgtgttcttgagaattaccatgtgttcttctaaccatggaattccactctatcatccgtgtatgacccggcgtgttcatgacgtggccggtgtagtcgcgcgtaggcagcccgtctcgtcctgccttggccagcatatggtcgaatacacggcgcacttcaggtccatagggcgcaccaggacgaggattctggtccgattcgtcggaacaggaatcccgggcgcaacgtcgactgctacccgtgattggctggagggcttggttctattcgctcagcaagtgcgccacagcatcgagcgcgagcttgtagccgtagaaacccatgccggtgatggtgccggtggccacagggctgattacggaacgcttgcggaactcgtcgcgggcggacgggttggaaatatggacttccataagtggcaggttctcatcaatgaccatgtgcgcggcgtcggcgagagcatacgaatagtgcgtgaaggcggcggggttcatgaccaccggggttttctcgtcggcggcttggtgcatccagtgcaccatttcggcttcgtcgtcggtctggcgcacctcgacttcgaggccgaggtccttgccccattcagcgcagagcttgcgcagggtgtcgaggtcttgacgaccgtagacgtcgggctggcggacgccgagacgtccgaggttagggccattgacaacaatgactttggtcattgggactccttttgtttgtgcttctctccctccgccccttcggggcacctccctcatcagagggaggtagaaggtaaatccgactccggggcacctccgttagaggggagccaagtactttttctgaggggatggcgaacggcacggcctacggccgttcaattactgctggatacgacggaatgcttcttctacggcttcggcgggcgggttgtcgaggtgtacgacgtgaccaatctcgtcgaggaccacgaaacgcagttcgttgccacgggctttcttgtcgcgatgcatcaatgcgagcacgtcgtcgaacgagctgccattccacgacgtcggcagacccagcgaagcaagcaacgaacggtgatagtcaaccagatcctgatcgatgtaaccgatcagatgggccagctcggcggcatacaccataccgacggccaccgcattgccatgcctccagcggaagtgctcgagcttttcgatggcatggcccatcgtgtgcccgtagttgaggaattcacgcagacccttctccttcaaatcggaggagacgtggtaggccttgacctttaccgtgcgctcaatgagctcggcaaccacgtcttcgagcggcgagccgaggaatgtagagccgtcgaaagcgcgcagttcagctgcgtggtcttcgaggatatgcaggatttcggggtcgcggatgaaaccggatttggcgacttcaccgagaccctcgatgaagatgtcattgggcagcgtagccagcgtcttggtgtcggccagcacaccggcaggcgtgtagaacgagccgacgaggttcttgccctgcggggtgttgatgccggttttgccaccggtggaggcatcgaccatggccagcagcgaggtcgggcagtttacatagcgcacgccgcgcatccacgtggcagccacgaaaccggccaaatcggttgcggcaccgccgccaagccccaccacggcatcggatcgggtgaaaccttcgttgccaaggcgttcccaaatgccgttggccacggtaatggtcttgccgggttcggcatccggaatcacgatgtcggaaacctcatagccgccctgacgcaacagggcgcgggcacgatcggagtgtcgctgcaccggctgggtatggataagcgcgattttggcgggcttgggtcccagcacgtcgaccagatgattcatggcaccttcgccaatgaccacatcatacggctcaattgccgatccggtaacatgcactgctcgctcagataccatatcaatcactttcttcgctgcgccctgaggcgtaagcccccgggtatggacatgaacgttggcgacctcgcggaataccgggtcacgctgcttgaacagtttcttccaacgggagttggcattgccattgagcatgggccggcctcccccgcggttcgcgcgttccatggcctccgccggatcggcgtcaaggtagaccacacgaccgccatggtcgatgtatgaggcgagggcatgctgggtggatggcgtcatgggagcgccaccgcccagcgaaaagataccgtcgaaatcctcaagcatatcggcgatgagatcggcctcgacctcgcggaatgccggctcaccgtattcatcgaagtaggcgggaatcttcatgcccacttcacgttcgatctccacatcggcatcggcgaacggcagacgcaacatatgcgccacttccttaccgacacgtgttttgccggctcccatcatgccgatgatgacggcgcgggggcgtgcggtcataatctacgaatcctctcgacgattggtgggtacagttgctgatggttccgcggcagtcgtctcggaaccatactccacttcgttcagcgcatgtgctccggccacgaggcgagatacgactcaaggttgcgccgtgtttcggcaacactgtctccaccgaacttatccagcgcgtacttcgccaaagtcagacgcaccatggcctcggccaccacggatgccgcaggcacggcggtgctgtcggaacgctggttgatggcttgtgcggattcgccggtcagcacgtcgaccgtacgcagggccttggggatggacggaatcggcttcatggcaccgcgtacgcgaatcacctggccattggacataccgccttcaatgccgcctgcgcggttggacagacggtcgatgcggccgtcggcgttgaccacgatctcatcgtgcgcctgcgaaccggggcgggaggcttccaggaagccgtcgccgatctccacacccttgaacgcctgaatgcccataatcgcggaggccagagccgcgtccagacgacggtcggattccacatacgtgccgatgccggcaggcacgccgtaagccagcacttcaatcacgccgcccaacgtgtcggcggccttcttggcctcgttgatgcgttcgatgatgcgggcctcggcctctttatccaacgtacgcacgggagaggcatccaacgcttccagatcgtcaggtgtgggcaacggcaaatcagggttggtctgcacgccaccgagcgccaccacgtgggctacggtgcgaatgccgaacgcctgatccaggaactgcttggccacctcgcccaaggccacacgggaggcggtctcacgggcgctggagcgctccagtaccgggcgggcgtcgtcaaaaccatacttgcgcatgccggtcagatcggcgtggcccgggcgcgggcggctcagcggcgcattgcggccttcgcgcggcaggtcatggtcgagtgcatcggcgctcatgacctcggtccacttcggccattcggtgttggcgatttcgatggccaccggcgagccgagggtcaggccgtggcgtacaccggtcagcagacggaccttgtcttgctcgaacttcatgcgggcaccacggccatatccaagtcgacggcgtgccagtgcggaaacgatatcgtccgtgctaatgcgcacgccggccggcaacccttcaatcatggccaccaatgcttctccgtgagactcccctgccgtctgccaacgcagcataacttccctcgtttcatgtgtgtacgtctatgtgtacgtctaactaggggttaatgttaagccatgccatacctgttcacgctacccggtctgctatgtgggcttgcactgtccattgaggatgttcgtcatcggcgggtgccgatcgcatgggtggccgtgggcgcgttaatccagttggccgccgatttcgcgcatggagtggtggcgaacgacctgttcgtgctgttgcaggcgctgttgttcaccgtgctatgttgcctgatccagttcgcgttggcgttgctggtgccgcggtcattgggattcggcgatgtgaccgccttgatacctatgggattgtctgtcggactgtttggcctgttgcctgtggtggtctggtggctggcgatgggcgttgccggcatcacatggattgccctgtggacgcgattcgacccacaacgcacatcaccggcacatgcgggcaaggtgccgtatgtgccggtgatattggcgggcgcgattgtggcggtggttgttggggcttaatcccgtattactcccctcagtccgctttgcggacagctcccctcggcgaggggagccaatgaggcgactactggttttcggcttgccacttgcgtagttcggccacattctggtcatgttcatcggcggttacggcgaacttggtttcgccggtgtccagattgaccgtgcagaagtacagccaattgccgctttcggggtgcagtgccgcttgaatggcgctatcgccgggattgctgatcggcgtaggcggcaggccggagatcttgtacgtgttgtacgggttggactcgtcttgggtcatctcggtggtcacctgcgcgggcttgacgttattgccataggccacggtggaatccatgcccaacgacatgccctgctccaaacggttctcgatgactcgcgtcactttgccgtagtaatcggctttgttgacctcggcctcggcgatagaggcgatgatcatcacccgttcgcggtcactgccggtcggcacgcccaattcatccaacttggcgatacgcttatcgaccatggccttgaggatttccgaagcgctcttcatgctcttgacgttgtaggttcccggctccagccatccctcaaagctaccgcccgcttcattgggcagaatatccttacccttgttcttgataatcgtgtcgaattcgctttgggcaacgccggaaagcttcgcggcgtcggcgaacacatcggtggcacgttcaccgggatgaacctcaaggaagcccgccgcctggttggtgtcggagagaacggcgatcacatcggatgcggccatatgcttcttcaatgtgaacgttcccggatagagtgtcgcgctattggcgttgaccacgctggtgaacgcggcagtagacttgatgacttcggccttgagcagattatcggcgatctccgccgcgccttggccctcgctcacggtgaattcgacctcgccatagcccggtccccgatagtccgcgatggccgtcgactggttgctccggctgtcgcgccatgcgatgagcttggttacgccgaaatagccgccgccgataagcagggcgacgatggcgatagcgatgataatgccactgacgcgcttgcgcttgcgctgtgcacgtcgcttgcgcatctccttgcgggatttcggcggttctggcggctcggtcccgcgcattggttctgacccctgttcgacccaatgcgtgttgtcatcaaagaactcgttaaaatcatcggtcataaccgatacctcactgctcccgggtacggtcgagtgccgtctgcaaaatcaccactgccgactgctggtcaaccaccggcctgtgcttgttcgaagctttatgggcctcgaacagttgacgatgcgcactgactgttgtcaatctctcatctatcaatgacacctgcggaatctgatactccgtagaatcactgtcttcactctctgcttgcagcctcttctccagattggccgcccacctgcgcgcttttttggcgcttttgccttctgtaccgtccatctgcaggggcagtccgacgattacatggtccacatgttcgtcttcgatgacgttcaggacctcgtcaatagcaaagaaatagtcgccggcaacatgaatgttgccagcagggtgtgcaaaggtaagctccgggtcggacagtgccagtccgacccgggcattacccaaatcaacgcctaaccacaccactggcggaatcaggctttctgcgcctcgtgctcgagcgcttcgagggcctcgtcgatcttggaggcatcgacaccgccaccctgggcgaagtccggcttgccgccgccaccgccgccgaggaccttggctgcgccacgcaccagatcaccggccttgatgccgaccttgcgggcggcctcgttggtggccacggcgaccatcggcttgtcatcctcgttcacgccggcgagggccaccaccacgggggcgtcttcaccgagctgggcgcgcacgtcgagtacggtcttgcgcagggcgtcgaccgcgccgaagtggcccacgttcttgacggccaccttgaccggggccgcggagttcttggtgtcagcaaccaacgccggaaccgaggcggccagctgggactcgtacatggaggccaagcgacgatcggattccttgagcttggcgagcagggcgttcacacgctcggcgagctcgtccgggcgagcgttgagcttgtcggacagctgggagaccaacgcgtgctcacgagcgttgaagtcataggcaccctggcccacgacggcgtcgacacgacgcacgccggagccgatggaggcttcggacaggatgttgaccatgccgatcttgccgacgtggtccacgtgggtaccaccacacagctcgcggctccagccgtcttcgccgatggagaccacgcgtacgatgtcgccgtacttctcgccgaacaggtgcatggcaccgagggcgatggcgtcgtcgaacttcatttccttggtggtcacggcgaggttgtcgcgcagcttgtcgttgacgcgctcctcgactgcggagatcacggacttggccggggccttggaccactggaagtcgaagcgcagacggttcggggcgtcctcggagccgcgctgggtggcctgcgggccgagctcctcacgcagcgccttgtgcaccatgtgcgtggcggtgtgcgagcgggcgatggcgccacggcgggccaggtcgatgttggcgttgacttcggcgccgacgaccagcgtgccttcggtcagacggcactggtggacgatgaggtccttgatgggcttctgcacgtcgtcgacttcgagcactgcaccgtcgtcggacaggatctcgccctgatcggcaagctggccgccggcctccgcatagaacggggtacggtcgagaatgacttcgacgttggccgggccggtgacggcgggcacggagcccttgccttcctgcatgatgccgatgaccttggcgcgggcggacatatccgtgtagccgaggaagtcgatcggcttggcgagcgtcttcttgaagtcgtcatagaccgacaggtccacgttgtgacgcttcttgagggcgtcggcgcgggcgcgggacttctgctcggccatgagttcgcggaacttggcctcgtccaccttcacgccctgatcggcggccatttcgagggtcagctcaatcgggaagccgtaagtgtcgtgcagagtgaacgcatcagagccggagaccaccgggtcggcggtcttcttggccttcttgacagccacgtcgagaatctcgatgccgttctccagcgtacgacggaacgcatcttcctcgccgtaggccgcttcggagacatcgtggaaggtgtcgttaagctccgggtagctggcgaccatggcctccttggagacgggcagtagctcgggaatcaccggatcggtcacgccaagcacgcgcatggcctgcacagtacgacgcagcagacgacgcagcacgtagccgcggccgacgttggacgggcgcacgccatcggacataatcatcagcgcggaacgcacgtggtcggccacgacacggaacttgacatccgcggcctcatcctcgccgtacttgcggccggacaggcgctcggcggcctcgatgaccgggaagacctcgtcggtctcatagatgttctgcttgccctgcatcaggtaggccaagcgttccagaccggcaccggtatcgatgttcttctgggcaagctcgccgacgatgtgcaggtcggtcttggacttgacgttgtcgacctcgtagttctcgaacacgaggtcccagatctcgatgaagcgcgtctcatcggccgcgggaccgccatcacgaccgtattcggggccgcggtccacgtagatctcggagcaggggccgccagggccagggccaccggtggtccagaagttgtcttccatgccgaaaatctgcatgtgctcgggatcgaagccctcgttcttccagatggaacgggcctcttcatcgtcggtaaaggtggtgacccacagcttttccgggtcaaagccgtaaccgccctcgctctgcggggtggtcagcagctcccaggcgtagtggatggcctcttccttgaagtagtcgccgatggagaagttgccaagcatctggaagaaggtgccatggcgggtggtcttgccgacctcatcgatatccagcgtacgcacgcacttctggttcgatgtcatgcggcgcttcggcggggtctgctcaccaagaaggtagggaatgaacggcaccatgccggcgatggtgaacagcgtggtggggttcggggaaatcagggatgccgaaggcatgacgagatgatcatgtttggcaaagtaatcgaggtatcgctttgcgatgtccgcagtgcgcatgagcggatgaactccttgtttgggtaatgggcgcagttgcgcctggtattggtggaaaaagactggattatgaggactagtttgttctagctggttcagtgactagatggcaaggcggcatgcgcgtgtcagttggcgcgttcgatgtactgacggttgagctcagcctcgcgggctcgacgggcggcattgaactcgttaaccaacccttcgagtgttttcatcggcacattgtcctgatcggggccaagcaggaactgccgggccgcatcaggcgtgttggctttgacgtaggcctgcgccttggtgacgaccatcacgccgatggccacgccgacgccgacccagaagatgcgtttgaacatcactcccccttctcggcggtgtcgttgacggtggttttcgcggcgttcttcgcaaggaaggactgacccgtggttttcagcgcgtagaaggtggaagcgatcttgatgatgggcttaccgaggaaagagccatacagatcagtcaacgcaccaacgttgttggcggtggtggaagccgcggcggaaatcttgttcacgtcttcaagcgacttgttgacctgcttgacggtggtcacgccttcgtccagcgcggggatggcgtgttcgccggactcccggaccgtctgcgatatctgatcaaacatcttgcccagcctgatcagcggatagatcatgaaaccggccaatactgcgaacgcgatggccgcgatcaggccagcgatctctccgactcccattgtttcctccttgcggtcacacttactcgcctaagggtagcactccttccctatttcttggcataccattgcacgcgcagggcgaaaaccgtgcgcgtggatgcatgcggctataggcgaaaggtgtcctgctgacgctttcgtttgcggcgtgccgccgtggaccgtacgtgctattcgatatgtattgcttgctatttgctacttgccgtacgaaacgatggtcacggcctcgccgaacggcttgtcggtgtcgaagtcgagcacggttaccgaaccattggccgggcgttcgttcagatcgaggtcagggccgccgaaccggtggccgaggctaagcagtgtgttgccatgcgaaatctgcagcacatcgtcgccatccttgagattcgggttgtcggcgataagacggaacgcgccttcgacgcgcgtccaatattcctcatcggattccgcatcgtggaagggatcggcttccttgagaaaatcacgcgaggcccccaacccgaacttctcgacgatttggttgtaggttttggcgccgtgaggcgctcccgcggcgtaccaggccatggccatgtcaagtccctcgtagtagccgtagaactgctcgcggaagtgcatgtccgtcacgagtgcggggcgcgggttacccgcggcttcgttgatgtcgagaattttctcggccgtctgccgggcacgcgtggtgtccgaacagtaggcggcggtgaacgtcaatcctttcagtcgctcaccggccttgacggcatcagcgacgcccgactcggtcagcggcgaattcgaccatccctgcagacggttgtatcggttgaaataggtctgtccgtgacggaccaaatgcagatgaagaatcatggttccgattatgtcaccattccggcggtttcggtgcgggctgccggaagtcataagtcataacggcataggtcactacctgagatatgcgtaatccgggtagtatacctgacgattcctgagagtacacttagggtactatgagcataacctcgaaacctgcaccatctcaatcgtctgagcctgcccatttcaggggtatcgatggactgcgcgctctggcgattcttggagtcatagcattccacacccgcccgtcgctattgcagggcggattcattggcgtgacgatgtttttcgttatcaccggttttcttgccacacgttcagtactgaacatggtggaccgcaccgggtcctttggatatggccgatatctgatccgccgcattactcgtttatggccggtgatgctggcgaccattgccgtggtgccttggctcacttggatgttcgctcccagcctgttgcagaaagtggtttccgattcgctgccgagcgccttgttcgccagcaattgggtgtacatcttccgcaaggtgccgtatttcgaggcggccggattgccttctcctctgacccatctgtggttcttgggcgtgacgatgcagttctatctgatttggccgttgctgatggtggtgctcggcaaaatcaccaagtccaaatgggtgcgctccatggcgattcttgtcatcatggctgcttccaccgccgccatggtgctgctgtttgacccggccaatacctcccgcgtgtattacggtaccgatactcgtctcgccgagctggccgccggcgcgctgttggctatctggattgcgccttcctcgcgaggtacggaagttgtggaagctggagcggcttcgcaaacagtgcagatcggacgtcaggccggcgacaagacgggcgcccgtctcactatcgtctgcaatgttcttggcaccgcggctttggcggcactgctggccggattctggttcgccaacgggtatctgtcgtacatgtaccaaggcgggtacctgattaccgcgttcatatcgttgtgcgccttggcctgtgccgtgaacaatgactcaatctggtcgcgcgtgctgggttgcgctcccctacgctatatcgggtcgcgatcgttctcgctgtacgtcatgcattatccgctgctgcagttcatgaacccggcgacacgaacgcaggcgttgccgtggtggggttgggttcttgaggccatcgtggtgttggcggcgtcggaagccttctaccagctggtcgaggcggcccgtaaatcggtgcagatgcctcgcagccaacatgccaagccgctgccgaaagccggctaccagctgcgcccgggcgcgtgggtcatgtcggttatcggattggtgaccgttgtggtgctgacgtgggcaccggtggattggaatggcatcgctcaagcgcgagccattcagctgcgccccgaactcgcggcacccgccaagccggtcaagaaaccggcgaaacccgagcccgagtcttctgccacgaatgccgcgaacggcgaaaccaataccgctgacgcgaataagaacggttcggattctcagccgcccaccatcaaaccgattgcggaaaaggtgccaaacaatcttgacatttcgaagtacgcctatgatccggcaacggaaagctgcaacgcggatatgatgatggtcggcgattcagtgacgtcgggtacttcggacgccatccaggccgcattcccgaacgcttttatcgatggcctgccaaaccgtcagatgccgcaggcggtggatgtgtatcagcaggacaccgctgccggccacagtggcagtgtggtggtgtttggcctcggcacgaacggcgtgatttcgaatgagcaggaagtgcaacagctcattgacctgaccggcggcaagccgacatacttcatcaccatccgtatgccatacccgtggcaggagaacaacaacaatacgatgctgcgtgaggccgccaagaagaacaagaacgtgggcatcatcgattggcatgggtatagcgaaggtcatagcgaatacctcaacgatgacggcattcatccgaatatgaccggtgcctatgcgtacgcgacgatgattcgtcaggcggtgtgcggccagtaatcgccctataacgcaggaaccccgcggcttctcgaaagaagcgcggggttcgagcggtatgtcctggatttgttgaccagagggcccggatcagcgggcgtagaattcgaccacgtactggatgttgacctgcaccgggatctcttcgacctccggcttacgggtcacagtggccttcagggacggcaggttcacgtcgaggtagccggggaccgcaggcagcacgtcacggtgcacgccttcggcggcgatctggaacggaaccatggtctggctcttggccttcacctgaatggtctggccgggcttgacgcggtaggacgggcggtccacgatgttgccgtcaacgaggatgtgacggtgcaccacgaactgacgggcctgggcggtggtgcgggcgaagccggcacgcagcaccaggttgtcgagacgggtctcgaggtcggtcagcatggcgttaccggtctggccggcagtacgggtggccttctcgtaagcggcgcgaagctgcttc

SEQ ID NO: 566 - DNA, 5489 bp, Unknown
  R48_24m  MAG No. k141_
gccataccggcagagaccaccctcagtctcacttcgttcgacagctcccgcccgcgggagcataaggacttaagtcatgtccattccgctaattcttgcttccaagtccaagcctcgccgtgacgtgctgtattcggcgggtatctgccccacaattcgcgtctcgcacgtggatgagcctgctgcgctggaagcggccgcccgtgaggaaggtgtcaccgttgacgatttgagcatcaagcagcgtgtgatgattcttgccgcagccaaggccgaggccgttcaccgtgcgtatcgtgatgtggccgatactgccgccgccgcgaccggtgaccgcgtgatcgcctacccgctcaaggccaaggagatcaaggattcggaacgcgaagctgccgtcgaagacctgcgcaaagccgccgctggccagcccatcgactattccaaggcggaagtcgccaccacgcgcgacttctccggcatcgacatgccgaccatcaccgaacccatcgccaccgctattgccggacagccgggactgaccgaggcgacggtcggcccgctgattctcggctgtgattcgatgttcctcctggacggcgaatgctacggcaagccgcacagcgaatccgtggcccgagaacgactgaagcgcatgagcggcgcgaccggcgaactgtggaccggccactgcctgatcgatttcgcgaccggacgtaccgtgcgcggcgcaagccatgccaaagtccatttcggcgaattcaccgatgacgacatcgaacggtacatcgtcaccggcgagccgctggaagtcgccggatcgttcacgctggaaggcttcggcggcgcgttcatcgacagcatcgagggcgatccgcacggtatcatcggcctcagcctgccgctggcccggcatctggccggcgaactgggcatcacgtggaccgacctgtggaatgtcggccgtggcgaactggagccggaaagcaaggcctcgggcaaccagcacgctggcattctgccgccggtcgaaaacgtgcatcagcccggcgatggctgggtggactgcgcctgcggccgcaagcattggggcaccaacggtgcgtccggcattctgctggctcgccgtgacccggcgagcggcaaggtgactcacgtggtcatgcagcaccgtgccgcgtggagcgccgaaggtggcacgtggggtatccccggcggtgccactgcggacggcgaatcgtccatcgaaggcgcgctgcgcgaaagctacgaggaagccaacatcacccccgaagacatcgaggtggtcggctcctaccgcgaggaccatggcccgtgggcctacaccaccgtgtttgcctttgaaaagcccggccacaccgtcgagcccaaggcaaacgacgacgaaagcatggaaatctgctgggtcccgattgacgacgtgcccaaccgcaagctcctcaccgctatgaagaccgactggccccgcttcgccgcccgcctggacgagctggcctgtgctggacatcggtagtggtgttggctgggccaatgttttgccgatgagttcacttgggtaatgccgtgtgaaccgcgtgtggaccgggacggattctgctgtcccggttcgtcatttcgtctcttttgggacaaccgggacagatttcgctgtcccggttcgtcattttgcctctttttgggcaaccgggacagaatctcattcacctgacgccctatcgtgcgatggtcgccgtcggggaatggcggaattccggggttttggatttgcatatatcgggtgttcatggaagggcctgtcccggttcgccaaaagaggccgaaatcccgaaccgggacagccgaatctgtcccggttcgtatgtcgatcgattgaccccgccgccgggacatcaaccgcgcatagacaggacgcttcaatgtctggcgggcatgaccatatcggatgacacacgttccctcgtgcgtttcgccacgacctccgccccaagtcagtgcgaaaatggcatttttagcggtgtggtcagctgtcgcatgcggaaaatcctaaatcaaccgccgaagagacacatcgccgactcggcggaactcgctggtctgcgcgcaatgaggagtgttgtgtctgaatgcgattcagacaatggtcggcgtcaaatagcggtctccagccattaatcattggtgattgtggacattgagcggagtaaacattctagatgattcagggatatgccgaaaatcatatcgttcagagaatgaagtaccgcatctcggagtaactgactgtcgacgtgcatggtttgaaatctgatatccacgcccatcatgcctagcaaaattacgggaatggggttcggactatttcgcctcagccaaccgggagcttccgaatgctcaatgctgtatgcacttagtgtgtggaaaccagccaatcattgaccaatggcaggccgcagtcgaaaccagaaatatcctcgctcgcagtcaggtgccgaggctcagtgaagttggtcacgtccatatgggatcacgctccaacaattcattcagacgtaggcccataggttcgtttaatgctgcggtgaaatcattccacgctttactgttgagccgaatgatatgagcttcatggatgtcccgatctgcggcggcgagcagattcgataatgcccattgcaacgaagtcatgcctttggactcggccgcttggtcgattctggaacgttgctcttaggtgagtctcatttcaaaacgactgttcttgttattctctgtagtcgtactcctgttgtacgacttttgtacggacacgattggtgtgtgcgggatgtcgattgcgatggccatgtgggctcctttgcttggtctgttgtggttccagcttccgaaccggtcttccactgttcctcgtcttctcgagcaatgaacatctgatatatggattgtcgcgtcgactgcgtatctctaatccttgcggatgaggagcgggccggtgatccagaaaggttcataccgcagcccgatggtcggctgggcgttcgctccgtacgctcgggagtatgaacacagcagcatcgcaattgcagcagcctcagccggcgtcgggaccggcggctcagcctcagcagtctcagcaaccccaacagttccagcagccggcatcgcacacccagcagtgggccccggtcatcgaggcgcacgacctggtcatggactacaccgccagcatggcccgcgcacaggcagggcacggcgtcaccggcgtgatgccagccggcacgggagccggttatgcgtcggcgaatcccgctgcggccggaccgggtgccattcaggccggccagccagcccagcccggcttcgccatgccgaccatgcacacgctcgccctgaaccacgtgaacttcacgctccgggagggtgagacagtagccgtgatgggcccgtccggctccggcaaatccactttgctgcacgcactcgccggcatcattaagccgaccgccggcaccgtcatcttccgtggtgccgacctgagccgcatgagcgacgccgaccgcaccaaactgcgtcgtaatgtcttcggattcgtcttccaatccggccaactgctgcccgaacttccggccgtcgaaaacatcgccctgccaatgatgctcgacggcgtgccctaccgcaccgccacggacacggcgattctgtggctggaacgtatgggtttgcgcgcactcgccatgcaccgaccgggggagatgagcggcggccagatgcagcgcatcgccatcgcccgtgcgctcgccgtcaaacctgccgtggtcttcgccgacgagccgaccggcgcgctcgaccaagccaccggccgcgaggtcatgggcattctcatggccgccgcgcgggacaacggttccgccgtggtcgtcgtcacccacgaccccaacgtcgcttcgttctgctcgcgcaccgtgaccatgcaggacggccagctgggaggcgtacgatgagcgctttcgcattgtggcgattgttccatcgccccggctcgcgtggcagtgcgggtcatacttcggtgttggccatcattgcttttgccgcagccaccactatctttctcaccgttttgggcggcgtgcatgggttcatgtggcgcgcctccgccgaccacaccattggatgcgcaatcaatctcgacgcttgcaaacccggaacagcggaaatctggaagcagcgtatcgccaatccccacagcctggatcaatacgccacggcatacgtcgtgctggcgttctttgcctgcctgctgctgattgtgccgttcgtggcgcttgccggttccgccgcgcgattggctgcgtcccgtcgtgacgctcggctcgcatccctgcgcttggcaggcgcgaccacggggcaagttattcgccttacggcgcttgatgcggctgggcaggccttggtgggggcgctgattggcatcgcggggtactgcgtgttgatccccctaatcatgttgctgcatttccagaatcagacgtttacgttcgagcaactgtgggtggggccgattgccttgatcattacgcttgttggcgtgaccgtgttggcgctgatctcttcgctggtcacgcttcggcgcgtggccatcacgccactcggcgtcacttcacgcgttgcgactacgctgccgtccggctggcgtgtggtggtgttcgccgtcatcatggtgattgccgttcttctgttcaagaatccgatggtgctggctcaggccggtgaagtagtgatgtacggcgtgatcatcggtttcatgctgctgtgcttcgcgctggtgaacctcgtgggctcctgggtggtcaccgctcgcgccaaggccaaggccaagcgccccaaggatgcggccacgatgattgccatgcgccgtattctcgacaatccgaagcgcgcctggcgcaatgtgtccggcattgcactggccgtgttcatcgccggcatcacctcgatctgcggattctttggctcggccgccgtggtcggtgacgccaacgacccgtccaccgtgttcattcgcgacatcggcaccggcggcatcctgacgctagtgttcgccgctgtgcttgccgcggtcagctccggtgtgatgcaggccggcagcgtgtacgatcaggccggcgaatatcgcatgctggtgttggagggcactgatgtcaagaccttgaaccgtgcgcgattcatcgaggtactcaccccgctcaacatcgtggtgatcgtggccggcggctgttccatgctgcttatggcccctctgttcgccgcttcgatgaccgaaccggccacgctggccagcttcttcggcgggcttgcgctgtgctatgcgctggtttcggtgggtgcgttcgcgtccaatcgggtggccgccagcttgaatctggccgattatcgggccgatgactgaggcggtacggtactttcccgggtgacga

SEQ ID NO: 567 - DNA, 5471 bp, Unknown
  R48_24m  MAG No. k141_83626
agctgctgccgcagccgacaccagtgccgccgacaagcccgccgacgagggcaaggccgagtgaccaagcccacacgcactacgccggacttagagtcgaccccgctttccagcagggtcgaccctattctgacgcctgcgaaagccgaacgtgaggcggcagcgaaccgatccgccgacacgtcggacacgctcaagcggaccgttgacaaggcgacccccagcgtatccgacgaaacgctggcattgttcggacgcaggaacgatttcgccacgcgctaccatctgacgcgccgtggcaagatcaaacgactcgggcagatcaccagaatcgtcgagcaatttgacgtgctgcacggcctgactccggtcaaaatgcgcctcatgttcgaggcgctcggccccacgttcgtcaaagtgggccagattctgtcgatgcgctccgagattctgccgcaaagcttctgcgacgaactcgccaaactgcgcgccgacgccgacccgatgccgtattccacggtgttggatgtgcttgccgccgaatacgggcgtcccgccgacgaggtgttcgcgcatatcgaccccaagccgttgggctctgcttcactggcgcaagtgcatcgcgccacgctgaaaaccggcgaagatgtggccattaaagtgcagcgcccgggtgtgcgcgaaatcatggcccaggacgtctccatcatgcgctccatagccaaggccgccactaaggtgattcgcacctcgcagatcgtggatctgaagggcgtggtcgaggagctgtgggacaccttcgaatcggagactgactttctgatcgaggcccgcaatctcgccgaattcaagcgcttctccgtccgattcaaatacatggactgcccgacggtgtacgccgaactatgcaccgagcatgtggtggtcatggagtacatcgacggcatctccgtctcccacccgggccagctcatcgacgccggttatgacttgaaggagatcggcaccaagctcgtcgacaattacgccacacagattctcgacgacggcttcttccacgccgacccacatcccggcaatatcctcatccggggcggccagatcgtacttatcgacctcggtatgaccggtcggctcgaccagcgcacccgtgcagtcctcaaagaaatgattttcgccgtcgccaaacaggattcgcccgctctggccgaggggctgctgcgatttgccggcaccgaggccgatccggaggactatcccgcgctattggccgatctggacgtgatcgtcaaggaattcggcaccgtggatctggccgaactggacattgccgctttcctgaccgcactgacgcagatggccggccgccacaacatcgaggtgcccagtacggtgaccaccgtcggccgcgcgttggttacgctcgaaggcttgctggacgagttcattcctgatgtgaatatgatcgaaatcatttccgaccatatcgccacgtcgaaatcgctgaagaacgccaccaaagacgagatcaagtcgctgggcgttgaggggcatcaggctttgcatgccacgctcggcaccatgaccgaactcaagaccgtggcccgtatgctgacccgtggtcagttgcgcgtcaacatggaactggtcggctccgaagagccgttccagctgctttcggatatggtgaatcgtctgacgatggccctgattgtggtcggtttgttcgttggctcgtcgattgtctactacgccggcatgaagccgattatcttcggcattccggtcatcggcttcatgggctacgtcgtggccttcgccctcggcgtatggatcgtcatcgacatctacttaaagggccgcaaaaccaagaagcggtagggtatcgattgatatcagtccagcgggagggtggattcgcgctggataaggtggcagggtacgtagtcgacaccgtgatgcgggttgccgtcgatggcatcgaccaagtatcatgccgcacgtcgtccgatagtttcggtttcgttgtcgattgacgtcagtgcgggccccgagttggaggtcagtaccgaccagttatcgtcggccgataacggcgacgtcatccggaatgcgtagatcctgctgcttgagcacgtcaatgcagcctcgggccagctggtcgttttggcagaccacagcgtcaaacgtgacgccctgatcgagcagcaggcgggtggcggcgcggccccaactctcatcccacttgccataccggattggtccggccggttcgatgcccagctcagccagtgcctcgagcgcacccttggtgcggtcggtggcagcggtataggtttcgccgccgccgataatggcgatgtgccggcgaccgcaagaaatgcgatggttgatggccatgcaaccggcgtccacattgtcacaggtgaccgaacgatcttcggtatcggtggaggggccgtagacgtagaccagtggcacgccccagtcatggccaagcgtgggccgggggttggtttcgcgctgcacgatgagtagaccgtcgaccttgagggaccgcagtttctcgacatgctgacgttccagcgcggcgtcgcgaccagatcgtcgaatccgtcatcccctaccagtggtgagtgatgaacgacgaaatcgacaccacagtgcctgacgacccggctggcaaccagctggctgacaacaaaagccacgcggtcgccaatctgaaggttgtcgccggcgaattggacgacgaattccacggcatggtgttccaggattccgacgtctacaagtggcttgaggaagccgcttatgcgctggcctaccatccggatcccgaactcaaggcgctgtgcgatcgcacggtcaatctcatcgcccgcgctcagcagccggacggctacttggacactccgtatcaggtcaagtccggcgtatgggccgaccgcccgcgcttcagcctgattcagcagagccacgagatgtatgtgatgggtcactacatcgaggccgccgtctcctaccatcaggtgaccggcaatgagcaggcccttgaggtcgccaagaagatggccgactgtctggacgccaacttcggccccgaagaaggcaagattcacggtgccgacggccacgccgtgcgcgtcggctacctgtgcaccggcgtgacccatgtaggatcaggggctgatcgacaccgccaagcgtttctggaagaacatcgtcacccgtcgtatgtatgtcaccggtgcaatcggttccacccacgtgggcgagtcgttcacctacgactacgatctgccgaacgacacgatgtacggtgagacctgtgcttccgtggaccgctacatctacaccgagcgcgacggtggcaagaccgtgcccagccaccagttcatcgccaataaggccgagttcgcttccggactcacggttgaacagcgttcggacttcccgtggaacggtcacgtggaatacacggtgagcctgcccgccagcgctacggacagctcggtccgattcggactgcgtatccccggttggtccttgggctcttatgcactgaccgtcaatggcaagtctgccgtggctcagcctgaagatggctttgtgtatctgatggtcaacgcgggcgatacgttggagcttgatatgtccgtcaagttcgtgcgtgccaactcccgagtgcgttccgacgccggccaggtggccgtcatgcgcggcctgctggtctactgcgtcgagcaggccgacaaccccggtgatctgtggaactaccgtttggccgatggcgttgatgccgctgccgctaagaccgagttccagtctgatttgctgggcggtgtggataccgtctcgttgccggctgtgcgtgagcaggctgatagcgatgacgccgcgctatatgtgtccgccgacgttgctccagccactgaagcagccatactgacactggtgccgtactactcatgggccaaccgagaggtcggccagatgagggtctggctcagacgataattcttacccctctattctccttccattgggtgagcctcccactgctgaacagcggcgggaggctttctcatatgcggggtatgatggggtgtcgattcactggggagagcaataatgacggcatatatggatcacaaggacctcgccaacgaggtcatcgatcaatcgcgtgcacaggagatcacggacggcgtgcatcgggtgcttgatcgtatcgctgcggccgaatccatggccgggcgagaagctggttcggtgcagctcttggccgccaccaaaacgcgtgacgttggcgagattatggccgcgattggtgccggtatccatctcatcggcgagaatcggccgcaggaggttacggttaaggctccgggattgacgcgcttgctttcggagcgtggaatgtcgttgggtgtgattggcgaggctggggctttcaacggcgcagcggcgtctggcgctgcgaacggcgtcggtgattccgattcgactggtgcatcggccaatgccgcgaatcatattccgttccatctcatcggccaattgcaggccaataaaatcggcaaagtgctgccggtggtgaacaccatcgaatcggtggattccatcgaactggcggagaagattgcgcgccgcgccaccatgcgcggcatcacggtcggagtgctgctggaggtcaacgaatccggcgaggaatccaagtcggggtgtgctccgagccatgccatcgatttggcgcagcgtatcggtgccatgggcggccttgaattgcagggactgatgaccatcggcgcccatgtggacgacgaacgtgccattcgtgcgggctttgcgcatctgcgccgtacccgtgaccagattctggcctccggtgcagaaggcactgccagctgtaaggagctttccatgggcatgacccacgatatggcctatgccatcgaagagggctccaccatcgtgcgcgtcggcaccgccatcttcggcgaacgcgcctttatctgaggcatttctagttttatttgtctgttatcgacagaattttaggaaagaatcggcttcgtcctgaaatcctgtcgctgacttcgtcttagtgacaggatttccggaaatgagtcctatcttcctaaaatcctgtcactcagttgtgctcagtgacaggatttcaggaagagtgggctcatttcctaaatttctgtcgctaagaggagctggtaatacaaataaggtgtcgcgatacatagaaaaggtcgtcgcaatcaagtgacgaccttatgaatatcgaaatagagcaatcacgcgtagatattgcgcggacgcatgtcctcgggaagcccctccagcagaatcgccacggaaccttcctcgaacacggaacggataccggcggccagcagaggcgcgcaagacagcacggtcatattcggcagacgcttttcctcgggaatcggcac

SEQ ID NO: 568 - DNA, 4834 bp, Unknown
  R48_24m  MAG No. k141_83802
ctcggtcagcttcttcagaccgcgctcatccagctcaggatcggcgatgaacatcagttcgtacttgtgcgcagacatcacccacctccttcggactattcggccacggacgttccgtggcaggagtgtgtatgcgtgttagcccatgacgcagcaccaaaccggcaccgcatcttcgggcaacttggacagtctatatataaggcgggacagggtatggccatattcctgccggtttcgcgatgcccaccattttggccaagcccgcgcagccaagcccgcgcgccatcacccagtattgtccatttcgagcctcgccctatggtcatggcgctgattttgcgggtacgatagtgctcgaagaagcatcagaagaaagggggactatatgttctgtcctaattgtggcgcagctgtgcgcgaaggagcgcaattctgcggttcctgcggcaaccatcttgccgcggcgtcagctccagcagcagcgacgcccgccgcacccacgcccggtcaacccaccggcgccgttcccacgaccgcacagcccgcggctcccgcaccatcgattccgttgcccggcgcagcggctgtgcagccgacgcctcagcccgctgcacagccgcaggcccagcccgcaggcggaccggcattcaccgcaccgaccacggccattccgaacccagggcagcccggctcatcgccggctcccgccgctccggcacaacccatctcttccagcccactggtcaaggaactgttcggcgcccccaacatgcagaccatcggcattgcggccggcatcggtacggcagccgccttggtgctttcgattttccctgcaatcgcaatgaattccatgagcaccgcagcacccagcctcggggccgattcaacactgaaccaagccgttggcggcatgttcatcaccggcaacggcatgaacttcttccactacctgttcctatcgttggtcatgggcctgtctggcggtattcatttcgacatcgtcgacctctcatcctccagcatggacgccagcaacatgatgtcgtacccactggggctcaccggcttggcattgctggtcggcaccgcattcggcgcattcatgctggcccgttccaagagcattcgattcaagttcaccggcctgatctccggctttatcaccggattgctgccggccgtggtcatcacgctgcttgcggccatcgcggcggcaccactcgccagtggcaccaccatcgtggccaaggtgaccggcgccacagtgcgtacgttctttatggcctacctgctctccgcgctcggcgctctggccggctatgcactggcccaatatgcttccgattccaagaatgtgttcggagctacttggcagtgggcacaccgcgttcgcggatacacgcgcacggtggtcagcgtcttgagcttccagctggctttgctcttcatcgtcggcctggtggccctgttcgccgtggcattctcctcaggtcagggaatcctgatactgacgttcccggtcacactgctgatgatcggcgagttcttctttacctggggaaccttcggcgccattacactgaccgagtccggtcagctgccgcaggatctcagcctgttcagcatcaacctcagcgttaccgtatggcctatttggatcctgttcgccgtgttcctggtcctcaccttctacacggcattgcgcgtctccgcacgcaacctgtacgaccgtgcctacatgggctggcagcactgctggaaagccccgatcgccatcatggtgttctgggcgattgccacgctgctgatgggtactatgggcaaccgcacctccgtcacgcaagttcagaccaccggacctgccatgtggtacttcctggtcatgggcctgtgggcattcctggttgaggtcgttgcactgacgttcggcccgaccatggtggtttccatgccgggactgcgggccctacttgtaggcggcactgtgcgtgccacgcctcagcctgtggtcgactacatctatgccagcggcgcaatggtcggcaagtggcccacgtggggcacgccaagcgccggcgtgggtacgggcgcaaacgctgcgcagcctcacgtcaacgtcacgccgacgtccgccggccagcctcctgttgctggtgtcggtgtacccgcgcccgctgccccgggtgctccggccgcccctgcaacccccggtgctccgggcaccacattcgcaaccgcggctcccaccactcccggagcggcaccggtagccgcacctggcgcgacctccaccaccatgaatgagcagcagaagaagatcttcatcatcgttggtgccgtggccggcttcctcgtactgttcggtatcgtgtatggcgtgctgtcttccgccgtgttcagcgcgaagagcgtggcgaacagctatgtggccgccatctcctccggcgactacgacaaggccaacaccatcgccgatcctcacgtggatacgaaccagcgcgcactgctgaccagcaaggcatcctcgggcgagaacacgcacatcaccaacgcgcgcatctcgcagacttccaacaatgccgatggcaccgtgagcgcccagctgacgtacacgcttgaaggcaaggaggtcaccggcgattccatcaagatggtggccaacggcagcaagttcctgatcttcaagaactggaccgtcgccgaaccgttggtcaagaccatttcggtatatgcgccaagctcgctgggcagcatcaccgtcaatggcgtgaccgtaacgcccaagaacgccgtgaacaacgacgcggacgaaaccggcaactaccggctcaaggtgtaccccggcgtctacaaagttggcgtggtgaagtccgactattacaccgccaagaccgtgtctctgagcaccaacagctccgatagcggcactcttgacgctcagcctacggacaagttgacgtcggaaatcgacacggcggtgaagagcaagctggatgaatgcgcggcttccaccgatgcagaaccgcagggctgcccgttcggctactacacctccaattccagccgataccgcaacttcaagtggacgattgacggttatccgaaggtcaccagcgtgagcctgtcggatagctcgttcagcaccgacgaaggtgatgtgacggcgaattacgagtaccgttacagcgatggctgggaaccggaagacgattccagcactttctcggtatacggcaccttcaccatcaaagacaataaggtcagtgtcgagttctccgagtgatttcggcaatctcaacactcttacgaaataggcaccccgccgtggcgttcgctgcggcggggtgcttgtacactggttaaggcgtaaatcacacagcgactcaaacaaaggatgcgaacgcatgtcggcgattcttgaaggcactccggataaacgactcgtattggtcacgggccgcgcctaccccgagctagctgagaaggtggccgaatgtttgggaaccgaaatcctcgaaaccacgtcctatgactttgccaatggcgagatgtacgtgcgtttcaccgaaccggtgcgtggtgcggacgtgttcgtgctgcagtgtcattcgggcgatatcaacaagtggatcatggaacagctcatcatgatcgacgctttgaagcgcgcctccgccaagtcgattaccgtggtggcgcccttcctcggctactcgcgccaggataagaagcaccgcggtcgtgagcccatcaccgcccgtctgattttcgatctgttccacgccgccggtgcagaccgcattatgacggtcgatctgcacgccgctcaggagcagggtttcttcgatggtccggtcgatcatctaaccgccatgccggtgctgctcgattacgtgcgttccacccttgatctgggcaacaccaccatcgtgtccccggatgccggccgtatcaaggtgtccgaacagtgggccgccaagctaggcaatctgccgctggcattcatccacaaacagcgtgatattactcgtccgaaccatgccgaggcacatggcattatcggcgatgtcgacggccgcgactgcgtggtcatcgacgacatggtcgataccgccggtactatctgcgaagccgtgcgcaccctgaacgaatccggcgccaagtcggtgacgctggtcgccacccatggcctgctctccggcccggccgtggagcgcctgtctcactgcggcgcgcatgaaatcgtgtttatggacaccgtgccgattcccgaagagaagcgcctgccgaatatgaccgtactgtcttgcgcaccgctgctggccgcgggtattcgctccgtgttcgaggaaggttccgtggcgattctgctcgacggcctgcccgaggacatgcgtccgcgcaatatctatgcgtgattgatacgccgaaaatccttacgaaaaacgccgcttggctattgatcaagcggcgttttttcgtatagctccaatcagatgaaggcgcgctcgccgaagatggcggtgccgacgcgcacgatggtggagccttcttcgatggcgtaggccatgtcgtgggtcatgcccattgacagttcggtgcagtcggccgtgccttcggcaccggaggcaagaatctggtcgcgcgtgcggcgcagatgcgcgaagcccgcacgaatcgtgcgctcatcatccacatgggcgccgatagtcatcaatccctgcaagcgcagtccgcccatcgcaccgatgcgctgggccaagtcgatggcgtggctgggtgcacagccggacttcgattcctcgccggattcgttcacctccagcaa

SEQ ID NO: 569 - DNA, 5784 bp, Unknown
  R48_24m  MAG No. k141_84886
catttgctcgatctgcgagccgcgcagagagaccaatgccaactcggtgccggagaacacggaaccgataacgagaaatacaaaaatcaggaggatgttcaaaccaagtgacatgccttcaactctaggggagtggcacgtcaaattggggtgtgctggctgggcagtaagaaactcggcaaagggaagggcattctcatcaccatcgatgagacgcaagcggcctcgcatgatgatttggttgccattgctacagccgtgcagcacgtcattacggatgccgatgaaagtgatacgcctgatgaggataagaagggcgttgtcatcgtatttgccggcttgccgtatatggtcaacgatttgctggataacgaggtaaccacattcctgcgccgtgcgctacgccgcgaattggataacgtgccgcttccagacgtcaagaatgcgttcccggaaacagttgcggattccggcaagaccatcagtggggaagatgcgcttgaagccgctcgccagtctgaaggatacccgtacatggtgcagcttgttggctactacatgtggcaatccgcacaacgtcgaggttcaaatgtcattaccgcggacgacgtgtcgaccggtgtttccgatgcgctgctcgccttcgacgattcaaggacaaactcatccgcccggcaggtcatgggcagctggaatttgcggtgccgcatttggggcagtatttgcagtcgttgtagcaccaaatatagggctgggttcattcatttggtaggttgcgcgttcatttggtgggttgtcggcatggtgaggcgttggaatggcggcatttcaatggtcagtgttggagtgcagtgaccaaatgaacgcataattgacctaatgaatgaagtaagccggttgcgggctagtttcgatccagttctatgagcgccgacgcatcttggccacggcattgctgacgcaaatacgcagcacaatggtgaagacgactaccataatccccagaatgccaatgttgaaccagaactgatccgtggtgtgctcccacagatcatcctttttgaacatcggcaccttggtggggccatacagcagatcgttgagcccgatatccgaggcggcggcggagaagccccaacgtccggggaagatcatgctgaccagctcgaggctgtcgcggccggtgaccggaatcatgccgccggagaacaccaactgggccatgaccagcaccaccagcaatggcatcgtctgttctcccgacttcaccaacgccgagccgacttcgcccaacaatgcggaagtccacgcagtcagccaaatcgccaacaccagttcgggtatgccggaatcagtgaccacaccatggtccgggccgggcttgccgaggctgaccgcagtggtcagaatcgccgcctgcaacaaggtctgcaaacccatcacgatgagtttcgaggcggtgtatgacgtgggcgacaaacccaccgcgcgctcgcggccgtaaatcgctcgctcggagacgatgtctcgcacggacaaagccgatcccataaaacaggcacccagtatgacgagcacaagcagctggttcggctcggtggcggcgtctttgaaatcgggctcacccaagccatgagaaccgggcacaaccagcgacagcagtcctaggagcaatggcagcaacagcaggaagatcagcaatccggggtcggcgatgatcaaatgcagctgacgaatcaccagagtgatggtctgtttgatgcggaatggctttgccggtttctcatgctcggtgtgccgcgtgatggtggactcggcctgcatggtgcgctggcgtgaatcagtaatcgaatacacccgttccggagattcggcgacatcgttgaagatgtcggcccattccttgccgttgaacgcctggctcatctcctgcacggtgccgaagaatgccggatggccgccgggagcgagcatgagcacgttatcgcacaacttgttgatatacgacagtgaatgggtgaccacgataaccacgcggccggcatccgccagttggcgcaacatggtcatcaccgtaagatccagcgccgggtcgaggcccgaggtcggttcgtcgagaatcagcagttcgggttcggtgagtagctcgatagcggtggacacgcgcttgcgttggccgccggacagtctgtcaatgcgattcttacggcgagacgtgagttccagctcattgagcacgttgtcgatgatttcggcgcgctcggccttggttgagccgggcaggcgcagcttggcggcgtattcgagcgccgcgtccacagagagcttgcggtgcaccacgtcgtcctgcggcacgaatccgatacggctgcgcaacagttcgatgttctgatgcacgtcgtatccatcaaacagcacgcgcccgtccgtggggctgttgagcccggcgacgatggaggtgaatgttgatttgccggcgccggaaggtccgattacggcggtgagcgtgcccttggcgaatacggcgttgatgccgtcaagcagccgggtgcctttgcccacggtcagtccgatgttttcggcgataaccgcgtcgttgctgacaaacggcgtgcggtcgcacagcacgccttcatgcacgatcaggtcggtgttgccgacggtgacgacgtcgtcttcccgcagccagatcttcgcgacgcggcggccgttgacgtaagtgccgttggcggagttcaggtcagtgagcaggatgccgctgctggtggtttccagcgagcagtgtttgcgggagaccagataatcgttgatgcgaatcaggcaggcggtatcgcggccgatgacgcctgtggtgtcgtgctcggggctgaaggacccgtgcacgcggttggtggtgagttgggattcgagccttaccgcttgcgtgctgcctgccagaacggtgccggcggcattcgatggggaaggggatgcgcagggagacggagatggtgatgcgggtgataccggcactggcgatactgccgtcggtgccactgctgttgggcggggttgctgttgcaggtgcgcgagggccggggatacgcggtgcggggccagcggggctggcgttggttgcggttgtaccggttgtgccggttgcggtgctggtggtgtgggttgcactactgggcgtgcctgttgcggcgcgagttgcgtgggttgtgccggttgcgctgatggtgccggcggtagcgcaggctgggccacgtttgccgcagggcgtcgcgggggctgtgccggcgtggacggcccgctggttccgacgatgcagacgatggtggcaccttgtgccagcgtcactttggtgctgttcagcagcagtacggaagtggtgtgaatgccgttgatggacagtccgtttgcactacccgtgtcttccaagagccaaccatcgtcggtaaaggtgacgcgagcatgatggtgagatacgtacgggttgtgaatcaccagatcgcaatccggcgcacgcccgatggtcgtggcacgtgcaggattgggggtataggtggcggatccgtagtgaatagtaagggcaggtggcattggttcagacttccgtgttcttcgatctctctgcacacagatgtaccacgaccgcattacccccggtgaacggggtctgactgatggtcagaaactcagcacctcgaccttgccggtgtcgagctggtaacgggcgccgacgatcatcagctggtcggcagccaatgcctgctgaatgatgggggattgttccaccagcgtctcgatggtgtgggccacgtgtacgcgctcgatgtcttcatgcgcgtcgagctcggcttcgcgcgcctgccagacggacatgccggcctggcgcagaataatcgattcggcggcggcgatgtgctcgtcgaggtcgtccatcgcatccgcggcctccagtgagccgtcggcttcggaagtgatggtgtgcatcaggtcgtccagctcctgctcggcggcctcgattgcgccgcagtgctcgtgaccgagcacacagatcaggctgacgtgcagtttcttgaccgcgtactccagcgaggcgataaccgcgctatcgatgagttgcccggcggtgcgcacggtgaacaggtcgcccaggccctgatcaaaaatgatttccggaggcacgcgcgagtccgagcaggagagcaccgcggcatccgggttctggccatcaagcaacgtttgacgggtctcctgatcctgccatggatggtcgggcttgccctcggcaaagcgccggttgccttgcagcatgcgactccacgttgcgttcgcggtcgattcctgttcaaagtctgactgagccatgaaacctccattatcagcggactgctggtacccatagtagcgattggaagtgcggattcgcgactgcgtgcataatctggctttgcccaaagcataatgagaacgctcacgatctcaatcctgtttaagggtgggccgtgatgatagtcagcacaagggttgcgggtggtgtgataaggctcatacgttacacccgcgcgagccgtggctcaccacattacgataggtggtggtaaacgcttgaagattaacaattcccgaaaggaccgatgatgactcttctgcagcatgaactgaccgatttcaaggtgaacgcattccagaacaacgagttccacgaagtgaccaaggacgatgtgctcggccactggtccctgttcttcttctacccggccgacttcaccttcgtgtgccccaccgagcttgaagacctggccaagaactacgccaagttcaaggaaatcggctgcgagatctactccgtctcctgcgacacccacttcgtgcacaaggcttggcacgacgccaacgagaagatcgccaagatcgagtacccgatgcttgccgacccgaccgccctattggccaaagatctcgacacctacaacgaagttgatggcatggccgaacgcggtgacttcatcgtgagccctgagggcaaggttgtggcttacgaggtcatctcctccaacgtgggtcgcaatgccgaggagctgctgcgccgagtgcaggcctcccagtttgtctacgagcacggcgaccaggtctgccccgccaactggacccctggcgaggaaaccatcgagcccagtctcgacctcgtcggccagctgtgacggtttgaactaaggcatgttgtttgcccccgctggcgggggctgtcggcaacgccgactggaggtggtcgcggcaataggtgaaccacccccacccgcttcgcgggagcccccgccagcgggggcctgtgtatatgcaaggagtttcaatcatgactcagaccaataatctttatgacgtcgtagtcattggtggcggacctgcgggccttaccgcgggtctgtacttggcccgcgctcgctaccgtgtgctgattctcgaaaaagacgatttcggcgggcagatcaccatcaccaacgaggtcgtcaactatccgggagttggccgcaccacgggtcgtgcgctcacccagaccatgcgccagcaggcacaggacttcggtgctgaattcctttccgctgaggccaccggccttgacgtggacggcgacatcaaaaccgtgcacacttcgcgtggcgacatcaagaccttcggcatcctcatcgccaccggcgccagcccgcgcaagctgggcttcgagggtgaggccgaatacgcaggccgtggcgtggcttactgcgccacctgcgacggcgagttcttcgccggcaa

SEQ ID NO: 570 - DNA, 4358 bp, Unknown
  R48_24m  MAG No. k141_86223
accacacaacatcacacaaccaaaggttcataaccatgcaagagggcatccaccccgaatacggccccgcggtcttctatgaccgatccgccgacaagtacttcctcaccaagtccactttccttccgtacgccgccacctgccggggcgaaccgccgttttatggagtccaccgcatccgatctggccaagctcgccaaggcagacatcgtggctcaacggcgccggctatgacggttgggcggaaaggcgcagcttgacaagaaacgccagaccatcgggaacgcgggcgacctcatgggcgtcaacgccgcctacgcggacaaggccggggccggttctgccaccgccgccaccgtgcaacgtcacttcaacgacaggaagaaaccctcaaggaaatggacaactggcccacgtattacccggtgtccatgagcaaggaggaagtggccaccgagatgctggcccactgattcgccatcggcccaggcaaccatgtgcaaagttccccgcatatcgatgtgtaccatcggcatgcggggaactcgcatattatctcgaccactatcatgcgtacggtgctaatatgacggcgatatggcaggtgatattcgcatgaaagaacctcgcacgcagcgcacggaacaggtgaacaccgcgcaacaggaccattcggcgaactatctgtttctgattatcggcacgccgctggtggcgttcctgattgcggcttccgcgatgctcgagtcgcgtgggtttccggttccgctggtgcgtatcggcaccggtgccgcggggcttatcctgcaggcgattccgttcatgctgctgggcgcgatgatgtcggccgtggtcagcacgttcgtcagcaccgattctctggcccgccacataccgaaatcgttggccggcggactggccgcggcattggcggccggcctgtgcctaccggtgtgcgattgcatggtggtgcccacgttcgcgaatctgatgcgcaaacgcctgccgctgccgtgtgcggtgacgtttctgtgcgcggtgccggtgatgaacccgatggcgatatggtccacatggttcgcattcaccgacaaaccatggatagtggcggcccgcatggggttgggcatggtagtggcgatagtcgcgggggtgtcgttcgcggtgtggccgctccgctcccctgcggtgcgtgagaggccgctgacgattgggcggtcgttgatttgcgaggattgtgcaggggcgacgggtgattcgcctgagaaccacccccagtcggctttgccgacagcccccgccggcgggggcacggggcgcggattggagcggttcacgcatttcattcggcatacgcatgacgactttatgcggatgatgccgattctgctgttcggcacgatcattgcctccatcatgcgcaccgcattgtcgtcgttgaccaacggttcaagcacgctcgatgacgctggtgccatcgtactgattctggcggcgatgggactggcgttcctgtgttcgctgtgctctacgtccgatgcggtgatcgccgccagcatgattggcgcgctgccggtctccgccatgcttgccttcctggtcttcggcccgatgctcgacctcaagaacacgctgatgctggccacggaatgccggccacggttcatcatccggttcatcgcgaccgtggcggcggcctgcttcctcgccgcgattgccgcccatctggtgatgggagcgtagccatgaagcgcaaagtcacactccccgaccgcgtggaggcgctgtgtttcgcggcgctgggcgcggccatcgcctatgcggcggtgggcggatcatacaccacgctgaccacgccgcgttcgctgccgtatctcatcatcggtgcggtactgctgttcgtgctggcgaccgcagcatggctcggactgttccacgccacggagcgttcggttttgcggttcctgatcgccttgattattccggcgctgctgatcgtcgtgccgttccagcccagcagcggcagcggcggcttcgacgagtacgccggcggccgcgctatcgccattccccgcagttcgcacaagcctgatggcgcctcgcagctgcacggactcgacacggcgaacaagaccctgaccatcagcgacgacgaattcggctcatggttcgagcagatcgaccataatccgcagcgttacgtcggttaccatgtgcaggtcaccgggtttgtgagcaagtcgcgtacgttcggcgcgaacgagttcgagctgtcccgccagttcatgtcctgctgcattctcgacatgaccccattcgggttcatagccagctccggcaaggccggcaccccgcacaatcacgactgggtcaccgtcgacgccgtcatcaagcagggcgcctacggctccgccggccacgagcgccaaggcctgatactgcaggtccggtcggccagcaaagccgcagccgccccgaccggctacttctactggcagtaaatgacgcgtctcccgaaatggaaagcactgcgctgcgccatgactcgccccatatcggcagaaatcccgcgttacaacgaaaggtacgcgggggctctgcctttatagggctcaaaactggcagaaatcccgcgcaggcctcgttgaaacgcgggatttctgccagttgattcaaatcatgtgacaacatgccgggcatctaatttgctttaataacgataatgaatatcatttgttaacagaaaggggcagaacgtcatgagcatcgagcaaaccgcgaccactcggcgcgtgacgcgaccccgactcctcatcacccaggtcctggcgaaactatcccgattcgccacggcccaggaaatcaccgacatcctgcgcgagcgcggcacgcgcatcggcacggccaccgcctaccgcaatgtgcagatgatggcctcccaaggcgagctcgacgtaatccacgtcaacggcgaggccctctaccgcgagtgctcggaccagcatcaccaccatcacatcgtatgccacgaatgcgggcggaccatcgaaatcgagattcccggacttgagcagtggatcgacaaagccaccaagcagttgaagtaccagaccatcgcccacgaactggagattttcgacctgtgccccaagtgtgcggcgaagcatgccatcgaaccgcctctcagcgtcggcacctcaccaaaggatggaccactgacgacgccagacgatactggccgtcggcgctcgaacaaataatggcgcagtcccgacgctactggccttcagcatcggtgcccttccaatccttggcgcaatagcgacgatataagctccactcgcatcgttagattgccaacgcttggcgcagcaccgacgccagacacgctcatcgtcgtcgttccaccaatatttggattggtaccgccaccacctataccaggcgtcggcactcggccaacaatcggcccgttaccgacacaaaactgcatgaggtctcattgctcttaatagcagcaatgggcctgataatcactttcaccaactttcgccgctgccgtctgccgccctacagtcgcagacgaacaaacgctgaaaggaacaacaatgactatcaagaccatcgatgagcatgcttacgagatcgttaccgaagagggcaccttcgccgtctgcaaggacacgctggccaagttcgacgccaccaagcacgagcacggcgtggccgcctgtggccgctgcggctgctgcttcaccggcgactgctgcgacgacaccggctgcgagcacaaccacaccgaagagtgcgggggcaaggcttgcctgcacgcttgccacgagaaccgcgaaggccacgagtgcgccttctgccaccttgccttcgacaccaacgagaagtgccacgatgagatcctggccgacctcaaggaactcaaggccgagctggctgtctgagttttaggtttccgatttctcctgcggattgactcctctcagggaggggagccagattccgacacgaaccaccgcgcttaccgtatgatgtctacgggcgcggtggttttgtttttctcgatgatggcgcagatttgctcgggcgcctccttgcagccgcgccggacccatagccagataatcgatgagacggcggagaccagaatttccagcgcataggcgcgcggaatgccgccgtagctcagctcggcacccacacgggccgcctgcccaagcagcatctgcttcaacacatccttgacccggtcatacatctgcatatcgttgcccgaacgggacagtgcgtcgaagaacgcatactcacgcttgacatagcgcaacgcctcggcttcgtgttccagt

SEQ ID NO: 571 - DNA, 20017 bp, Unknown
  R48_24m  MAG No. k141_86425
cgaatagggcaggatgaacagggtgtacgcattctgataggtcgcgttgcctgccacgctgaacaggctggcacccgtcagttcgtgggcgcgctgcggtgcggatgtggcgatacgggtaaggataatgccgcagatctcactggtgaccaccacgcccaaagagcctaacgccacgggacccatagacctgagtccaaagccgccaagcccgaagctgggtttgtacttgaacccgatacgggccagtggcaggaacagtatcagcgcttggaaggccacgcccaaagtccaggtgcctgcggtaagcgcgattttgtcggcggtccagaattcgaggggctgttcattggccttgctgaacagcagaataaaaccagtaaaaccggcgcaactaataatgttggcaccggttgagctccacgcatacgtgaggaaatggtctttggcggccaggatctgacccaataccgtatacaggccgtagaagaacacctgaggcatacaccacagggtgaacgaggtggtcagggctatcatctggtgatcgtcgctacccacgtacaggcgggcaagcagagggctggccgccgccatcaccacggtcatggccaacaggatgccgatggccaacgtaaccagacgattcagtcgttcttgggcgtctttttctttcaacgtgcgcacaatctggggcaccagcacggcgttgaagatgccgccggacaccagcgtgaacacggattggggaatcatggaaccggcctgataggcgttggccgccaatccagtggtgccgatggccgcagcgagaagaatcgtgcggagctgaccggtcacacgggaagcagcggttcccgtggccatgatcagggaattacgacctacggttgaactcattcgtcggggtccttcttccgatggaactgccgccacaggccgataatgcacagtagcacggcgaagccgatgataatgaaaccgctggcatcactgacgcgcatcacactggtgatcgcggtatcctgcgtgttgccgaagctgttgccttctcggtcgctcagcgacacatgggccgtcgatgagccggaagtggaaacgcggatggtgaaggtcacctgagcgtcgctatgcgcgggaatatcgatgtcagtggttcgcgaggtgacgatctgcatggagtcagtcagcgagttgacctgcacgctgacggcataaggaaggtcattgctgacggtgattggcattttcgcggattcgctgaacacggatattgattccgatgggttgatgcgtacgccgttcagaagatcgctggccagtgttttcgcggctctgaccatggattttcgcgtggttgtcggctggggggagccagacatggatcgcagcgccatatcgtcatgcagcaccagcaaagagccaatccattgcgtcggatcgttgctgtgcgagacggtgtcattggcatcctgccgggccagggcctgcggggccaacgacgagacctcgtcggaatcaatctcgttcttcaatatggaggtggccatgcgcatgatgtcatgccggctgtcggccaactgtctcaatgccgaccgggtattggcggtgttggcatcatcggccttgtcgggattgaccgaatcgctgacattgtacggatcggccttggccatggtcttcagatccgtcagattcaaccaggacgcctgctcgaaggcgctcatcacctgatcgatccagctggcctccgtggtgcgggagaacgtcataagcaggtatcgggatgtatagggctgttccatctggtagaacgcgctctgagcgaccagtcgggccaaccgaccggcatcgctggactcggcctgcgcgtccgtgctggtggcttggcccttggccagcgtgcccaaggtcgattgctccttcagcacggtgacatcgccggcaggcgtatccaccacgtaggtgcctgtgtgtacggcttcagtctggtcggcatcgaaagaggcatcggcaatcaccgtgtcatagccctgctcgcgtgctgcggtcagcgcatccaacgtccaacagttgttgccctgccatgcgtacgcggagggtgtttcggagtcgtttccggcggcataccatgcggccgcctgcttggcgttccactgttcagtggtgatgccggccttttcgtaggccgcggtatcacccagcgcggtataggcggtgatgtcaaagtcggcgggctgcatgatgccggcaatggacggttgcactgcggactgacgccaatacagaggatccgcgatcacttgcagcgagcggtgcttggcgaatgtctgcccaagggatcgcgcggtatcggcatcctgctcggataaggatatggcttgcgtatcagtggctttggccacgttgccggcgtcggcgttatcggacttgtcggccttgtccgtgctgttggacttggacgatgttgatgtcgaggaagtggtggtttcggcaatgcgattgctgatggccttgttatcgacctgccagccgctggcggtgtagggcatggccacggtcaggttcatggccggtgtcgtcgcggtgttgagcccatccgaagatcgggtcagaaaactcggcaaatcggcgagtatccgattgccgacgatatacgacagcatcagcggcttcggcccccagctccctatggaggcaagggtctgctgattggcgttcacctcgatggtgacggtggcagtgccgccggcgggaatcgatggcacgtcaacggaacccaactcgttgggggtggggatgggggcgttgttctcggcccaattctgaatatcggtgcgcgagacaaaggtgaacagcgtattggtggtcaggtgcagtgtgccgcttgacgtggccgtgctgtccgtattgctgatgaccgcggtgacatggtagcccgatttggaggtgacgatgggggtgctttgcgtgatggcaatgctctgcttgggctgattctcggtctgattgcccgttgcgtccgtcgtatcggatgaatcagtcgtgtccgtcgtatcgttcgcgtagacggtcaatggagcggccagcatcgccacaacggcgacgccagccgccagtgcgtgtgccagacgtgtgcaatgtcgtaagactccgggtaggttcactcgtttgcctgcctgttcttcttcctggcgtagagccacgcgattttgcgttcgttgggatagctcaacacgtcatccaaatcttcaaaacgtacccagagggcgtcttccgcctcatgatccgggtctccttccaccgtcagttcgcctccggtctgtttgagcgcgaagtgatggaccagcttatgcacgcgctgcgtggtgccggtgaaccagtagtcgatggtggcgatggaatcgatcacctcgcccaggatgccggtctcttcatgcacttcgcgcacagcggtctgctgcggggtctcgcctttttcgatatgccccttcggcaagcaccattcgagatggccggagcgggaatgacgggcgataatggccacgcgattctggtcatcgaaaatcagaccgcctgccgaatattcgcgtacgaccggcagttcctgggcatccagtgaagcgaatgtggtcggaccgtccgacgtacggcgttgcggcatcatggccggagtcgggctggatggcgtcaccggttctactggcactgccggttccggcgaggcaacatccgcggacggatgccggccgaagaccgtggccggcgtgggatgcgctgacgttgcgggcctcactggtgctgcagacggcgctgagaccggcatggtgaccggcgttgcggccggtgcggtacgtgccgcaggcggcatcagcacgtcgcgcggagtcggtatcgctgcggtatgcgcggcggcggccttggcgaccgcaacggcagtatctacggccgcgtgggcggtcgccgcggaatcgttcgtgacgatggttacggacgtttgtgccgtggcgataatcggctcgaccttggcaatcgtctcggcaccggcctcgccggcgataccatcggcctgcccctcgatagtgccgctggtagtggcgatggtgacggtggcatgcatgccgaagacggtggccggtgtgggcatcatcggcttcggtgtgggcatgtcgctggcggcgtccgatatttcggattcggatggtgcgggtgtggcgggcgttgcgggtgtgccgggtacaccggaatgttgcgtagtcggtactgcgtctacttcgtcttgatgaacggcctgattggtggagtggctcgcggtgccgccggcatcgggagaatcgcccgaatcggcggaatgatgcggagtttcggacgtatacagcaggtggtcttgggtatggctatccgccgaatctggtgtttgccccagtatgcgggcaaggtcggcgggcgtaatcatattctccaccttactcaaccccgtgtgcaggtggggtaacggtatgctggtagggcagaaaaacgtcgcacgcgggaaggtgcccattgaatttcgaagtatggcccgaagccatcgaacttggtcgactgttcgccgaacagggttacgagctggcattggtcggcggcccggtcagggatttgctgctccatagaaagagccacgatttggacttctgctcatccgcacggcctgagcagttcgagccgatactgcgccggtgggggcatgacggcttctgggacatggggcgcaagttcggcacgctgggtgccatgcgccgccgcccggacggcaccgaggtcaaggtggaggtcaccacctatcgctccgacatgtacgatccggactcgcgtaagcccgaggtcaattatggcgacacgcttgagggcgacctgtctcgccgcgacttcaccgtcaacgcgatggccctgcgcgtgcccgacctgcaattcgtggacccgttcggtggtgccagcgatctgtccaagggcgtgttgcgcacgccggtggacccgcgacagtcctttgacgacgatccgttgcgtatgatgcgcgccgtgcgattcgtggcccagctgggcttccgtatcgcgccggacgcggccgaggcgattacctcgatgcgcgaccgcatcgacatcgtatccgccgagcgcgtgcgcgacgaactgaccaagctgctgctctccgaccgtccgcgcgccggccttgaggcgttggtcgaatccggtcttgcggacatcgtcttcccggagattccggccctgcaattgcagatcgacgaacaccaccgccacaaggacgtcttcgagcacacgatgattgtgctcgaacgcgcgatcgccctggaaaccggcccggacggcccggtgcccgcccccgacctgacgctgcgcttggccgccgtgatgcacgatatcggcaagccgaagacccgccggttcgagccgggcggcaaagtgagcttccaccaccatgacgcggtgggtgccaaaatgacccgcaagcgtttgaaggcgctgcgttttgaccaccatctggtcgaggacgtctcggaactggtgaatatgcacctgcgcttccacggctatgtggacgagccgtggaccgactcggccgtacgccggtatgtcaaggatgccgggcacctgtacgagcggctgaacaggctcacgcgcgcggacgccaccacacaaaacaagcgcaaggcgatgatcttctcccaggccatggatgagatggaggagcgcgtccgcgaactcaagaagaaagaggacttcgacgcgatccgcccggatctggacggcaacgaaattatggagttgctgggcctggagcccggcccgatgatcggccgcgcctacaagcacatgctggaataccgcttggataacggtccggtggaccacgatgtggccgtcgaagaactcaagcgctggtacgccgagattcagtagtccgatactagtccgataccaaaaaaccgtacgctgaatacgtgtcagcgtacggtttttcgcgaagatgaagctgtatgcgccttactccgccgtgtatgcgtcgtgtttggtgtcggcgggcagcttggtcatgctatcggcggccttgcaaccctcgatattggtgatggtcttaccggattgtggggaggatttggtgtcctgcagatcgttgaacgtggcgccgatgaccacatcgatgagttgatcctcgcgagccgtcatgatcatggtggcgtcggtgaaattgccgatcagcgtatacgcctgattaatggcgttcttgccgaagtagatggtggtgcgttcaacgccggtgctggaatagttatcgattttctgcacgctgaatccacgattggccaaagcctcacccacggccttggcgaattggccgtgagaggtgccgttcatcacgcggatgccgaccgaagcgttggacacgtattgcgctttgccgctgctgtccttgaccgcgcacggtgccgcgttgccgtaattcggctggcgggccggagtctccacttcgccgaggccgaaaacgtggaaattgaacagtagggctatgaccagcactactgccaataccgcgccgctgatggaaaagacgatggtctggcggtggcgcacgtacgccttgcgggcttcacgttcatcaacctgatacgtcatcggtggacttctttcatgggtcgggtggctggttgctaccttagcgtcactgtctgacgccgatattggggtgtgcgggagatttggctcgaataatgcgatcgaccacagccgtatcgcgccacacatcgataatgcgttgtgccgctgcctcgtcggcggcgaaagcgaccactgaggggccggatccggagacgaatgcatggctggcacccgcctgcgtggcggcgtcgatggcctgcccgctgcggggatgcaggctgattgccgcagcctgcagatgattgcggtcgccttctgcggctcccacgaggtcaaaggtgtggtagacctcaggagtgctgagttgcgactggtacgcgccgaccaatacttcgccgctgaatccctgttctatcagcgccagctcatcgcggctgccgggggcgatatccgtgatgcgttcgccgaaaccggtgccgtatgcaaggccaccggtcaggcagaacggcatatccgcgcccaacgtggcggcaatggtgcgcaggcgctctataggccagttcagatcccagagacgattgaccgccagcatggtcgccgcggcgtcggctgaaccgccgcctagtccggcacccacgggaatgcgcttggtgatggtcaacgccacatccggctcgcgctcggccgcctgggccatggcgaagagggccagtaccgcatggttgcggcgcatgtcgctgcgtgaggaggccaagtcgcccaaataagcgccttcgagctccagagagaatcccgctccgggttgcttggcggttgcggtgacggtgtcgtatacgccgattgcacagtaggtggtgtccagttcgtggcgtccgccccattcgtcgtgagcaggtcccacttccaaggtgagattggttttcgccgggcaatccaccgtaatggtgatgggggagagctcatcgaactgatgtcgggcagcggctgggcgtggatgtgagattaccggactcattgtgcctcatctccatctccacacgattcgatggccttggccagagcggtgaattcggcgatggtgagcgtctctcctcgacgggtcggatcgatgccggcgatggagaatgcctcggagggcgcaatggtcttcaatgccgcgtgcagggtcttgcgacgctgaccgaacgccgcatcaatcagacgaaatacgagttcccgttgtgcgccgccgtcggccgtgctgttcgaggcttccggggcggccgggtcatcggcctgataccgggtgaatctgacgagcgcggaatccacattgggagccggccagaacacattgcggccgatggtgcccacccgttcggcggtgccataccaggcgagcttcacgctcggcgtgccgtagatcttggaaccgggcttggcggcgagtctgtcggccacctctttttgcaccatcaccaagaacgagccgaggttgtcgaaacgctccaacagcgtgagcagaatcggcgtggccacgttgtacggcagattggcgaccagcgtaaacgatgcgtcatcgctgaaatcaggcacgttctccggggtgacggttaaggcatcccgattgacgacggtgagtcgtgatgtggcttcgggcatgaattcggcgactgtgcccggcagtcgttcggccaacggcggatcgatttcgactgcggtcatggtggcgccggtttccagaatcgccaatgtcaacgatcccaggccggggccgacttccatgacatgatcggcagcggtcactcccgcctctcgtacgatacgacggaccgtgccggggtcgatgacgaagttctgcccgaatttcttggtggggctgatgccggcatcggccgcgatacgacggatatcggcggcgcctaacaggtgaccggtggcgggaatggtgtcgttcataagcgtgtgttccttgtgggcttcgtaaccgatcagtaccaaccgatttgttcggaatgttgccatgccttggacgggctgccgtaggtttgtgcgatgtaccacagaccccaatcgatctgtacggcggcatcgtcacggtaattggcgccgaacgcagccattttgtctgctggtcgcgactgaggaatgccgtaggcaccggagctcgcgttttcggcataccacagccatctggactcgcggttccatagtttgaccaggcaatcccagtcgttgcctgtccacccgcgctgcgcggcggcaccggcggcataggcctgagcctgggctacggtggcgtgccagagtcggccggagggcgtggtggttgttcctgaatcggagccggaagagccggaattgttgttcgtaccgccgccggtgttaccggaattaccggtgttaccggaattgccggtgttgccggtgttgccggtgttaccggagttgttgccgccggtgttgccggcattgttgttggtatcggtgttcgtgttgttgccagagctgctgttgttcttgtcgcctgtgttgttggcattgttaccggacgactcgtgctgattgttggaaccggaatcggccttgccgttatcggcggagtcggattttttgtcggaacctttatcggtatcagacttggcggcgcctacggcgatgatctggtcgatggccatcgtggtgacggtttcggatttcagcgtctccgattcggccacgccatcgacatacgtgacgttatacacctgggttttctcgccattgacgccttgctggcggatctccgactggccttcaggcagattggagtcgatgatggtttgtgtggagtatggcactatggctgtgcgtgtttcctcgccatgcgtcacgcgccgtacgcgcaggatagtggtatcgccgtccttttcgacgctcacacggtcctctttgttcagcacgatgcctttggagtcaagaatggaggccgcgggcagtttgccgttgggggccacggaagtcttgccgtccgcaatgacggtgaccgggccatcctgattgatgaccagtccgccggtgagctggttgtacacattgtcgatgtcgacggtgatttttgtggcgttgttctggttttcctcgaaaaatcccagcaactggtcggcactggtggccacggtccagaagggaacggacgtgccgtcgatgttgatagtggtctggtaggcggactgtacggtgaccacggcatgattggcgagttggtcgccggacgaggtagtgacgatatcgtgggtcttgatatccaccccttgttcctccagaagacgggtggccgtcatcgcatatgtggtgacttgggtggtttgcccgttgatgttcagggctacggatttacgcgaggtgaacgcgaatgatccagccagcgcgatactggtcgccgcgatacagacgattacgcggatgcgacgcagtgtaacaaaccgctgcggggtccaacgccgtgccattgccatactcttcctgctggatgaacgattacgccacccatcgtaacggttgttccggcccgtactgcggtttcaccggccaccgtcaccattcctgctcgtcagattgttctgagctcaaaaaaagaaaagaaaaagggggcgggagagaaggggatgttcccgcccccctgaaggcgcggagctggttgggggacgctccgccctcattccaggaagcccatagttgggggaaggctcctggagtacttacccaaggtaagaattatatgcgtagaaaagtctacgtatcatataatacgccacttttctacgcgtcgagcctcttgtcgggatcgaaccgacgacctgccgcttacaaggcggccgctctggccatctgagctaaagaggcgattgttcttaacgcgtaaatcgttttgaacaaatctctagtataccggtagttctcgagtggtcaattcaggccgagccgcgccggtaattaatcggccagcgaaatcggcttcttgttggcgccgatcgatggcatctggccttccacgcccacctgatcggagtccaagccgatggacttgaggaatccgtccaccatgctggtgtccgccagcgtgagctgcttcagatcccagtattcgccattgatggtgagcgtgggggaggagaacgcgccggagctgttgaacagttcggggcgtaggatcgtgtagttgttggaggcggtgagccacttgacgtattcgttcttaccactgaatgccgcggtggccacatcctcgctcacgccggcattgacggcctgcttctccagcttggcgttgcttaccggctcgtaattggacaattcgcccggctggaaatcctcagcgtagatgttggagaggtagctcatgaggtgatcgggattgtcatcatgctcggcaatgtagatggcaccgttgaacgcgcggttggagtagttgtcggagctcttgttgtcctggaaattgaggaagtgcaaatcgatgttgagctggccggcgttcatcagcttgacgagcgtcgggtcaagctggcggttcaccgaggcgcagccggggcacagcggctccatgtagatggaaacggtgggcgccccttcggccttctgaccgtaccccttgctcgagatcacgaagccggccttgtcatcggcgttggccggctgggtactgactttcttgagcttgctataggcctcgtccacggtcatgttgctttgctggctactgctgctggtgttggacggccgcatagccttgtatacggcgaatccagcgatggccaccagcaccacaataatggccaccacaatgcagccgatgatggtctgctgcttacgttccttagccgcctgctcggcccgtgcctgctgggcggcctcctcggccgctcggcgctcagcgcgtgtggcacgcttggcctgacgcttcggatctgacatagctatccccttgcaatcgcttcaatgtttgggccccatcataatgaccgggcctgaggaggactgcgcccagagctgatctgaggtgaattccctgtaaaagtgtgacggaacgaacgtatcggatacacaacggccatgtgtgcggatggctgatgtgtgagattccgccccgctctaggcgaacggcatccagttgatcggcatgcccagaatcggcatcgcgcacaaggccacggtgatgatggcccatatggtgaacagcacggtgccgcgcccgccgcccttgggcgccggcaccactggagcaggtggagccccacccacttcggtggatggcgcgcccgccgggcgactgtgtttgagcccgcgcagtacgccgccccccagccgaatcatcatcgactgtggggcgaacacagtgaccagccagccgatggccatgaaaccgcccagcgccagcccggaagcggagaacggcacatcattgagcaacggcaccggaataccccaatccgcggtgaaataccaggagatggtgtgaacgggcagtgccagagccgcggtggccacggcggttcccgccatatagatgatgactagcagcagtatgcggggaatggccagcagcagggctttgaccagatgccagggaaaagtcgccacgcgaatccacgaatcggagtttttgcgctcgccgccgcgtttgccctcgcgctcaagctggggttcggtgttataggccagggtgagcagtagccacaacaacgcagtggccgcgatgatggccacgagcggagcatttgccgccagtgccgccagcggcgccgccagcaggatcaatggcagggtgccgcgccgcagatattcccctcgcttcacgtccaccggattgggcatgggaggattttggaccatggtttcggtgggggccgcttgggcggtttggtcgatgatgcgctgcaatgccgggcgaatggcggggtccaccgctgtgggctggttgcttgcgggatcccagctgctctgggcggtgccggacggggggaatgatgacggctgcggcgtggggagtacggtggtgcgctcggccagcggcgtggtcggggccggagtcgaatcggtgttggtcattggtgtggtggcgccggccattggtgtggtttggtccggcatcggtgtggtcgcgccggtgagtacctgtgtgccggcgtcgtcggtgaaatcggcagcagcgtcgggcaacagttgcgtggcctgctccgcaccggccggcggacgtggcggcatatcggctaagggcagcgtggcggtagcggcgccagccggcgagaatacggcggtttcgccatcgccgttatcgcccttattgccggagaacacggccatggtgggagcctcagcggcttcctcggccgcgcgccagatggttcggggattattgcggtcaacgccgccggccgcgccaaaagggggcatcgcctccgcggcttcggcaacgatcgcagccggttgtccagccacggctcccgcggcgaacggtcccgcctgctcgccctgccaagcgttgggattcaacgcatccaaggcgatggcattcagcaattgatccggcgtgcaacgatccctgcgatccgggtccagtgcagaacggaaggcagccaatgtgccggccggtagtccggaaagattcgcgttgcccgaggcctcgcgctcaagtaccgccatcatcggcttggtgccgaacacaggcgcgccggttgcggcaaaagcgagcacggacgccaccgaccaccaatcggtggcgtcgtcggattcggcaccgtcaataatctcgggtgcgatgaatccgggtgtacccatcactaggccggtgcgggtcacgtgactttcgccctcgcccatcgcgataccgaaatcgaccaataccggtccggcggccgacaccatcacattggtgggtttgatgtcgcgatggacgatgccggccgcatgtacggctttggtggcttcgatgagcttgcgggccaagcgttccagatcgtcgcccacataccggccattggcggccacatcatccttaagattcttgccctcgatgagttcagtgacgatgaacgccaacgtatcgtcgagttccatatccacgatgccgcacacacccggatgattgaccttcttcaaggccatggcctcgcgccgcaggcgctcgcgcggcgtgacatcgggcttgaggttggggtcgtgcagggccgtggacgcagagccggagcctgccactgactcgtcggtcagggagtcgcgcagaatcttcatggcataggtggtgccgccgtcgtcgcgcacccgccacaccgaccccatagctcctgagccgagccgggagatcagcgtatacccaccaaccacttcgccgggctcaagattcaacgcgttcaaatcgctcatgccctccatcctaatgccttgccggtgcattattctggctctctcctgggaggccgagcttgatatttcttggctcccctctctgagaggagagccaagaataagtgccgtttacgtattgagaagtgccgtttacgccattaaggtcgattgccctgaccggatgtggtagcaaattatgcgctcgaaatgacaggataggtgcgtgggcaggtgcgccagtcgtgaatttgcgactctataaccatcggcatcaaggatgtgtcggcgatgacccaaaggtgagccagccgggcacattcaacagtggcacagcgatgcaagggcagtatcgtgagccgctgatcgaatcgataacgatatcagattcgaatgccgcgacttcgccggtcgtaccttcgaatacttctccgaagacggctacctgttcggcgtgatggcctcccagcaggtcgctggcgctcaggccaaggcctgaggtgtgtctccgataactgaatagctaaatagaatggacggcctgctgagtgctactcaacaggccgtccattgtgtatctgaatgcgaaaagtcattatatggaacggaatatatcgatactgtgcattgtgccgattactgattccgacgcaagtattcgcgcaggaagggcacggcaaaatcgacttcgcctcgttctgtttcgcggataacgaaggcgtcaaggaggcgtttgcggtaggtggcggcatagttaggcgttttgcccatgcgctgtgcaacattcacggtgggagagggaccatctgacgctgccatggcttcgagatactcacggtcgtttttggataagccttgcaactccgggatgcacacggcgttatcaaggtcaatacgtgcttcctcgatacctgccgtaacatcagcgtcgatgatggtatccgagtcccgcatgtctgcggcatcccagatatggtagccaaccagttgaatcatataggggtatccggctgtcacattggctgcagtgcttaattgagcgtcggtgatggacatgccggaggcgcggaatgttgtggcgaaagcatcgcgcacttcatcaagaggaatatctgtgagtatgttcgttttcgcgcgacgtaggaacgtgatgacttcgtcattgaacaaatcagaaatcatctgtgggagaccggcgaacacgatggcgatattgcgtcgttccctgatttgatgctgtatggcagtggcgatggcaatcatgtcggatcgctcagccgcttgagtctcatcaatggtgataagcaacccagcatggcgcttctcaagcgcatccaaccgtccggcaatggcacttctcaacgtttcgggcatacgcttcggggatagttcggcttctccgaggccgatgcccgctccagcaaaagtcaacgatggtcggatagcgaggtggtcaagggcccctcgcccggttcgtaaggcatcaacaaggcgttcgcatagtccggcagaggccgtttcttcgatgacatcccatctgcgcgctttggcccggtctccgaacacagtgagcatcacggtttttccggttccacgagcgccggtgacgagcataatgcgccctggggcaccgactccgttatcgagacctttctcgaaatcgcggataactttgcctcggccgatgagcaggggcggttcccctcctgccgttggcttgaatgggttttcctttgccttcatgtggaccgcctcctcgctgaatcaacctaaaataaaaattatcaaaaatatcaaaaaaataaaaattatcaaaagttgggttgagccgactgaagaaaacagccgtggcgacaatgattctgccgcaatccgcggtgacaacaactgacgcggaccttcttggcagaatcgttgtttgtcccgcttcgccaatcaacgtcgctcaagttcggtgcgcagaccggctaccgtagcggtcagctcacgcacttcctcgcgcaataggtcgatttcgggattggctgatgttgcaatagcctcttgcgcggcttccttggccacttccttctcccgagcgtcctcgcgccgatccgtctccagattgacctgatccacgatccacgaggccagcgtggccgtcacaataccgatcaacgcgatgccggtgaacatcagcaccaccgcaatgatcttgccttggaaggtgaccggcgagaagtcgccatatcccacggtggtcacggtcacgaacgcccaccacaacgccgtgccgaagtcggtgatcgtggatccggacgccccgcgctccacggaatacacggccagcgcgcccacgtacatgagcattcccaccgcgccgaccgcgtatacggtgatgcgcccgcgcaccgccatgccggaggtgcggttcagcacgtgcagcacggtcagcaaacgcaacagtcgcaagggccggagcatcggcagcgcgatggtcagcagcgtgaacaggttgtgcttgaaccaccgccagcgatcgtcggccaaccacagcgagaccacataatcgacgacgaacaccacccagatcacgttgatgacggtttcacacagcgcgatatgcgtgcgggagagaatttcccacgaatacaccaccagaaacaccacggacagcaccatcagcggccagtccgtccacttcttccacgtcttcagtcccatattccgattgtagtggcgcgtccgctgcgccactgcggagcatgactccggacatcagtgttgtatacgttcgtatacatttcacgttgtgtacgaacgtatacagcggtatttttcatctcgtatttcccttatgactatcaccacagtgatataatcaagaatatgtaaggagagagaaggagccggccaatggagaccgcatcgatcgaactgtggcatggctcttcgcatgtcatcaagcatcctgaatacgggctggtcaagccgaacaacgattatggccgcggattctattgcacgcgcagcgtcgagctggccaaggaatgggcgtgcgcgggactggatgacggtttcgcgaatcggtacacgttgaccacggacgggctcctcttcctggacctgtcccagccgccctacaccatcctgaactggctggccatgctggtcgaaaaccgtcgtttccagccgaccaccgccgtcgccgcgcaaggcatcgaatatctgaaacaagtgtttctgccggatgccagtcaggctgacgtcatcgtcggatgtcgtgccgacgattcgtatttctcgttcgcccgcgcttttgtcaataacgcgatttccgtcgaccaactcgctgaggcgatgcggttgggcgagctcggcaagcagatcgtactcgccagtcctcaggcattcgcggcactgcggttccaaggctgcgaaatcgcccgcgcttcgacctaccacggattgcgtaacgagcgcgaccgcacagctcgcgaagcctaccgccgcaaaagtgcagaagccgatctcgacggcctgttcatgcgcgacatcatccgcgagaaagtgaccaacgatgatccccgcctatgatgggacatacttgccggacgccatggccaacttggccggcgccttcgattatgcgctgaacgattgcgggttgccggtcggcctattcatggacttcttcgccacctccgaggcggccgcgcttttcgggcgaggcacgcccaaatacgtgtgtggcatgtccggcgaggagctggtggccgaagtcatgcggcaaaccggttgggcgcgcattctcgatatgccgccagccgcactgcgcgccggctcaacacccgaatactgggccggatgggtactcgcatactgccaatggaccaggggagtgcggttctcggacattctcgatgtgctgtcgctcgacgatatcgtgcgactgtacccgactctgcacgaagccgacgaaagccgattcgtcgacgtgtacgacgagcgggccgcccataatcgcaccgagggcgactcccggctgcacacgatccgcgtgcgcgccggactcagccaatccgggctggcccgccgctccggcgttaccctgcgctccatccaaatgtacgagcagcgccgcaaagaccttggcaaagctgccgtctccaccgtgctcgctttggcccgcacgcttggctgccgcatcgaagatctgttggagccgtaaagacgcggagtagtatcgcgccgcatcgattctgataactgaacaactacttttaaggcccggccggatgctcgtttggacatccggccgggccttctggctccacacggggtgccgaggtatccgttctccgcttcgaggggctgatttggccttccgtagaggtttactcccgtttcgaggggctggtggcccgctagaacacgggtataaacggcttcgccccaccgtcattccgccattttggggatgcgcttacttgagtaccagcccctcgaaacggagatagatctccggaaagggtcaaaacagcccctcgaaactcaagatggcggttgcagggcggttgaggatcagtcgaagagcggttcaaacgcaaatgtgaacaatgccacatgtgattgggcgggtcgctgcacgccgattttcggggggtgcatgggaatggcggaatatcaacgaaaaaccctatatctaggtttgttatgtgacacgcgccactacatatagtgccttgatttcaaatcacaccgctgtaatatggccttcgcttcactgttcatcagaaccacatcaaggggagtcgccatgaccgtcaccgtgttcaccaagccgcattgcccgcagtgcgatgccaccaagcgccagctcaccaagctgggtgtgccgtttgaaaccgtggacctgacgcagaacccctccacccttgagcagctgcaggccgccggtttccagcaggctccggtggtcatcacgccggacaactcctggaccggctaccgccccgacctgattcgcgaagtcgcccagcaggtggccgccgacaaccgcgccgccgccacggtgtccgcgtgagtctgagccagcccgaattcgcggccgaaggcaagacgatcggcgcattggtctacttctcgtcggcctccgaaaacaccgcacggttcgtggccggatgccgtttgcaggacgaaggcatcaacgtctaccgcatcccgttgcgggccgccgacccggcgctaaacgtccgcgaaccgtacgtcatcatggtgcccacctatggcggcggcgtggtcaagaaagcagtgccgattcaggtcaaacgcttcctcaacgatccagccaaccgcgagtggattcgcggcgtcatcgcctcaggcaacaccaatttcggtgaggcctactgtgccgccggagacatcatcgccgccaaatgcaaggtgccctacctctaccgttacgaactcatgggcaccccggaagacactgccgccgtgcgaaacggcctcgtccgcttcttcaccgaacagtaaatcttgaccccctcgaggtattggctcccctctccgaggggagctgtcaacgaagttgactgaggggagcaactgtctgagtaaacacacttctgccatattccaaggatttccaatgactgacctcaccgccaccggcctgccgctcgacaatactgccgacaccgcagcggaacagtacgacccggcgcacgattaccacgcgctcaacgcgatgctcaacctctatgacgccgacggcaagatccagttcgacaaagacaaggccgccgaacgcgaatacgtgacagggcacgtggccaccaacagcaagcggttcgcctccaccgccgagcgtctcgaatacctgatcagcaaccagtactacaaccctgcggtcttcaaccagtactccgctgaattcctcgaccgcatctacgagcacgtggaatccgccggctttgagttcggcactttccttggtgcgttcaagttctacacgtcc

SEQ ID NO: 572 - DNA, 5969 bp, Unknown
  R48_24m  MAG No. k141_88128
agcgaaccttgtcgaagatgaagaactcggcctcaggggcgaaggaagcggtgtcggcgatgccggtggacttcaggtaagcctcggccttgccggcgacctgacgaggatcgcgggagtacggctcgtcggtcagcgggtcgacgatggagaaggccacgtcaagggtcttgtgcttgcggaacgggtcaacgaaagaggtctcaacgtccgggaccagcttcttgtcggactcgttgatggcctggaagccctgaacagaggaaccatcgaacggcatgccgtcggtgaaagcgtccttcaggaattcgctagccggcacggtgaagtgctgctgaacgccgataagatcggtgaaacggacggagacatactcgatgccttccttgttgataagggcctcgacgtcttccttggacttgagttcggtcacgggaccgctcctttcgtatgagatataacggtatatatcgtaaaatagcgcgtttcgccggctcgaaacttgggttacgagaatgtttcgtgactgtggccgacaatcgcgcaggcgcgttatttcaacgaaacatcattacagaatggaaacggagactatcgggggagtaggtagagatgtccgcaacgtggacagtgggtattgacaggtgacgtaggtggatgtaagtggacgcgattatgagacatatgacgaagccccggaaccgattgaacggattccggggcttctgtgcgatttggttgtgtgctgccgatcagcgaccgcgcatcgcgcggcgggagatcttctgcgggcggttcggatccatgcccttggggatggcatagcccttcttggcctgcagcgtgcgaagacgatcgttcagcgtttccatctcggccttggtcagcaggaagcgacggcgcggatgaatcttggcgatcagtgcgttcttgtggtccgtgggctcatagctcttggacttgatcaccgtgctacgcagcttggtcagcggcacctgcttggggccgtggcccacggcgatgcggtatatcggaatggaggagccggcggtgacgcccttgatatcgcgttcctgacgatccatcgccttcatgacgcgaccgtattcgccttcgccgatcaggtagatgccgttcatcgaagtgccgcgccagatggcatccttggtcttcgggtcgatccacaccggttcctgcgggaagtcaaagccggctttctgcatgttgctcagcacgccgatggcggcacccggcttgccatcaatctgcttgtagccgactgcatccgcgcggcgggtgagcatcatggtggccagcagaatgccgagcatgatggcggtaatcatggtgaagatccaggtcagccaggtccacttgacaatcagaccgatgatgatcatcacgactacaggcagcaggaaagcaccggcctcaagccacggcagggccttgtcttccttagccgtgtacttgtagatctggatgatctgcttgattgtgctctgcttcttcggcttcgcgtccttttccgccatcacttcttcctttgttgggacgaaacacactgggcaatatcttatcaggtgcgctggtccgaacttgcttgtgctggttggtctcagcgtgtgtgcaacggtcgtccgtcggccttgagcagcgcctcgccgagcgtttcactgaatgtgggatgcgggtgaacgaggcgggctgcgtcggcgagcggcacatggttgccgaccagctgttcggcttcggcgatgatgtcggaggccatcggggagaccatgtgcacgccgagcacgcgcggggtgtccgggttggccgcgtcgcagccggagacgatggtcaatgagccggccgtgccgctcatcagcatgcgcgcgttcgccagcatcggatagttggtctccttgatttcgacgaggtcctctctcgcctgcgcctgttcgacggtgagcccgaccgacgccgcttcggggaaggagaacacgatctgcggcacagcggcttcgttcaccggcttgggattgagtccggcgatggtctccgcgatgacgatgccttgctcaaaagcacgatgcgccagtgcgtgaccggccgtcacgtcgcccaccgcccatacgcccggtttgtcggtgcgaccgtacgcatccgtggcgacatgtccgtggtcatcaatcgtcacgccccatgctgggtcggtgatcgggtcacgcccgatggcgacaagggcgatttcgccccaaacgctctgttcgccgtcctggccttcgcgcgtgtagtgcacggtggcaccaaggttcgcgccggtgtccacatgggtgacgctggcgcgggtgatgatgttcacgccatgacgtttgagctcacgggtcagcgtggtgccggctctccggtcccaggctgagagcacgcggtccttgcgaatcagcagggtcaccttcgaaccggcggcgttccacatcgaggcgaattcaagggcgatggccccggcgccgataatcaccgccgaagagggaaattcgttgacttccagcgcctgtgtggagtcgatgagggcgccggcgaacgggttaccgggcaatgggtgtggcttggcaccggtggcgatgacgatgttcgtggccgtgaggtccatcgtggggccgctgggttcggggacatcggccttgtgataggtgaggatgtcgctttggtcgggggagggaacgaggtggacgatgtggttggaagttgctggagcgatctcatccgcatggaacgcggcattggctcggaacacggtgatgccgcgatgggccagcagtccggccagtcctcccaccatcgtcttgaccacgcgcaggcgatagtcgcgcagcgtgccgaagtcgatgccattcaccgaggcgttgacgccgagttcggccgcacggtgcacggtgtcgatggtgtgggtggcggtgatgagcgccttggaggggatgcagccacggttgagacaggtgccgcccacggtggcgtcacgctcgacgagtgccactttcatgccgagttcggcggcgcgcagggctgtggaatagccgccggggccggccccgatgatgaccagatcaaactgttcgctcatgattgcctccttggtgcatataagtatggctcccatgctagggagccatatgcggctatcgccgccacttcgcctaaaaacagtccactggactgttttctttacggctcagcccctcaacgaggggagccagagtatatatggacatcagtctgccggccagtgaccgcgcttcgggtaacgcggcttgggaagcctccaacgacgcatctgaatcgaacggctccaagcgtaggagaaggagcgggagcccttggacacggactgttcgccgtacttggcgatgagcttggccttgagattgcgccacatcagccatacgtcgatgatcacggcaatcaggtaaccgtacataagcgccatcatgatgatggaagcccactggttctgcatcaaagaagtgacgaacatggagacgatcagaatcgcgaaggccaccgggatgaaccattcgccaaggttgaaacgggcatccacataatcacggatgtagatacgccaaggcaggcgttccgacttgggcatgtggttgatgtcgcccttctgcatcgcctcgtactcggcgttctccctctcgcgcagacgggctttggcggccttggcgctggccttgcggtccaccggaaccagcggacggataccggcggcctgagcctgcttcatcttcggggtaggacggccttttttctcagaaggatcggcggccttcttcggggcctgctcaacgggaacttgggcctcttcttttttcctaaacggattccatgtcatgctttgaggttacggtgacgttcagacacttgtacactggcgcagtcattgcaatgacgccgctcacgcacatatatacgcacatatataaaggaggaccatcatggcaacgctcaccgctgacgagattcgttcgcgcgtcgaaaccgattggaaccgcatcgtcaaggtgctggccgaaaaggttgcgctgcagtcgatctccgccaagggcatcaccgccgaacatatgaagcgctccgctgaattcgtggcagacgaactgcgcctcgtgggtgtggatgccaaggtggtccaggcttccaatgccgacggcactccgggcgcatgggaggtcatcggctcgcatatcgtttctccggacgcccccaccgtgctgctctacgcccatcacgatgtgcagcctgttccggacccggccgagtggaacaccgacccgttcgtggccaccgaaatcgacggccgtctttacggccgtggctccgccgatgacggcggcggcatcgccatccactccggtgcgctgaaggctttgggcgacgacctcaacgtcaatatcaaagtgttcatcgaaggcgaagaggagatgggctcgccaagcttcattcccttcatcgaggctcaccgcgacgaattcgccgccgacgtgattatcgtggccgattccggcaactggtcggcggacattccttctttgaccacctcgctgcgcggcaacacctgcgtggacgtgaccgtgcagggccttgagcacccggtgcactccggtcagtacggcggcccgattcttgactccaacacgttggccgccatgctcatcgcttccatgtacgacgagaacggcgatctggccgtgcccggcgtggccgcggaagagccaatcggcggtttgcaacgcgaccttgacgaaaccaccgtgcgcgaggattccggcgtggtggccggttacgagttcgccggcaccggttcgctggcctcacgcctgtggaccaagccgtccgtgaccgtgatcggcttcgacgcccatccggtcgagggatccttcaacgtgatcgccccggagacccgcttccgtctgtcgctgcgcaccgcgcccacccagcgccctgaagaagcgcaggaagcactggctgcattcctcgaatcccacgcgccgttcggtgccaaggtcactgtcgaacgcggcgaaaacggcatgggctgggccatggacccgacagccgtggccaccaaagacgcgctggaagccatgaccgaggccttcggcgttgagcccatcaacaagggcgagggcggctccattccgttcatccccgaactgcagcgcattttccccaacgctcaggtgctggtcaccggccccgaagacccgaaggccaacgcccacagccccaatgagtccatctccctgcccggcctcaagaacaacgtgatcaccgaggctttgctgctggacaagctcggcaagtaaccgaaccgcatcggtaatggtggcgagctgccgtcaggtaggtcacggatgtggctattgcctttgacggcggcttgctttatagtcggggagttgacacgggagctgccgttaggcggctgagaggagattcatagtctcgaccgatggaacgtgaccggataatgccggcgcacggaaatgtcgctcttacccacccgtgcctgaaccaacccgcgcgtggccacgaacatgtgcatcatgtgcgtacatatatccatgtatgttcggcctgcgtacgagcagaagaaaggcacattcatgactgaagctgtggccaaagccaattacaagtggcgcgtcgtcgatatcgtcgtcgccgcaatcatcgccgtcgcatccggcgtcattttctggggctgggacattgtctgctccgccccgctggccctgttcgagggcgtgacccccggtttcgagggtctgctcaacggattctggctgttcgccggcccgctcgccgcaatcatcgtgcgcaagcccggtgccgcactgttcgccgaaacccttgccgccttcctcgagcttacgctgggcaaccagtggggtgtcggcggctcgctgatcgtcggcatcatc

SEQ ID NO: 573 - DNA, 24137 bp, Unknown
  R48_24m  MAG No. k141_88278
cagcctgttcctcgtcaaaaccgtgtactccgcgctgatgtcgctcggcgtggtgctgacccagattccgtacccatacttgccgcgccacatcacgtacattggcgcccttaccattggtatgcccgcgtttattctggcgctcgcgcccaatacccgccgctatattccgggattcttgaagcgtgtggtcaccttcgcgttgccgggcggcatcgccaccgcgctgtccgtgctgctgacggcatggttcctgcccggcatcatgggctgggacgtgactaaaaacgtcgatctatccgcgctgcgtgccaccagcgcgatcatcctgttcctgatgggcgtattcgtgctcgcccgcgtggctcagcccctcaacagttggcgaggcatactggtcgcggcgtttgccgcagccggagtgattggtgcgttcattccgttcaacgcgaacttcttcgcgttgattctgccgaccggcactacgttggtggccacgctgatcgccttgggtggttcggccctgattttcgtgatctgcctatggctggcgccgcttgtcggcaaagtatccggcaagctgctgcgccaacacggattcaacatctaatagcggcgaattgtctcacacttcaagccgacacgccagagccaaagtaacgtacccgtaccatttgaagcggataatcagcggcataaacaagccgatacatgatttcggaggaagcatgtccttacgcgacgaccagttggcgaccttgaaggccgccggcaaggacttcgattactacaacatcgccaatctcgacggcatcgatcatctgccgtactcgctgaaggtactggtcgagaatctggtacgcaatattgatggcgccaatatcaccgacgaacatgtcaagaccctgcttgactgggatccgaacgccgagcccagccatgaaatccagttcacgccgtcccgcgtgattatgcaggacttcaccggtgtgccctgcatcgtggatctcgccaccatgcgtgacgcggtcaaggacctcggcggcgacccggaggtcatcaacccccaggttcagtccgacatggtcatcgatcactccgtgcagatcgataagtacggcatcgccaacgcggtccaggaaaacatggacatcgaataccagcgcaacggcgaacgctaccagttcctgcgttggggacagcaggcattcaagaacttccgcgtggtgccgccgggaaccggcatcatccaccaggtcaacatcgaatacctggccaaggtgatcatgagcaagaccgaggccaacggcaacacgcttgcctaccttgactcctgcgtgggcaccgactcgcacaccaccaccgagaacggtctgggtgtgctcggctggggtgtcggcggcatcgaggccgaggccgccatgcttggccagccgatctccatgctcgtaccgcgcgtggtcggcttcaagctcaccggttccatcccggagggcgtcaccgccaccgatgtggtcttgaccatcaccgacatgctccgcaagcacggcgtggtcggcaagttcgtggaattctacggcgagggcatcgcctccgtgccgctggccaaccgtgccaccatcggcaacatgggcccggagttcggttccacctgcggcatcttcccgatcgacaacgtcacgctcgactacctgcgtctgaccggtcgctccgaagagcaggtcgcgctggttgaggcttatgccaaggccaacaagctgtggggcgacgcctccgacccggattacgtggaaccgcagtactccgagtacgaggagcttgacctcggcactgtggtgccgtccatcgccggtccgaagcgcccgcaggatcgcattctgctgtccgaagccaaggagatgttcgagaagaccgctcccgcctacgagaccgagaagaccgtcaaggatccggtggccgtgtccaccgacttccgtggcgatttcgacatcgaaaacggcgacgtggccatcgcctcgatcacctcatgcaccaacacctccaacccgtccgtgatgatcgccgccggcctgatcgcccgcaacgcacatgccaggggccttaagcccaagccctgggtcaagacctcgctggctcccggctcgcaggtcgtggccgactacctcaaggccgcggggctgcaggacgacctcgatgcactcggctaccagctcgtcggcttcggctgcgccacctgcatcggcaactccggcccgctgctgcccgagatttccgaggcgatcaacgccaacgacctgaccgtcaccgccgtgctttccggcaaccgcaacttcgaaggccgcatcagcccggacgtcaagatgaactacctggcctccccgccgctggtcatcgcctacgcgctcgccggcacgatggacttcgacttcgagacccagccgctcggcaccgacgcggacggcaacgacgtgtacttgaaggacatctggcccaccaactccgaggtcgccgccgtggtcgacggcagcgtgagccgcgagatgttcctcaaggactacgcctccgtgttcgacggcgaccaccgctggaagggcctcgacgtgccggaaggcgagctgttcgcgtggaacgacaagtccacctatgtgcgcaagcagaccttcttcgacggcatgaaggccacgccggacccggtcgccgatatccacggcgcccgtgtgctggccctcctgggcgactcggtcaccaccgaccacatctccccggcaggcgcgttcaaggcctccagcccggccggcaagtacctgaccgagcgcggcgtggagccgaagaacttcaactcttacggttctcgccgaggcaaccacgagatcatggtgcgcggcacggtcggcaacatccgtctgcgcaaccagctgctcgcctccgtgggcgaggaggtgacgcctggcggcttcacctacgacttcctcgccaagaagccgaccacgatcttcgaagcctcccgcgactacatcgacaacaaggtgccgctcgtggtgctcgccggcaaggaatacggcaccggctcctcgcgcgactgggccgccaagggcacggtgatgctcggcgtcaaggccgtgatcaccgaaagcttcgagcgcatccaccgctccaacctgatcggcatgggcgtgctgccgctgcagttcccggcaggcgaatcctatgagtccctgggcctcaacggcaccgagacctacgatatcgccggcgtcgagaagctcaacgagggcgtgacccccaagacggtccacgtcaccgccacccacgaggacggctccaagaccgagttcgacgcggtggtccgcatcgacacgcccggtgaggccgactactaccgtaatggcggcatcctccagtacgtgctgcgcaacctcatgaagtaaccaccttcttggctcccctctcttgaggggagctgtcagcgaagctgactgaggggagcaaggccggtatccgccaacggataccggccttttccatgcatgccaaaatgctatactgtatagcatctttggaatggaggttgccatgaccatggtccaaatgaacgttcgcattgatgcgaaactgaagaacgaggtcgaagaagtcctcaagggcaaaggcgtatcggtgagtgacgtaatccggtcgctgtggttatacatcgccgaccgcaaggaagtgccggcattggaaacgaccgccgaagagcaagcccgcgaggaggaaaagcagcgcaagctgaaactgattcgagaaggtgccggatacgtacacaaggaactggtcaaggccggactgatctcagaagacaccgacctcatggaaggccttacctacaagcagttccgcgacaaaatgtacgacgagcaacttgatgcgtattacaacatgaagagggccgattgatgaccgacgtttccatgcagcgtattttgcttgataccaacgtactgttggactatttgctccatcgcgatgatcacgccaagatggcggaagcggttatggaacttggcgcgaagaacaacgttacgttgttgtgcgcgtcattgtcgctgaaggatatcgcatacctatcatcatcggcgattcgtagggaattcaaaccgaatgaatcggaagtggagaatttcactcgcggctttctgtcgtcacgggtgccatggcgttgtatcgagcaggtgaaggaggtgtgtgacatcgtcgctgtcgatgagtcgacatgtgatagggctttttccctgcaaaaacggcatcgggattttgaagatgatctgatcatcgttgccgcgcaacaatccggtgccaactgtgtggtcacatcggatgccgaattaatcagtcattttcccgaatattgcaaaacaccggctgaaatcgtggcggcgctggaataaatgagcgtgtggctcccctcacggaggggagccaccaatgatgtgccggctactgtagcctactgcgcctgtagacggaactgcttccagatgtcgctgagcttctgaccgttgcgcgtgcgcttccacacgtccagaccgccgccgcgacgtcctccggcggcggcacgggccgcggcggtcggagtcggatattcggagccgtcatccagacggagacgaccgttttcggtgaccgtggcgaaccagcgctcgcccttgcgcggccgctcccacaccagacgctcgcccggcaccagcagaccagcgtcaatcacctgccggatcgtgacgcgccgcgaactatgagacggccgtggagaggtcttcgacaactcatcgacattctgcttggtcagatcacgggcgtccttgtcataccggatgccccagtattccacgatgagtcggaccgactcttcctgccgcgcctccagcagggcaggtgtgcagtcagcgaaatccttcaactgattggtcagcgggaaacgacgtgaatccgcgcgcaacagcatgcggtcgcgacgtgccggatattcactcaacctgtccaactgatcctcagggccctgcaccagcgccatattgccgagtcggtacatccagaaatcatgctgatcctgcggccagtccgcaaacgatttcgaccgttcgatatccaacggcataatcggcagcgcactgaaccggcgtggtcgatccaactgcatgccggccttctgctcgttggcgcgaatcagcagcagacggaccaaatcgccgtcaccctgcatctcgccatgcaaacggaccaatgcgccttcacggtcgccgtccgagacatgcaacccgttcacgcgctggaccaaatagcccttgtcaagatcacggatggcggcgttcgcataaccgcgccgctccaacgctccagtgcgattcagcgtgcggatgccggtcacctgttccaatgcggtcagaatttccagcagccgacgctcgtcatgggcgcccaacgattccaacgtggccgtggttctggcgatacgtgaggcacgaaccacgaacggcgacaaatcggcgtcgcccagcccgcgatacgaattgaccaacgcccacatggccacgggcttccactcgtggctgcggtaatcgtccaatccctcaagccggctacgcacctcggcgggcagtacggtatcgctggggcgcgcgatgatccgccacgccatcgcgtagggtgccagcacctggttgatgaacgtgggcaccgtgcctttgtcgatgtacggttgcagcacgtcggccaggaaatcctcgatgagcttgtcggtggccggcttgtgcgtgagtacgagatgcagataggcgaagaattcctcacagtcatgcggatcgtcgccaagcgggtcaatgatgtcatcccaacgggctgcgtacacgtcaagttcggcggtcgacaggctggccgtggcgcgcgccttgaacacgtcggacggggtgagcggcaggccgcgcatgttcatcacgtcgaagatgcgatgcgcgccgtcgagatcgtcggtggtcacgatgacgagcgtcacctcgttgaccagatactgcgcgaattgctggcgttcggatgccgaccaattggagatctcgtcgtacgtcttgcggatgttggcgacgatgttgcgttgcgcagcggtcgccagatcgtcgtcgttcatgtcgaacacggattcgaggttgtcctcctgcacgtgttcgcggaagaacgccgcgtcgcgctcgcgcaacgtgaggcgaggctcggtgacgatgccgcgcagcttgtcgccgggctccaccagcagcgcgtcgagttggcgcatgaggtccgggtctcgctccagatcgcgcagcacggcgatgatgatcgacagggataccagccgctgctgcccgtcgatcacgtcataacggttgtcgccctcgcgtaccagaatcagcgagccgaggaagtacggggtaccgggtgacttgcaggcgtcgtccaagtcgcttaccagttgcaggatgttctcggccttccatatgtaggcccgctggaatgaggggattgtgaaccggaaatccggggtgaacactttcccgagtggtagttccttcgcgctgattgccatgtcaatcccttcgtcgccggcctttggacggtatgccgacgtgccgactgtgctcaagcctaccagtgttcgcccggcggcgggcgcatcacgccggctcgggcaccgacccctcgtacaagtagaacgaagacgggttttctcccggcccggatgcgggcagtgactgctcgcacacctgcgtcaggccgcgatgtacatagaatccgacatcgcacgtggtatccgtgaataggaagtactgacgtatgccagctgcgtggaatgcgctcatcatcgtctcgaacatgcgccggcccagaccgtgaccgcgcgccgccggatcaagtacgaacagcaccacttcagccgaatactcatggccaatgttcgccgcctgcttacgcagttgcctatcgacatgaagagtcccgagaatctcgctcgcagctgccatgccgtcgtgggcaaacgccagttgcaatagcttgcgcaacgaatgacgccggtgcatgttcagcgggctgcgatggtcgagctcgtcgatacgccccacaatcaatgcgacgggtttatcttccagctccgcgacaaaggccgtggtcacacgtgccagacagttctcccaatcggcctcggctgccagcaagccggtccgctcatcatattcggcgtaccaagtgcggcgcaccaggtcgatcagcgccggataatcgtctttacgtaacgttcgaataatcgcttcactcatgttctccattatgactgatatggctcgataaccggacgtgttacagtcgcgccggcaaatcggcccgctccaccagcctcgccatctgtacgcggcccatattgagcttgtccgccgcggaggagagatgcgccttggccgtacgctccgagataaacatacgggaggcgatttcggcgttgggctatgtgctgcaagacgattcgccgattacggtgcatgccacgcgcatggtggaaacgcccgttacgctttgcgatgagcagaacgagccgatcgatcctattcatggaatgttcagctttgttcctctaagattggtactggaacaaacgctaaaggagcgattatgacattcggtcagcagccccagaacaacgggcaatacaacccgcaatacaacacgcctgattacaacgccgcccaacagtctggatatggccagcaatacgcacagtccggttacggccagaactactatgcccagccgcagggcgcccccacctaccagtacgcgccgcaggatgcggccggtgccggcgcgggtgccgccaccatcaacacgacgatgacctacaactacgaggaggcccgccgcgtctccgtagccaaggtgtacggcgagatgaccattggcatcctcgtcaccgccgtggtcgccgtgctcggccagatcaccggagcctactacagcttcctcatggccaccggcatggtgggcctcatcggcctgtgcgtggtgcagattgccctggccgtggtgctcggcatgcgcgtcaccaagatgaagtcggccactgcgcgcgtcatgttctatgtgtacgccgcattgatgggcttcaccttgagctcgatcttcatggtctacgacctcggctcgatcggcgtggcgctcggtgtcaccgccgcgttcttcttcgcgctgaccatgttcggcatgactaccaagttcgacatgctcaaggccggcccgatcctgatgatcggcctgatcgtgctcatcatctcgcagatcgtgctcgccttcgtgcaggtcgacggcatgaccaagatcgtctgcgccatcggcctgatcctgttcgccggcatggccatctacgacgcgcagtccacgcgcgcgctgctgaccgaatacgaggcccagggcccggaaatggtcaagaagatctccatcctgtgtgccctgaacctgtacctcgacttcgtgaacatgttcctgtacatcctgcagctgctcggcaacagggactagcctcgccagccgattgatgggcggcatgtagcctgctcgtcaaacgtcacagcccgaccacattgtggccgggctttttcatgtctgtcacattcgcacgttaggctgtctccccgtgaaaagacaagaactcgtaggcatgctgagcctgttgttgaccgcgctgatctggggttttgcgttcgtggcgcaggtccagggcatggatttgatgtcgccgatgttcttcaacgccacgcgcttcacgctgggagcactgtctttggtgccgattctgctgtggcagcgtggccgggggagcgcagataagggcgatacagccggggtcgatgtcgttgggaccgaggcccccagggccgtctccacagatgccgcatcgaacggtgcatccgacgtcgttaccatcaccggtgccaagctgaatgcgaacaagcccgattcggccgtggcgcgattgctcgccaacccggtggtcatttccgtgatctgcggcatcgtgctgttcaccgccagcaccctgcagcagtatggcattctgtacggcaaatcggccggccgcgcgggattcctgaccgccatgtacatcgtgatggtgccgttgctggccttcgtgttcctgcgccggcgcatcggcatgctggtgttcgtggccgtggtgctgtccatcgccggcttctatctgctgtgcatcaccgatggtttcggttcgatcggcctggcggatatcctgctcgtgttcacggccgtgctgttcgccgtgcatattctggtgatcgatactttgggcggcaccgtggacgccatcaagctttcattcggccagttctgcaccaccgccgtgctgagctgggcgggttcgctgatcgaaggctcggtcgactgggtcggcgctgctcattcctggattccgattctgtacgccggcatcggctcggtgggcatcgcgtacaccttgcaggtggtcggccagcaatgggtgccaccgacgcgagccagcctgctgatgagcctcgaatcgttcttctcggcggtaggcggtgcgttgcttctcggtgaagtgatgaccccgcgcggttacctcggctgcgccctcatcttcctcggcaccctgctggcccaagcgccggccaggctgccgaagtggctgcaacggtgaatgaatcggacgcaggccgattccatagcacctcagtccgtggtcttaggcgcttcacccacttgcggcgcgccgttgatgtcgcggtggatgttctgcatttgcacttcgatgttctgcagcgaacgggcgcagtcgagcagtgtctgtgaatgctcgctgagcttgttgtccggcaaatcggtcttgtagcgcagcgcatgctccagcgacgcccaataatccatggcgatggtacggaactgcacctccaccggcgtgtaatgcgcgcccgaggagagaaacacgggcaccgcgtagattacgtgcaatgaacgatacccgttctgtttcgggttcttgatgtaatccttgacgcgcagcacctgaatatcggactgcgacgacagatagttggacacggaatacacgtcgtcgcggtaattacagatcacgcggatgccggccacatcgaacagattgtccttaatcgaattgacactgattggcagattcttgcgctccagcttgccaatgatcgaactcaccgacttcagacggcgttccatatgatgtatcgggtcatggctgaaccgcacctggaactcgtcgtcgagaatctccagcttggtgctgatctcgtacatcgcgccttcatacacctgcatgaggtcaacgaatttaacgacctgttcgggagtgaaggtgcctcccggaagatccaacgctttgagacgggcctgtagatcggaggttttgagtcggctatgtcggtcaagtatcacgtccaccaatatactcggcggattccagacaatctggatgttcgcggggaatctttccaagaacccatatttaagatcgtgacaaccaatggcatacgtgaccggagcatgacgaaccccgccgatagaatcggtcgttatgaatgaagacatgatgaccgaggcggagcgtgcctcgattgcagccgatggaaccgatagcttgctgggggagcgcggcaagggcgtattccatatccacacgctcggctgccagatgaacgtgcacgattccgagcgcatcgccggcgtgctggaggccaatggctacgtccctgcaaccgaggaccagatcaatgacaatgacctcgatctgctggtgctcaatacctgtgcggtacgcgagaacgcagccgaacgcatgtatggcaccatcggccgattcaatcgcgtcaaactggttcggccgaacctgcagatcgccgttggcggctgcatggcccagcttgaccgcaagaagatcgcggatactgcgccatgggtttccgcggtgttcggtaccaagaacatcgaagatctgcccaagctgttggatcagaatcgtgcgaccggcaaggcgcaggtccaggtcactgaacaattgcggcagttcccgagccagcttcccgccgcccgcgcctcccgcatcagctcgtgggtggcgatttccgtgggctgcaataacacctgcacgttctgtattgtgcccaccacgcgaggcaaggaaaaggaccgccgccccggtgacattcttgatgagattcgccaatgtgtggccgatggtgccaaggaggtcacgcttctcggccagaacgtgaactcgtttggttatggtattggcgatcgatacgctttcagcaagctgttgcgcgcctgcggaaccatcgacggtctcgaacgtgtgcgcttcacttcgccgcacccggccgccttcaccgatgatgtgattgcagccatggccgaaacgccgaatatcatgcatcaactgcacttcccgctgcagtccggttccgaccgcatcctgcgcgcgatgcgccgctcctacaggtccgccaagttcctcgatatcttgggccgcatccgcgaggccatgcccgacgcacagatttccaccgatatcatcgtcggattccccggcgaaaccgaggaggacttccagcagaccatggacgtggtgcgccaggcgcgcttctcctcggcgttcacgttcatctactcgccacgccccggcacaccggccgccgcaatggaacagattccgcgcgacgtggtgcaggaccggttcgaccgactggtggcgttgcaggagcagatcaccgaagagaacctcgccacattcgagggccgcgacgtcgaagtgatgatcaccggcaaactcggcaagaaggacaccgacacccaccgtgtcaccggccgcgagaaaaccggcgtgctggtgcacatcggcgtgcctgaaggcgaaccggtacctgaaatcggcgatttcgtcacggtcaccgtcacacacgccggccgccataatctgcttgccgaccccgatgtggccgctggacagacctattccgtgcggcactgagggggcgtatatgacgcaacgagtcgtctccatcgtcggtcccaccgcgtcaggcaagacggggttgggcatcgccatcgcccggcgtctggccgaagcgggggagcgggccgaaatcgtgaacgcggacgcctaccagatgtaccgtggcatggatatcggcaccgccaaacccaccgccgaagaacaggcggtcgtgccgcatcatctcatcgacatcatcgaccccgaagacacgatgagcgtggcccgattccagcagcttgcgcgcgagaccatcgccgacctgcaatcacgtggcatccggccgattctcgtcggcggctccggcttgtacgccagagcggccatcgatgacatcacctttcccggcaccgatcccgacgtgcgcacacgtcttgaggaacgcgagaaaaccgagggtgccggtgctttgttcgacgagctgcgggccaaagaccccgaggccgccgcgcgcatggacccacgcaacccacgccgcaccatccgcgcgctggaagtcatcgagcttaccggcaaaccgtattcggccagcctgccgcgctaccggtacgtgattccgtccgtacagatcggactcgacctggaccgcccggatttggaccatcgcatcgacctgcgcaccaagcagatgtatgacgatggattcatcgaagaagtcgaacggctgcgcccgcatctgggtgccaccgccgtacgcgcgctcggctatcagcagatcatcgacctgctggacggtatctgggatgtgaacgacgccttcgcggacatcgcacagaaaaccaagcgactcgcccgcaaacagatgggatggttcggccgtgacccgcgcatccactggctgcaggccctgaacccgaaactggtcgacaacgcgatggccattatcgcgcacgccgacgccggcgactacgacccgatcgacgcccgagccgacgaatacacccagcatcatctgggcgatatcacggcgtaggaatcagccaaaggccggtgcaatcacccgcaatcagtgtgcaggcccctgattccagccggcgatcaagaacacgcgcgtcggattcgccgggcgtagtatcgcgtcgaacatcgtctccagtgcagacgtgtcgccccgatatgccgagtgcttggcggcgcgatactcttcgcgcgtcactgagccccagtcgagatcccagccggcgtcatgcgccaagcgtgaaccgaatatacgcagcaccatcgcattgccgccacggaacggatgcagataaccgagctcatcataaatagaagcgaacgcgtgaacgaacacgtcgcgatccaacgcatgcaggttgcgcttgtccgccaactccatcgcgatgttgtgcgcgccggtctcaatgagcccagccgggaagaacgcctccggattcgcggcccgagcccggtcgttcgtcacctcgcgtgtggtgtttgaggtacgcaacttgcccgcatcctcgaacacgccttcgaacagccccttatgaatggcggtcaactcgtccaagtcgccagacggattccaccgacgttccgccaacaatacggtacgtgcgaacaccgcatccgcgcgatccgtggcatgatcatccagactgccggcagccagacgatcctttccggcagggtcggcggcggcgcgcagacgcatggcggtctgctcgtccgccacgtcgatgagatgggtcacgggcttcaagccacgttcgtaggcaaccgcggctcgcatcgttgcctcgcccggcgtcatcgcttccagtgcgcagttcttgagtgcaaatgcgactgcgctcgcacgctctgcgggtgtcatgcaacccatgataaggcatattcgcgctccagcggggaatcgactcggacgaacctcgacgaaccgcggcgaatcggctgtcgggattcgtcaatcgaccatatcgtcacggtgtcgtcaccaaccatgcacccccgtactagtagaatcagacccgatatggcacgaacagcatcctccaacagcaccaaaccccgtaaatccaaagacaacgggtctacccatgatggcgaaaccaaggtccagcccgagcttgacctcgaacctgagccgttgtggaagaagatcctgctcgcgattccgcgcgcgttcggctccggcgtacgcgccgtcaccggcgtcggcgaatacgacccagcctaccgtcgtgacggtttgtgtttcctgctgctcgtgctcgccgtactgttctgcgcgtccgaatggttccgtgtcagcggtccattcggccagctgcttcacgccatcgcggccggtgtgcttggtctgatgagcgtcgtgctgccggtgttgctcgccgccgtggccttccgactcatgcgcaattccggtaaagggtccaataacccgcgtgtggtcaccggttgggtgctgctcatgtggtcgatttgttcgatcatcgacgtggcgatcgccgccgaccacaccggattcgacatcacgattctgcaatccgccggcggcctgttcggcttcttcctcggctcaccgctcgcctggggcctttccaacgtgttcgccatcatcattttcgtggtcgtcggcctgttctccttgctgatgattaccggcacccacgtcaccgatttgccggaggatgcgcgcaaaatcgcagctaaaatccaacgcaaaccgtatgtgccgatgggccaggaggccgacggaagcgccagccagttccccaacgaggtccgtgtgggagataccacactcgcctttgccgacggtgttccctcgcatgacggcaacgacgacggcaacgacaacgatcaggccggcgatgcacggcccagcctgttcgcacgactgttcggccgcaaatccaagaccgaagacgacaaaacccttgacaagtatgctgccgacgatccgttcgaccgtgccgccagccagcatggtgccaccgccgaaaccccggtggtcgatccgatgaccggcgagattaccggtgcgcgaaccattgcatcgtcttcgtacgacggtcgtccgcacctatccagccctgcgcctgctgccgatgcggatgatggcgacgcttcccgaacccgcgtcatcaccagtggccagaccatcgccatgcccggtgggggagcggtagacgatccgtgggcacccagtgccgcccaggccggtactgtcgcgctcgcaggggcagccggggcgatgggagcggccggggccgccggtgccgcggccgcggcagccgcgaccggagcctacgcaggcgccgatgcggatggcagcggagtcggccagggcgtgcccaatacggacggacagccgaatgccgccgccggcaacggtacagacgacgacgccaataggccgtatcagttgcccgacctgaacctgctgaccaaaggtcagccccatgcgatgcgcaccccggccaacgatcgcgtgatccgggcactgacttccaccttcgaacagttcaacgtggacgccaaagtcgtcggcttcctgcgtggcccttcggtcacccaatatgaggtcgagcttggccccggcgtcaaggtggagaaagtcaccaacctgcagcgcaacatcgcctacgcggtggccagttcggatgtgcgcatcctttcaccgattcccggcaagtccgctatcggcatcgaaatcccgaacgaggatcgcgaaatcgtgcacttgggcgacgtattgcgctccgacaaggccgtgggcgacccgaacccgatgctctccggcatcggcaaggacgtcgaaggccacttcgtgaccgctgacctgaccaagatgccgcacctgctggtggcaggtgccaccggttccggtaagtcgagttttatcaactcgatgctcacttcgatcatcatgcgtgccacgcccgaacaggtgcgtctgatcatggtggatcccaagcgcgtggaactgtccgcctacgcaggcatcccgcacctgctgaccccgatcatcaccgatccgaagaaggccgcacaggccctcgaatgggtggtcaaggagatggatgcacgctactccgacctcgaattcttcggattccgccacgtcaaggacttcaacgaggccgtgcgcgccggcaaggtacatgcgcccgccggctcccagcgcaaggtggccccctatccgtacatcctcgtggtggtcgacgagatggccgaccttatgatggtggccaagaacgatgtggaaagctccatccagcgcatcacccagctggcacgagccgccggtgtgcatctggtgctcgccacccagcgtccgtccgtggacgtggtcaccggtctgatcaaggccaacattccatcccgactggcgttcgccacctcgtccgccaccgattcgcgagtcattctcgacacggtcggtgccgagaccctgattggccagggcgatgcgttgttcctgccgatgggttccgccaagccgattcgtgtgcagggctcgtgggtgtccgaatccgagattcgcaaggccgtggagttcgtgcgcacccagcgcaagccgaagtaccgcgaagacatcgaacagatggccaaggaagccgaaaagaaagacagcatggagcccgacgaggagatcggcgacgacatggacgtgctgctgcaggccgccgaactcgtggtcaccagccaattcggctccacctccatgctgcagcgcaagctcagggtcggcttcgccaaggccggccgactcatggacttgctcgaatcgcgcggcgtggtcgggccgtccgaaggctcgaaggcccgcgaggtgcttgttcagccgcaggacctgccgcaggtgctcgccttcatccgaggcgaaaccagctcgctcgaagccagcgccccgcaacaacccgaactcggcgaataattcacccatcgacctccctctgatgagggaggtgcccgaaggggcggagggagagaagcgcggacagcatcagcacgaaacctgattcccgaataatagcagtcaatatccagccaccactcactcaaggtaggagtatgggggtaacgtgaacactatggatgagaacacaatggacaagcagtcatcgcccaaatcatcgctgttagacggatggaacgcgccgccgaacctggtcacctactcgcgcatcgtactcgtggtgattttcctgacactcgacattctcgccggttcctggggtgaggacaacctgatcatgcgttgggtcgccgcggtactgttcatcatcgccgcgtccaccgataaaatcgacggttggatggcccgcaaatacaatcaggtcaccgaaatgggcaagctcatggatccgatcgcggacaagctgctcacttgcggcgcaatgattgtatgctccgcgttcggcgagctcggctggtgggtaaccatcctgttcctgattcgcgaaatcggcatcaccgttatgcgcttcttcgtcatggagcgtccgggcggcaaggtcatcgccgccgcatggcccggcaagctcaagaccgtattccagtgcgtgggtctgtccatgctgctgctgccgttctggtcattgggtaacggacaggccacgccgttctggatgaccgcttactacttcctgacctacgccatcatctacgtggcattggtcctgtgcctctactcgggtgccgtgtacctgtacaacacgttcgtcgccccgaagcggaagtgacggatattccaatgcaggaattgtgcgacagtctcgcggccggcatcctcaagatctgcgaggcgaacaatacgaaaatctcctgcgctgaatccctgaccggtggcctgctcgccgatgcgttcgtgcgtattcccggtgcctccaacgtgttgctgggctccgctgtcacctacgacatcaatgccaaggcttcgatcctacacgtggacaaggccctattggatcgagaaggcgccgtacaccccgaagtcgcccggcagatggccatcggtgccgctcgcctatacagccagccggaatacggcgaccgaatcatcggcctttccaccaccggcgtggccggccccggtccggacggtgataagccggccggactggtgtatgtgggcctgcgcatccccgcaagcctcaccgcggaccatgtcgaagtgctcaaagccgtcgaactccatcttgatggcatgcgcgaagaggttcgtcgcctcaccgtattccacgttctgcaaaacttgagtctattcacagcaagttttaaggaataaaaccgcgggaccgtcgtgttgtacatagtggaaacactgaaccgaccttggaaggggcgatggcgatggaaacgatgacccgagtgaacgaacagatggatgtggccgccaagaagccgatggctgtgcagccgggtgtcgcccgtatgcgtgaactgactccggcccagcgccgtgcggtgatgttcgcccagcagcaggtgctcaaggcgcaggctgccaagaaggccaaggatcagcgtcaagccgttcgtgaacgtatgtgggatgaggattcgccgtcgtacaagccgactgccgccgccgagcccgtggtggttgaggaggagcctcgcgaggtttcgctgcgtggtgctatcggctacgtgctgcgcgaactgcgtacgcgcgatcgccgcacgttgcgtgaggtctccgagaaggcgggcgtttcgctgggctatctttccgaagtcgaacgtgggcagaaggaagccagctccgaactgctgagctccatcgccgatgcgctcggagtctccacttcgcgcatgctgcgcatggtggccgattatctcgacacagtcgagggctgatcggttggcggtgtgaagccgcatcccgtaatctatgtctagctgtgaacccgtatcgcttgtggcgatgcgggtttttgctgtcctgcgggtggtggcacactggcgtgtatgcgtgaacgggaattctgggaattacttgaagaggtgttcggtcggacctacggtcgttcgctgtcgcgtgatcaacggatgtccaaattggcgaatatgaccgtggtcgaggcgctggacgcgggggaggagccacgcgtggtctggaatgtgctctgtgaccaaatggaggttccggactccaagcgttggggccacgatcataacgcaccgcccatgcccgccgtctgacactgcgggattacggagtcgctgaatcgtgaaattggcgatttcggcgtgttgcacgccaaattcgaacaaatgttcgtgtgtgtggttatagttattcacagtgacaagaagccgcatacgtgtgcacagggtgcttgtcatccgccataagccttaccgcagtaggtcttagggaggtcagatggccgagctcgggcaagctggaaccacaatggttggtttggattgcctcacatggcatgtccgtcatacggtggaggcatccgattcgcgcacgacttcgacaaggagaagatcatggcacttgagaccaagccggccaaggacccggcagccgaggacaagcacgagctcgatcccaagcgcaaggcggcgctggacaccgcgctggcgcaggttgagaagagctttggcaaaggttccgcaatgcgactgggcgaccagcccgagcagaacgtcgaggtgattcccaccggttcgttggccctcgatatggcgctcggcatcggcggcctgcccaagggccgcatcgtggagatctacggccccgaatcatccggtaagaccacgctcgcattgcatgtggtggccaatgcccagaagaagggcggcgtggcggcctacatcgatgccgaacacgcactcgacccggcctacgcccgcaagctcggcgtggacaccgactcactcatcgtctcccagccggataacggcgagcaggccctcgaaatcgccgacatgctgattcgctccggtgcacttgacgtcatcgtcatcgactcggtcgccgccctagtgccgaaggccgaaatcgaaggcgaaatgggagacagccatgttggtttgcaggcccgactcatgagtcaggcgctgcgcaagatgaccggcgcgttggctcaggccggcaccaccgccatcttcatcaaccagctgcgtgaaaagatcggcgtgttcttcggcaatcccgaaaccaccaccggcggcaaggccctgaagttctatgcctccgtgcgtctcgacattcgtcgtattcaaaccctgaagaatggcgacgaagcggtgggcaaccgcacgcgcgtcaaggtggtcaagaacaagatggccccgcctttcaagtccgccgaattcgacatgctctacggtgaaggcatttcccgtgagggctcggtaatcgacatggctcagcaggttggcgtggtcaagaagtccggttcgtggttcacctatgagggtgatcagctcggtcagggacgcgagaaggttcgtcagttccttaaggacaacccggccatcaccgaggagattgagaataaggtcaaggccgagttcggtctgatcggttccgccgaccagttcgcggaagatggcgaagccgcagcagcggccgctgtcagcgaggccgccgctgccgacgtggccaaggacagcaaggccgcagcggcgcctgctgccaaaacgacccgtgccaaggccggcgcagctaaggcctgaacatgattagtgccgaagcattcttgcggcgcaatcctgttgcgtcgcaagacatgcccattgccgagcagcgtgttcagtcgaaaccgccgggacgtttttctcgacgggggagagacgctgccgttgtcgaagatcccaatgatttggacgcttgccgcgaggctgcattgcgtttgctggacgcggccccacgtgcatccggcgcgttgcgcgaacgattgctcagcaaaggctatggcgaggcgattgtggacgaggtcatcgaacggctgattcgcgtgcaactgattgacgaccgcgcttatgccgaatcggccgtacgctattgtgccggtcgcatgatgggtcgtcgtggtgcggtcctggaacttgctcgcaaaggcgtggaccgcaaactggctgaacaggtgtgtggcgaagctgagcaaaatggcatctttgaagatgccgcatgggaattgggccgccaaatagcccgcaaaacccatggcctcgatcgtcaggtccgtcagcgtcggttttggtccgcaggcggccgcaaaggacacagccccgaaaccctccgccgagtcgccgccgaattgttggtgtagccaagaaaaaaatgagacctcttataccccgggttctgtcgtgccgtgcgcgaacgcacggcacggatggccatccatctcgacctgacgttgccgccaggctctagcagcctacccgatgacacgggcgagcagcccttaccgccatctgcttggccttgctcccgatgaggcttgccatgcgacctactgttaccagaggcccggtggtctcttacaccgccgtttcacccttacccgtcgaggacgggcggtctgttctctgttgcgctatctctcaggtcaccctgggcggacgttatccgccatcgtgctctatggagcccggaagttcctcagccgatcccaatgaagatcacggccgcggccatcaagaggtctcaagcctgcaattatacataaggtgcggaaaaggcggcatcccgccctgcggtgaggccatgacgttgcccagttatcctgttttctccatagttgggcatagttgggcgattcgtgaacgacgcgccgaatatcggatggggcgtgtcgggcgtgttgtggcgtgtcgtatggagacgaatcaaatctgtaagagcttggtatgtgcgagaaagagcaagaaaacgctgcctatccattgcagtatttaccatgacgaacaaacgagccagcctgataaaccggtatcaaatcttcttataggagactgctgccaaaaccccagtatatacatcgtttcattgcagagaaaagcccgggaataaacatatattctctgggcgagtttccggccgttcacccattgttcgtctacaatgaaacatacccggtcggtgatgatgccgttcggaacacatatagcgggttacaccgcttgagttagaggaggtcaacatggaaatcgtcgttaccggacgccacacgcaggtcaagcaaaggttccgtgatgtggtcgagaccaagatgaatcgtgtgaccgctatcgccccagatgctcagcgcgcgcagatcgtgctgacccatgagggcaacccgcgtcaggccgataccgccaagcgcgtggaaatcaccgttatcgccggacgtaccgtggtgcgtgcggaggcttccagcaccgatgaattcagtgcgctggacatggcgctggataagttgacgctgcgtctgcgtcgtactcgtgaccgtcgcaaggatcaccgtcgtggttacgcaaacccggtcccggtggatctgggtgttatcgccccggagcccgagccggaggtgtcggaggaagagccgaacaacagcccgcaggctgcggtcgcctccgatcttggccctggcgaatccgtggaggtccaggttggggatacgccgattgtcatccgtcgcaagctgcacatcgccgagcctatgagcatcgacgaggcgctgtacgagatggaactgatcggacacgatttcttcctgttcgtgaacaaggagaccggacgcccgtccgtcgtctatcaccgtcacggttggagctacggcgtgttcgaaatcgacactccggagaatgtcaagaaagcctgagggtaagggctgctgacacgatcagctgataccgcatggaccgcttccaatatggaagcggtccattttttcataaaaaggtcgaaaaattcgattgctgacggtgcgaggcgctattctggtacgcggacaccaccacttatcagtcaagggagaacccagtggtcgatattgttgacaaagccctgcgaatgggtgaaggccaccagctcaagaagctggagaacgtggctaaggccgtgaacgccctggaggacgagatttccgccctctccgacgaggacctgaaggcccaaaccccgaagttcaagcaggaaatcgaaaacggcaagagtctggacgagatcatgcccgaggcgttcgccaccgtgcgcgaggtctccaagcgcaccctcggccagcgtcacttcgacgtgcagctcatgggcggtgccgccctgcactggggcaacatcgccgaaatgaagaccggtgaaggcaagaccctggtcgccaccctgcctacctacctgaacgctctcgaaggcaagggcgtgcacgtggtcaccgtcaacgactacctcgccagctaccagagcgagctgatgggccgtatctaccgcttcctcggcatgaacgtcggctgcatcatcaccgagcagaagccgccggagcgccgcaagcagtacaacgccgacatcacctacggcaccaacaacgagttcggcttcgactacctgcgtgacaacatggcctgggagaaggccgacctcgtgcaacgcggccaccactacgccatcgtcgatgaggtcgactccatcctcatcgatgaggcccgtaccccgcttatcatctccggcccggccgaaggcgacgtgacccgctggtaccgtcagttcgccaagctcgtcctgaagctcacccgcgacgaggactacgacgtcgacgagaagaagaaggtcgtcggtatcctggatccgggcatcaccaaggtcgaggacttcctcggcatcgacaacctgtacgagccggccaacaccgccctgatcggctacctcaacaacgccatcaaggccaaggagctgttcctcaaggacaaggactacgtcgtcactcagggcgaggtgctcatcgtcgacgagcacaccggccgtatcctgccggtccgccgctacaacgagggcctgcaccaggccatcgaggccaaggaaggtgtggaggtcaaggccgagaaccagaccttcgccaccatcacc

SEQ ID NO: 574 - DNA, 5308 bp, Unknown
  R48_24m  MAG No. k141_88377
gaactgctcgagcacgagggcgtggatatgacgcgattcgacctgccgaatatccggctggcataaatcagcattcaacgcccaccggcaaccggcaaccgacgatcagcactcggcacaggactccgccccaactacccaacaatttcccgagtcatgccgagaaacccatgtggaattgttcaccatcagtgcgccatcggcggattgcaccatcggcaaccatacaatccctacaatggaaggcacacggcagcaggcaaaccgcggccgtgcatgaacttggggccgcagggccataagcaaaatcaggaggcgtgtatgaccggcatcatcgactatgcacgcaccgagttgcgcccattctccgaattgccgttcaatgaaatcgacgctctgattatcgccacactcatctatgaagacgtggccaacatctgccccacgctgatgcttgacgagcagcagcaatccggctccttcgccactcgcatccgcgcatttgagcccgaacatccgttgatatggctcaaagggctctggcatccggcaatggaatcaatcagcctcgaagaggccaaccaagaattgcatcgttcaatcgatacatcggaagacgacaaaccccacgaagcccaaatggtctcggtgatcgacccacatctcacccataccctgttcgaggaggccggcaataatccacgctttgccggcatacggctgggagccgtcgtagagcatgtcaaccgcggcgagcaaacccaattcgccgccgcaacgttccaactgcccgacggccgcaaccgtcgcaatcctacgcataaaggcaccatggtcctctccttccgcggaaccgatgattcgctaatcggctggaaagaggatttcaacatggctttccagtacccagtaccggcccaacgcgcggccagcgcgtatctggatacggtggcccgcctatgggatggtccgatcgttctggtaggccactccaaaggcggcaatctggcgatttatgcggcgatgaacgccgacgccaaagtccaaaaccgcattcggcatatctattcgctggacggccctggcttcccctcggaaatcgtgaccagccccgcctaccgcaggatccagccaaaggtgacgaaaatcgtgccgagctcatcgattgtgggcatgattttcgagactcctgaaccatgccgtgtggtgtcttccgattcggacggcattatgcagcattccgcattcacctggctggtggacggcgatcagttcgtcaccgagcccgatctcagctccagctcccaactgttcaacgaagagttgaatcattgggttggcgcgcttacgccggaacagcgcgagcgtgcagtggacgccctgttcaccgtgctgcactccaatggcgccacgacgtttagcgaagtgatgggcaatttccccgcttcaatcccctccatgcttggcgcgttcgtgggacttacccccgaggatcggcggcatttagccgaagcagtgcccattctgatcaaggccgccaccgccaaacacaagacagattccgccaacgccaaggcagcggcagacgccgacgaaccaaacggcacacccgctaccgagcagaagaacgaacccaacgataaacccacaaatgtctagagatactagttatagtgtccaataacttattagacagcgtgactattagcgcaatgcgtcaggaggaagagatgccgcgtccacgtcatgattccgaggtgctgccagccaaagagcgcctcgaaaacgctttctgggaactactcgccgaccgcgactaccgcaaaatcaccgttaccgatgtggtaagcgaggccggagtcaaccgcaattcgttctattaccacttctccggactgccggaactggccgattccgccattctgcatcaggtcgaatccatcccgatcaaccgcacccccgacccgaacggcaaccccgaggagcagtggcgcgaacgtatcaccgccacgctcgccaacccggaacagcgccagcgcctcgaccgattggctctgctggccggcccgcacagcacgctggaactgactgaatccctgcgcgatttctgccgactgcagatgatcagcatgctgcaacgagaccccgaacatcttgacctcacaaccgatctcatgatcgaattcaccgtaggcggcatgcttgcagtgcttcagcgctggcccaagctgagcggcaccatcgagatcaaggatctgctcaaggaagacgtggccgtgctggccatgggcatctatctggccatgagccgcgaagacatgctcgattactggaaccgcatctttgcacacggtccacagaacagcaacaatactgctgccggccatcacaactagggtgtgtttgcactagttgggtttttggccgtgttctccatggaaaccagggacaaggcactggagaaggcggaatccgccgccaaggacatggaatcgaggaaactcaaggaggccgccagatgcctcagggagggcatcggcgagacgacgacccacctgctcgacgactacccgcgcgagcatcgccgccgcatccgcaccaacaacatgatcgaacggctgaacagggagatcatacggcgcacgcgcgtcgtgggcagcttccccgatggcaacagcgcgctcaggcccatatgcgcgagagtccgctacgcgacctccagcgaatggtcgacgcgacgctaccgcgacacgtcagggctcggtgagaacgtaccagcagcgaactgatcaccgccacagggacgagcgaaaaccaaagtgcgcaaaaactcgggcaccaccaacagtggctgcgccgctcaaacagtaacggaaccctgatatcacagcatccgccggccgacagcggcagacgacacccaccacacgattttgagtacactatagaatcattactccagaatgcataatttcaagtatactgaaaatcaacgtcgatttaacgactgttttgcaatacactaaaaattggaggcgtggagatgacggggtatatcgcacgagacaagctcaccgacacgctgcgcagccaccggaacaccccggaaatcaaggtgcttaccggcgtccgacggtgcggaaaaagcacgctgctggaacattatgcgcaatcactgctcgacgacggcgttcccgcgagcaatatcttcacccgtcgcttcgattccttcgacacgcccatcggatattcggcgaccgacctgcacgccgacctgatgcaagccacacaagaagcccaacccggccacttctacgttttccttgatgaaatacaggacgttcccggatgggaggaagtggttcgccggctgcattcccgtgacgacaccgacgtgtatatcaccggatcgaacgcacgactgctatccggcgaactggcgactcatctgacgggtcgctacatcaccatccccgtatatccgctctccttcgacgaataccaacgccatcatcgggctcagggaaccacggattccacggaccagctgttctccgaatacatgatgttcggcggcatgcccggcctgttcgtcaccggccagccggatcaggacaaggcgaccgagatactcacctcaatctacgaatccattgtgatgaaggacgtggcgggaaggtacggcatccgcgacatcgccacattggaaaaactcagccgatatctgttctcaacgtcgggaaacctgttctccgtcaacaaggtcgccaacacgctcacaagcgccggcgcgaacgcctcctacgccaccgtcgacaaccagatcagcgcgctcgaacgctcgttcatcgtctacagcgcgcaacaggaacgcatgcgaggcaaggaactgctgcgcccgcaacgcaagttctaccccgtcgacaacggttttcgcaatctcgccacgggtttcaacggctcggatcgcggagcccagctcgaaggcatcgtcttcatggaactgcagcgacgcggttacgatgtcaccatcggatcgctgcccgacggcgagatcgatttcatcgcgaagcgcggaaacgacaagcagtacattcaggtcacgttgaacatgaccgaggagcagacccgggagcgggaattagccccgctgcggcgattgggcgacgcattcccccgcacggtgctcaccctcgactggcatagcgagggcatgaccgacgaaggcatccatatcaccaacgtcatggattggctctgctcgtaggaacgcgccggatacgacgtcacgccgaaggggtgctcacagaacggcggataggtttcgcacaatggcggaattccaatagttgcttttcggcaacagcggttctgcgagcaccccttcggcgtgtcgacgtggtttcaaccgctctcgaagatgaatacagccatcgttcggtttatggaatcatgatttagtaaattacgcttccataaatggggaacagtgggacaaggggctgcggacgttttcttggagaccgaacggaaagattttcgtatgtccggtcttgaggaacgagagcgtgcggtggggttgtatttcaccacgccgatgacgacggcccaggtggtggagcatctgggttatccgaccaggcagtgtctggaacgttggccggcgatggattcccggtatgccggccatatggccaaacccatcatcccactggagaccaggcgaagggcagtcgaaccggtgccgggtagcgtgcagaagcaggccgccaaacagctcggcgcgggcgtcggcgcggtgcatggctgggtcagggcgtaccgcaagggcggcatggccgcgttgcagcccaaaaacaggaactccgcgcagggcaataagcccgctgactcccgccgccggccgtccgcagccgatgatgatgacgcggaggcgtcgcgccgcagggtcgaggaaccggagctggagaacgcgttgatgcgggaggtggtggaggtcgcagaaaaagaccccggcgccgacctgcggcgcctgtcgaacagggagaagaccctgttgatcgaccggttgaggccggcgtattcgcccggctcgatggcatgcttgcccggcatcgcgccgagcggccacctactgccaccacgcccggctcggcgttgacaagtacgccggctcccgccaatctcgtcgaccgggacttcacggccgagcgtccgaacgagaaacggcccgcggacatcacccgggatcaaggccagggacgggaagggcgtgcctctcgccgccggtcgactgcttcgatggcaa

SEQ ID NO: 575 - DNA, 21067 bp, Unknown
  R48_24m  MAG No. k141_89276
ccccccccccccggcggcccatgccacgggatgccaccgcaccggcattccggctgcggcaccgggcatgcagcgtcacggccgcatgccgcgaggcatcacagcttcgcggcgaaccagcgcgtgatcgtcgtcggatgcgtgatcgcggtgcccaccacggcggcccacgcgccgcattccatcacgcggtgcagctggtcgggcgtgtggatgcgcccctcgcacagcaccggcatgtccgggaacgccttgaccatccgctcgagcagttcgaagtccgggccgtcggtcttgagacgctcaccggtgtagccggacagcgtggtggagatgatgtcggtgccggcctcgaccgcacgctcggcgtcggcgaaactgccgcagtcggccatcgtgatcacgccctcgtcgtgcagtgcgtgcacggtgtcggcgtagctcagaccgtccgggcgaggcctgccggtggcgtcgatcgccacgatgtcggcgcccgcggccgcgcagcaacgggcgtggcgcagcgtcggggtgatatagacgccctcgtcgccctccttccagatgccgatcaccggcaccttcacctgccccttgatggcagcgatgtcggcaagtccctgacagcggatgcccaccgcgccaccctccaccgcggccatggccatttgggccatcgtctcggggtggcgcagcggctcgcccggatacgcctggcagctgacgacaagcccgcccctgatcttttcgattacctgatgcatgatgcgcttcctttcctcatgccttgacattgcttcatatgggtgttgacgattgcgcgacgaattgccggagagcgccggctcggggtcctcccgaggggagtcccagcccggcggcggatcacgggcggccctgcgcgacatgcctgcgcacggccaccgcggcgccgatcagcggagcggcgccgcccagttcgccctccaccagcggcgcggacctgaccagctgcaatgcggaatcctcgaatcccgcgcgcagggcgttccaccacagggggccggccttgaccaccgacccggaaacgacgatgacgtccgggtcgatgagattgcccatgccgccgatgcactcgcccagcgcacgggcgctgtcctcgatcacgccgacggccaggggctccccagcggccgcgcgcgccgcaacctgggagccgtccgccaccggttcgccctcttcggcatcgcaacgggcgttgtagaggtctttcaacccggttcccgacgcgaccggctcgatgtgcccctcgagggtgccgcacgagcataggaatccgcggcccagcgcgctcggcacgtgccccgcgtggccggccacgccgtgcgcgccggtgaacagggcgccatccaccacgatcgcgccgccgatgccggtgcccacgccgatcgagagcaccacgcccctgccgcgtccggcgccgtacgtcgcctcgcccagaccgtgcgcgcccacgtcgccgatcatgtgcaccggcaggtcggtcacggccgcgaacgcgtcgtagatgcgctggccgcgccagccgggcaggatgtccgtggcggagacgatctcgccggtttcactgtccggcacgcccgccgccgcgaggccgacgccggcgatcgccacgccctcggcctcggcgcgctcaagctggcggacggcgaaggcgacgatgcggttcttcaggtcctcgccgccgcgcgcggcctcggtcgggatttcgcagcgggccgtcacctcgggcctgccgtccgcgcccgcgtttgcgtttgcgcttgcgggcaacgtcacgaatcccgaggcgaccttggtaccgccgatgtcgaaggcgaggtaggtgggcgccgcccccgcgctcatgcgacgaccgcctcgtggatgcgcgcgagatagtcgaggcgctcctcgaccgtcgcggccttgggcacgcacaccttggcgcccagatagtcgagcgggcgctcctgcgtcccggcggcgcgcacggcggccttgatggcggcggcgtccatgagcgaggtcggctcgtccgggttcatgggcaggtggccgtcgatccagccgtagccgtactgggtctcctccgggccggcgccggagaacatgaggccgctcagtacgccggccttcgcggcggcctccacgtgcgccacggcggtttcgggtgtgcgcccctccaccaccgagcgtccccagttgacggtgagcccgatgccggccgacccgcacagcgcgatctcgtcctcaatcggcaggaagcccttttccggcttctgcccctcgacgtacttgtcgcagtgctcgatgaccagcttggcgccggaccagtccagctgcgcgagggcctgcaacgaggcggtcatcgcgtcgcggctggcaatgcgcgtgggcgccgtgtggatttcgacgaacttgacgtcctggctgccccgccactgtgcaaagtcggcgagcgcgtcgcgcagctgcttgaagaacgccagagcgaaccggcgtccgtcctcgtccgggctggccagtccgaagttcgggtccttccatacgtgctgcatggtgcccggaatggcagtgaccgtattgttcttccaatgcctgggcagttggccggcaagccagatgcggtcggcggtttcggcaaggtcccccgggaaggggatctcggtgccgtcgatccagggctgaccgcccagcagatcgtaataggcttcctgggcttcgcgcccctgcggcaatgacgcgtacgcgccgacgacgaatgatggcatcgctttcctccttgaaatgcccgatgcgggttcgctgagcattcctatcgtactatcatcagacatctgatatctaatctgttaaaggcagattacttcggcgtgtcttctctcggcctgccgaccttagcatcatgcattcgcttactatgcttgcccccccctggaggggaaccagaaattatcaacaaatagtgacatgggatgctaaccgcggccagccggtgaaatggcatgcgcttatacggtttcaccggctggcgcccgctacggcggagttttcgtatggccctgtacgatttcaccggctgacgggcacccagccggagtttccgtatacggtcatacgatttcaccgtcttagccgcagccagccggtgaaatcgtatgtggactccgtgcggcaacaagtcagcgggcaagcggcacggccccgacaagccgcgcaatccgctcactaacggaacagcgagacgcccctgcgggccatgcagaatgcgttgccaagccacgtgtgcttggaattcggccacaccgcaccgagcctcggggcgttctggctcagccagatgctgggcacgcggccgtcggcgctgcgcgagcccagcaggttgaacccgtttttctcctgaagccagcccggatgctgcgtggcgatggccagtccctcctcgagcgtgagcggaatgcgctcgtcggagtcaatgagcttgcgggccacgtcgggctcgcggtttgtgtgtacttggtaccggtgcgcggttccacgacgatgtagaacggtccctcgggcggctcgaagccgtcctgcggcaaaaagctcgcgatgtcgcgcggcggcatcgtggcgaaaccggccatgcggttgatcgacgtacgggaaatcagcgattcgggcgacaccagctcgcgcgtgggcgccagcaggatgcgctcgtcaaaatcggtatgctccagcgcctcgatcagcggacgggccagggagcggaacgccgcggcgctcacatccgccacgtccgggtaccccaatgccacgatgcggtccaactgacgctgcgcttctaccgacgccttcgacatgactcccagtgcagagcatcgcggcggggcggcgccgtgacgttccagccggttccggcgtcccgtcgcaccggcgatccggcccagcatacgggcacccggttcttcttgttccgcccgattcgtaagattgatggatacgtgtggccatttcgctacggctgcccgaacgtgaaatcaatccgtcaaacccagaaggttgttatgtccgaaaagttgaaagtcggcattctcggcgccaccggtatggtcggtcagcgttttatcacgctgcttgagaatcacccgtggttcgaggtggtcacccttgccgcttccgcgcacagcgccggcaagacgtatgccgaggcggtcggagaccgttggaagatggaaaccccgatgcccgaatacgtcaagaacatggtggtcgtcgatggcgacgatgccgagtccgtggcctctggcgttgatttcatgttctctgcggtaaacatgccgaaggaccagattcgcgccattgaagagcgttatgccaagaccgagaccccggtggtctccaacaacagcgctcaccgttggaccccggacgtgccgatggtggtgccggagatcaacccggagcacttcgaggtgatcgagcaccagcgcaagcgcctgggcaccactcgtggtttcatcgccgtcaagccgaactgctcgattcaggcctacacgccggcactggccgcatggaaggaattcgagccgcgtgaggtggttgtgagcacctatcaggcgatttccggcgcaggcaagaccttcaaggattggcctgagatggtgggcaacatcatcccgttcatctctggtgaagaagcgaagtccgagaaggaaccgctcaaggtgttcggccatgtggacgccgaaaagggcgagatcgtgccgttcgacggcgacctcaagatcacttcgcaatgcattcgcgtgcccgtgctcaacggtcacaccgccaccgtgttcctgaacttcggcaagaaggccaccaaggaagagcttatcgaccgtctggtgaactacacgtccaaggcttccgagctggagctgccgcacgcgccgaagcacttcatccagtacctcaccgaggatgaccgcccgcaggtcaagctcgacgtggactacgagggtggcatgggcgtttccatcggccgtctgcgtgaggattccatcttcgattggaagttcgtgggtctggcccacaacaccctgcgtggtgcagccggcggcgccctcgaatgcgccgaaatgctcaaggctctaggctacatcactaagaagtagttgaatctcgttaaaatcgcaaaagccctccgcaaggagggctttcatcgtattaggcgcggaattcgcggctcagcggccagtaccgccgtacaccacggcttcgatctgatcggcatcgagaccgtatgcagtgtgcagcgccttgacggcgtcgttgagctgatcgagcggcacgagtgcggcgatacggatctcggaagtggagatcatcagcacgttgatgccctcatcgctcagggcctggaagaacttggcagccagaccggcgtgggtcttcatgccaacacccaccacggctaccttgccgacgttggtgttcacatcaaaggagtggtaacccagcacttcctgcttgtcgagcagcgtgttctgcacctgcttgacggccgattcgggcacggtgaaggagatgtctgcagtgccaacggatgcgccggcctgcacgatcatgtccacgttcacgtcggcggtggccagctcggtgaacaccttggctgccatacccggctcgttcggcacgccacgcacggtggccagcgcctcggaacgatcgtgggcaatgccggaaatcaccggtgcctcggggcccaggtcagggaacaggtcgcccatggatttcgcttcttcttcagtcatgtcttgccttgtcttggttgaaattacttacgattattgttcgctgtagccgcgctcagtcgaggttcggcagcgtgcgcgggtcaatgccgtcaggcacaaccagcgtgccggggcgacgggagaacgaagagcgcacatgcagcggcatgttgaaacgctgagcgtactctacgcagcgcagtgccagcaccttggagccgcaggaggccatttccagaatggcttcgtagccgatggaaggaatacggcgggcggaaggcacgatgcgcggatcggcggtaaagatgccgtccacgtcggtgtaaatctcgcagatgtcggcaccaagggccacagcgagtgccacggcggacgtgtccgaaccaccgcggccgagcgtggtggcgtcacccttggcgttgatgccctggaagccggcaacgatggcgatgtctcccaatgagagcgcgttcttcacgcggtccggtctcacggccttgatgtgggccgcgccgtaacgggtgtcggtgaagaagccggcctgctgaccggtgaaggagtgggcgcggctgccttcggcgtgaatggccatggccagcaggctcatggaaattcgctcgcctgcagtcatcagcatatccatctcgcgctcgggcgggttggagtcgatgctcagcgcctgatcgataaggtcatcggtggtatcgcccatggcggagaccaccacggccaccttattgcccttcttctccgtctccacaacgcgcttggccacacgtttgatcgaatcggtatcggcgaccgacgagccgccgtacttctgcacgatgagagccactgctgtcctttgttcttctcttagggatttgtttggtcgatattctacgcaaacgcaacgattataagggctgtcgcgttcaccccgcgaccccgcgccggcatgcggacacgggtatggcctacgttgttcagcaaatattcaagttttcaccggtggttctttgagacagccgcatccatcctttgagattcgagcggttaactatcaattaccggcaaacgaaagcaaaccggcgaggtttccgcagaaccccataactgaataccttgtcatgggcgaaactttgggctacaaagtggaccgcatttcggtgattttgccggatgacacgtcgaagctcaagattgtgccgggtgaggaccgtgtcaccttgatgacctgtacgccatacggcgtgaacacgcatcgactgcttatctccgggcaccgcgtggcaattccgatgccggcccccgagccgaatgacgtgcttgacgcgcgcaatatcgcccttggtgttggcctaggcatactggcggcaggactgttcattatctggttggcacgacggcacaaggccgcgcgcatcatccgccacggcgcattctggccgtggatgcgtcgcaagggcgaaagcgccaatgatacgctggcctaggcctcacgccgaccggccagcgccctgcccagcgtgatttcgtcggcgtactccaagtcggagcccaccggcaggccgctggcaagtcgggtgaccttgacacctacgggtcgcaatagctgggtcaagtagctggtggtggcctcgccttcaatattcgggtcgagcgccataatgacttccttgacctcatcgccttctaagcgtttgagcagactgggaatacgcaggtcggcagggccaacgttggccattgggttgattgcgccgccgagcacatggtataggccgcggtattcgcgcgtgcgctcgatgctcatcacgtccttgggctcttcaaccacgcagatcaccgaacggtcgcgtctcgggtcggcgcataccgggcaggggctggattcgcacacgttgccgcaaatatcacagaagcggatcttggccttgacctcctcgatggcctcggccaaatcgcgcgcttcatcttcgggcgcggacagcatgtagaaggcgatacgctgcgcgcccttcggcccgatgccgggcagccgcccgaaagcgtcgatcagtcgctgtattgcgccgtcataagcaagtgccatgggtattcctcgttattcgtcctcattattcatccgagtgcttcttggcaggctggatgttcttggggttcttcggatcatctgccgcgaattgctcgacttttttgacctcgaatagctttttcagatcgtcaagattcatggccgtcgcctcgccgagcgactggtcgttcatcgagtattcgtcgtcctcggccgcgacttgcggttgcggctgcggctggctattccacgggtcggcattcggcgtcggctgtgcgggctgcggttgattccacgggtcatcgccggcagccggctgcggaaccgattggggctggttccacgggtcatcgcccgacatattgcccgacactgtctgaggaaccgaagaagccggagtctgggactgcggctgattccacgggtcgtctcctggctgcggagccgcctgagcatggttcccctgcggctgattccacggatcatcgtgaggagactgctgatatggctggttccacgggtcggcttcgaccggttgcagtgccagcgaggccgtagcctgagattgcggctgattccatggatcatcgcttgcgccggcaactgccgtagcgggagctgcggtggctggctgccccgtggactgtccagtgggtccagcggacgcaacggacgcagcgggtgcaacaggagcagccggagcggcccacggatcaacaccatcactgatgtccggaaccgcaacatgcttcttgtgatgctcttcgggcgcaggcacagcagcgggctcgttaggtgcgaacccgtctgcagattgcggtgaagcgttgcttacggccggcttggcccaagggtcatcgtcactccagctcttcgccgccgtggatgcactggattggccggctcgatggctgtcgtccgtatcctcggcttggcctgttgcagtcggcttcggagctttcggctcgctccccatatgaatgcccagacccgcgcccaaactcgacgcggccaatccggccttggccatggcaatctgctgcttgaccttggccaattgctccgggctcatacgtttgacggattcgactcgctcgccattcgccgcgaccgcagaaggtgcaataaccgcattggcaccgaactcgttgcgcacggcatccaacaccacggacgccgccttcttaccgctgttgtccacggccaaggcgaaagcgtgctggctcagcgacttgtcgaacgtcatcgacaggcaaggcagactcttacggttgggaccgaattttacggtcggcaccttgtctcgtgacacatattcacgaatggtttccggcaaagcggcgacggctgcatcccacttctcgtcgatggaccgattatccgatgccgcaggcgaggtcaccggttgggccgggacggccggcgacgtggcgggagcaccccaggcattggcagcagcagctgctgcggcaggttgcgcagacggagagcccgcgggccggtcgctgactgggctgctgacagggccattgtctcccacagcggattcatgggaagcggtgctctgaggcgcggctgcttgctggttgcgtgcagcaccggagaatccaccatgtgaggctccggcaaacccgcctcgcgatgcgccggcaaaaccactggcacccgtaccggaagcggctgacgtagtcgaagtcgaagaagcagccgcaggcggcatgccagaagaagctggcgcgggagcggctgttgcaaagcctgattcactgccggccaacaatcgtgcggccagcagttccaagcgcatacgcggagaaatggctccggtcatggcacccaacgtagtgttgatgatgtctgccatggcggtcagtgcgcccagtcccagcgccttggcttggcggtgcagatcgtccatatcctcggcctcagccgtgtcggacagcacggattccgcacggtccccggccaacgtaagcaccagcagatcacgcacacgagccagcaggtcttcgacgaatcgtctcggatcgaatccgccgaccacgactttctggataacgccgtacagggcttcgccgttgtgattgattaccgcatccactgcctcaccgatcagcgcctccggtgtgaagccgagcagggctacagcggcatcatgggtgataacgccttcgaccgaaccaaccatcagctggtcaagcacagacagggtatctcgcatggagccgccaccggcgcgcatcgccagtttcagcacaccgggctcgggcttgatgccttccttgtcgcagatcgtctccaggtagggacccatgacttcctgcggcaccagacggaacggatagtggtgggtgcgcgaacggatggtgccgatcaccttgtctggttcggtggtggcgaagatgaacatcacatgttcaggcggctcttcaacgattttaagcagcgcattgaagccctgctgcgtgaccatatgggcctcatcgagaatgaaaatcttatagcggtcgcgcgcaggggcgaaaccagcgcgttctcgcaattctcgagcatcatccacaccgttgtgcgaggccgcatcgatttcgaccacgtcgatggaacccggaccgccggtggccaggtccttgcagctttcgcattcgccgcaggggtgggaagtcggccctttggcacagttgacgcaacgggccaggatacgcgcggagctggttttaccgcatcctcgcggccctgagaacagataggcatgcgtaagcttgccttcgtccaaggcgcgcatcagcgggaccgtgacttggtcctggccgatgaccccttcgaaggtgtccggacgatagcgacgatacagtgcaagtgccatagctactaacctacctttgccctcagaattaaccgataaaaagtcaagataaaccgggctcatagctgccgaatcgggaaaactctttatattccaacgacattcatctgacaacggttaccgcatttttattgttattaaccgctttctttgtattaacatagtgtcaataacggttgtagtcaggaggtacccatgagcgatatcctcgacaagaaacgtcccacccgtggcgatgcccggcgcgacgccatcgtgcaagccgcgcgcaaggtgtgtctggaaaaaggcttctccaaaatcaccgtttccgacatcgcaagcgaagtcggtatgacgcgttcgctgttctaccactacttcgaagacaaggaagccgtagccgacgcagtactcgatgacgtcatcgacgaaatcctcaccacgttgaagcagtggaaccaagcgcgcgaaacaggcaacgtgaacaaggcattagacgacatcgtgcatgtgctccgttccctaatcgccgacgagagccccttctcaaaccgtatgatccaagatggcaacgccgaactgtatatcaagttcattgaccgcgcggcggaccgtattgccgactacattgcccagaccaccgtacgtgatttcgagcagatgcatggtctgccaatcaccaacgtccatgagacattcttcacgctaatcgtggggcttatctcgctggttcgctcgcatccgaacatcagcgaccgaaccatcaaagaggtcatggcgcagacgctgcatatcgaaagctatgtcgtctgaggtctgacggccattggctctggtaccgctctcccgcactcccctcagtccgcttcgcggccagctcgtccgcaattgcggacagcttacggctgactttcttctggttcgactatcgtcgaaccctcgcctacaaacatcccactgggctgtttgctttacggctcagcctaatgaggggagccaatataatcaggtcaggcgaactggccggttacggggtcgcgaccgtctcgggcgatggcgtcgagcacttcctgtcgggagtccacctcacgggcggctacggccggcggtaccagtacgcgtagcgcgcagtcctcggccactaccctgaatggcagatgcccgatgtattcgccgtccgccatcagcaccggtggctcgtcgccttctgcggctcgcgtgacttcgatctcgcgtatgcgcttccacccgaacacctttgaggcgagcagcttgccgttataggcgttcgagatggccaccgcacattcgccgaagttcggcacatgattcatccacaccaggtccaacagcccgtcggagaagcaggagtacggtgagacctcgatgccgccaccgatatgacgcgaattcgcaatcgtcagcaacggcgtgatgatgtctcgttcatccgtggtaccgtccgccagcgtggccttgacgtggtacccataacgcttcatatgcgtcagctccaccagcaccgccgcaaagtagcgcatggtgccggtcggcagatgcgaatgattcgcacggtcgttgatacttgcgtcaagaccacaagacagcatgcccgcatagtaccggtcaatcgggtgctcggcagacttgttctcccggtactcgtattccccgccggtggatgggttcacggcatagccaccatccaaagaggtcacgcgtcccatgtccacatcaatgtgtgatccgcgcacgatagcgccgacgataccttccactgcggtttcgatgcgattgaccggcagcttaagtccccgagcgaaatcgttgcccgagcccatggccacgatgcccagcggcttaccgccgcaacccacggcattggcaccgagtgcgatcatgccgtcgccgccgaccaccaccagatagtcgtactcgtgcgcgcgttcacgcgcctggttcagggaatcgtcgaaacttacgccggtgatgtcgatgacgtcgaagttatgggcacggccggcgtcctccagcagtcccaatactcgcgcatccaccttggcaccacggcccttatcggaagtgggattgcccaccatggccaccacgcgacggcgttctgtgcgttcactctcgctcatgctctcaccttaaccaaaggtccagaagcccgccagagcatcagtgcttacggtccattattgtgataattgtctccttccgtacaattcaccggtccggcccgagccatccgctccacggatgatgccaccggaaccatggtttccaccttgatggttaccaacacgtcttcatcccgcacggagcaggagcccagcgtgacgccattcgcttcagccatgtttgcagcaagcgcgcatggatcaccgatatccacatgccacagcgcatacgcggcgtcaaaggcgatgagatcggcgagggaacgcgctcgattctggcagatcatgaggttgcccacacttgccgccaccgcgagcgcaatgcccaccgccataaccagcatggctccggccatcgtgcccgatccctcctcataacgcattccctgcaccgcagttcctttctattgcggccgcccagccagcagccgaccagttattggcttatcgccgtagcgttgccggtgacccgcgttggagtgacatccagtgggccgggcagtaccgaacattcgaccatcacgctcgtcgattggccgttgtgggcaatgctgacgcggggatctccccctgcaacgtccgcagctatgctgcgcgcggatgattcgtcaccggtaaccacaaactcgcgtgcagccgccgtcgcggcaccttggcagtccatggaaacgatgaccacacgtcccattgccagtatcagcccggcgatggcgataacgctgggcaatacgatcgcgaattcggcggtggccgatcccgtgcataggtctggcggcagtctggcgagcctccaccggcatctcatggtcttcatggctgtcacccgactttcagagcctgtttgatgatgttggtcagcaacgtcttgatggcatccgacttcaggatggcgaccagcaccgccgcaaagcctgtagccgcaacgagtacgactgcgtattccgcagtggctgcgccttcttcgggctcagccatgagggcgcggatgcgtgcgtccatgaggcatagccgttctttcgccttggcgttcagcgtggccacacgagccttgctgtgcgcaaagatgccggcctgcccgtcgacgatgacggggataggggtattcattggcgttcctttcggtaaggaggggaagctgcgcagtggcttcgcaccttccccatgcgtatgtgagtggttggcccccgcgccgggttgacgcggggtgcataccactgtggactatcaacgcttcatgcaccaggaaaaacggggtatgtggttctagcttgccgagttatccacacctcgacgtgtcgtccaccacaaatgtggataaccaaacgcagccaagtacaataccgagcaatacaacaagattcagcctaagcgcactcagttcacgcctatattcacatcatgaaggacgcaatcgccggaatgactcctaccagcacgaatgccggcagaaaacatagccctgtaggcatcagtagctttaccgacagcttcgcggcattccgttcgatagcagcacgctcgtcacggtccagctgttcaatggcggattcgaggcgcacaccaggcatatcgccatgcgtccatgacgattccaaagccgattgcagcaggccaagatctcgttgcgtggtattcgtatttcccttggatggactatcagctggcgcaccctcatgctgaacagccatagcggcatgccacgcatcagcccagggaacccctctggtcagggagttcccgacctcgctcatgcgagcgccgcagtcgccgccgacggctttgcccaccatgtcaagcgcccggggaatcgaggagccctgacgcaaggacacctgcaacatacgcaatatgagtatggtccatgacgacccgcaatcatgcgctacggccggctcctcgcccggcaagcggctgtcatgacgagacagagccttatacagccaaccagcaatcgccgcacagcctgccgcggcgtgtacccacaccgtactcataatccgctgcctttcaacaatgcccgcatccatgccaagccggcagcataacaacatcctcccaatgtcaagcagaccacaccgcgtggcgatccaagcaagaacgccaatggtctagctcccagaagctcgcccaatgccacagtgacggccggaagcgcgctcagcagccccacagtggctttaggaacggcacatgcttgcgatcgcaagttctgcatcagcctcatctgccggtaagcagtcaataccgcttccagacatggcaccgcttggcaaccgagctcatcgctcaaaaccgctgcggcggcgaccccgcgtgcagcttcaagtacctgcgctggtgattcgtcgggcagacgccgctgttcgaacaccgttatgagccgttccacagtaatgcgatgagtggcgaagcgtctgctggattgttcctcgaatgcttcaaccaatgtgccgccacctcgcaatcgcgcgatggcggacgtaatcacctgcgcaacgcccacgcgaggtgagtcggcatatcgaggttcgtttatggctgcggaatcgaccgcgcgcccgcggtaagccagccggtacagcctcccggacttgttccccggccatatcagcacggcgagcgccaccagaacagcacaccacatcatcacccaccaccactcggcctgggaacgatgccccatcgttcaatgaagtgcccccattcggcggcataccgaggaggatggcagccattccataccgccagcggtgttcctgccagttcaccatgtgctacgcgcagttcgccgatctgcgtgatacgccgctgtccgttcactcgctccaaatgcaccaccgcgtcgaaagcgcctgccgccagcatggtcaacgcctgtggactgactccggcgagtaatccaagcgaaatcagcctggacggtactcggttcacgccgtccgcatgcacggtggtcatgccaccgtgatgaccagaattgaacgcgcgcaataggtcgacgatttccgcgccacggcattcgcccagcaccacgcggtcggggcgcattcgcaacgtcgctttgaccaagtccgccaggcttatggctccgacgccctccacattcgcctcgcgtgttaccaacgagacatgatcgtcgcgtcccagttcccccagttcgcgaacttcctctacggtgacgatgcgctcgttcacgtcgcattgcgccagcagcgccttgagcaaggtggtcttgcccacgcctgttccgccggtaatcagcactgtggcatgtttgcgcaccaatcccacgaacgtcggcagccaagcagccgggaatacgcctaatttgctcaggtgctgtagcgatgccatggttcggtcagggaatcgtatggaaatcgcggcaccttgtggcaccaatggggcaatcaccgcatgcacgcggatgccatccggactggcggcatccgctatcgggcaggcatcatccagtctgcgcccgagctgcgcgcacagttggacggcgtattctcgaactacttgcggcgagcggaacggcacatgcaatactgtttcgcgcatgccattgccgcggtccgcccaaacgcggccatcacaggtcaccgccaaatcggtaacctgcgggtcagatgccacgtcatccagcagaccgaagaatatggttctgagcgctgtgccagcctcattggctcgcgtgctgacggcagccatagcatcactggtccttgtgagaagctcccgaaaccgggcgaatggcctgttctacgagatcggcaagcaagttcatggctttgcgactgcctttggtcaccgatctgatgccgaggccttccagtacgtctccgcacagattgacacttggcttgatgggccccaataccgtggcagtcaaatagtcctgcgcctcgccaatacccacgtggcctctcccacgtggagcgccacgtggttccacacctacgatatgtggcgcttcacagccccatgaatccaatctggaccggtgcgacttggctctggccagccccattaccgacaattccgcggcaatcacctgcaggccactgcgcagatcgggtacggtctcaatgagtccaccctgaccggcatctacgatgacaacgtcgttcgtttccgccaaagcccgaatggccgcttgaacttcccaccagtcaggctggcgcgcgctccaagggtcatagggaagtactcgcacaccctcccacatcatcagctcatggttcatcgcctcaccctcgatacggccgaggggcgcgtcgacttggctgaaccgcaagcccggctctcgttctacaccaagcagcaggtcaaggcatccggccacgaaatcagcgtctatgagaacgcagctgtgttcacgtctcgccaatgtccatgcaagcatggaagccatgacactcaaccccacgcctccatgacctgacgtcatcgttacaatgttatggaagctggtgtctgtagttagggcgagtgccggagcctcgcccgatctctgccgttcgcatgaggccaacggcctgggcggcggagtgtagtagcgatacgctggaattggcgcatcgtccgtgggcagcggaatgcccggaggtgctaccgctggcgaggtgatcctacgcgccacgcggggtgtggtgttgctattcataagccgattgaaacgtgtccgagttcaatgctcaacacgaatcgaccattgtggttctagcttgctgagttatccacaccccggcatgtcgtccacgacaaatgtggataaccacgctgctgtttcacgcccatctcatgcagaaaaggccctgacctcacatgcacagtcagggccttcattttcacgacgattccttatgcggtaatctacatttcttgcttacttatcgaggttcttaatgccgtcttccatagcatccaactgagcatcggtcaccttggccggcttcttcttgccgaacttggccttgagcagaccgatgatggtcggggcgagcgagaccagcagaatcagcacgatcaccagctcgaagtggtcctgtactgccggaatgttaccgaagaagtagcccagcagcgtgaacaacgtggaccagcacaggccgccgagcactgagaacggcgtgaaacggctccaacgcataccggaaataccggagatgaacggcatgaacgtacgaatgaacgggaagaaacggcccaggaacacggccagcgggccccacttctcaatcatgtgctcggttttggccaaacgctccggggtcaaggccttcaccttgccggactggatgatgcgacggccgaagaaatgaccaatgaagtaattgcactggtcgccgataatcggggcgcaccagaccaccggcagcagccagaacagcggcagcgcggccttgccggtcgcggcatcgggagcggcgaacacaccggcggcgaacagcagggagtcgcccggcaggaatgggaagaacaccacacccgtttcgataaatacgatgaggaagatgaagccgagggtcggcgccacgcccatggcaatccaaccggcaatcgcggcacgcggatccttcagcagttcgaggatgaaattaacgaagcccatgtgtttcctatgagtcctatacgtctatatgtgtgaacaatctgtccaataaccagacatttgtctgaaaaccgtcaaccaccctaccagtcgccccgatacaagagggaccaccggaacctcatagcagccattactgccatcttcttcacaaatatggcgtgcttcgctggtatcgtccatgcatttcaccgcgcacgatgagcatcatatgcgcggtgatgcaatcagtcactcgccaagacgctggcgcacgaaaccgtccagcgcggccgcatcgataccgtcatacgattcgatggacgcgaactggcccaggccggaagtatccgtgcgaatccagccagtctgcgcgatcagagtcgcgcccgatgccgcaccggcctgaagtccaaccgaggaatcctcgagcaccacgcacttggccatgtcttcacgggcgatgccaagcttgtcggctgcggccagatagggcgcagggttcggcttgtgttcgtacggatcgtcgccacagacgtagccggcgaacagtccctcggactgcttcatgatgttctccgccatacggcgcggcgacgtggtgaccagcatggacggaatgccggcctccttgagcgagtgcagcacgtccaatacgccgggaatccacggcagacgttcgacctccgccttgaacacataatccttgagctgtttgtcgatttcgggaacgctcaatgtgcagccatgcgcaatcatgacctctgccacgtgtggcaccggagtgccggagcactcccaaccgaggtcctcgttccactcgccgccattgttgtgcgcgatctcgatttcaccgtcatgccaaagcggctccgaatcgataagcgttccgtccaaatcccaaaacacggccttgagcagcatggttacctccgtacgtcgcagtgaatcctcaactattcgtattcgatatacctatctcaccaactccgcacgacagccgaacagcaaatcaccaaccccacaggaccatggatttggaatcggcgggggtggagtcggattcgcgcgtggtgtcggcagcggtatcgcggccgggcagttcgcgggtttcgcggcggatggcgttgcgccagaggcgggcgcggttggagcgttgtacctccacgatattgccgtcacggcctgcggcgaaaacgctctcctggtcgccggtttgcatgcgtttgacttcgcggcgcagttggcgattctcttcttcgagggccaaaatgcgtgcgatgccggaaagattgatgccctcatcctgacttaggcgctgagctcgagtcaggcgggcgatgtcgcgcaggcagtagcggcgtgcgccgccatcggtgcgctgcggacggaccagacccagccggtcgtactggcggagggtctgggggtggatgttgcccagttcggctgcctggccgacggtgaagatgggcagttcgatgtcgaagccgacgtcatcggctccgtcgagatcggccctgcccatcaccagcgcggttgcgcacatcgcgtacaactgcttcatttggttggctaaccgcgccattgttcacctcctgattacaggctgagatagtcgccggctttttcgtcgaattctttggcggcgtgcttgacggccagacccggcttggcggggaccatgatctgcacgcggccgatcaggtcgcccggctggttgccgcgctggacgccaagtcccgcgagcttgacctcggcaccggagctggagcctgccggcaccttgaaggtgacgggattgccgtcgatatccttggcctcgaccttgccaccggccacggcctggcccacagttacgggcaggtccatgacgatgtcgtggccgcgcatcgagaacgcggcatcgggcttgacggtgacgtgcaggtacaaatcgccggccttgccgccgttgatgcccggcttgcccttgccggcaagcttgattttctggccgtccttgacgcccgcaggcacgtgggccttgaacttcttgccgtccacggacagggacacggtagcgcccttgaccgcctgacgcagggtcaggctgatcttggagttgcggtcctcgccgttttcggggcgcagggcctcctcatagccatagccgccggcattgccgtacggcgattggccgtagccgccatacgactggccgccctgacctgcagcaccgccgaacatcgagaagatgtcgttgatgttgttggggccgccacctgaggtggagaagcggatacgcgaaccgttgccaccggcaccctggccaaacatggagccgaagatatcagagaaaccggaagcgtcgaagccacccgcgccggaaccgcctgcgaagcgggcgccgcccatgccgaactggcgaatcgcgtcgtacttttggcgatcttccttcttgctcagcacgtcgtaggcttcggagatgtccttgaacttctcctcggcttccttggtcttgttgacgtcaggatggtatttgcgggcgagcttgcggtacgccttcttgatgtcgtcgtccgaagcgtccttggagacaccaag

SEQ ID NO: 576 - DNA, 6434 bp, Unknown
  R48_24m  MAG No. k141_90129
cttggtctggatctggtacagggtgacgggcaggtctttgtaagaggagtacatgtccttgaccagaagggtgaacatctcctcgtgggtgggggccagcaggtaatcggcctcgtggcgatccttcaaacggaagatgttgtcgccgtactcctcccagcgatgggtggcctcgtagggttcgcgcggcagcagggccgggaagtgcacttcctgggcgccgatgccgttgatctcctcgcggatgatggcctcgatcttgttcagcacgcgcagaccgagcggcagccaggtccagataccgggtgcggccttgcggatatagccggcgcgctgcagcagcttggccgaatcgacatcggcatcagcggggtcctcgcgcagggtgcgcaggaacatggttgacatacgaagggtattggaagtcatgtgttccaagatattcgcgtgaaccgacaagcccgcctgctattcgcactattccggccttcatcttggcattcggactcattcgtacaacaatgatggctagaagggtaggagggcacgatgacgcagccgaccgagcaacaggggaatcagccggaacccgcggagcaaccggtgtatcaaccggcccagcatgggccccgcaattttctgctgcaaccccgcaattcccaacggcagttccgcgacaaccggtatcgcaacagccaatggccatgccaccatttgcgcaatcgcctatgtcggtcccggaacaagcggcctgtccggagcggccgcgctgattgtgggtgtgcgtttgctgcaagcaccgttgatctacggcacggtgattcttatcgtcagcacggtgactgtgctgtggccatggcgggccgaattctcccgccactaccggtgggtgtggcttgctttgggcggcatcattctgattgtggcagccgcgcgctatgaggcgagcctcaaatcaatgaggacgatcgccgcgcgtattggcgatctgcgctaaatcgcgcgggcgacctgaggcagattaccaacgtccggcgatagcagtcctgcatacggggcagtgcccattgccactgtatccggcagataaacggttggcaatgattcgataccaatcgcgttccacgagcttggccctgcattcagggtttgggcaatatgtggtatcgccttcacgatcatgcacgttgccggtgtacacataattgagtccctcttcgagggcgatgcctcgggcgcgggtcagagtctcgtgcggggtgggcgttacgtccatcatgcggtaactggagtggaatgcggaaaagtgcagcggcacgtccgggcccaagtgctcgcgtatccatgtacattcagcatgcagctgggcgtcgtcatcgttgagtccagggatgagtagcgtggtgagctccacccacacgtgttcgccttctggtgtgcgtgcctcgttgaccgcatagtcgatggtttcgagcacatcggccagatgcgtgccggtcactttccaataaaattcttcggtgaagcctttgagatcgatgttggcggcgtccatggcggcgtagaagtcgggccgggcttcggcgctcatgtatccggcagtcacggcgatgggatgaatgccgagcgctcggcaggcttcggccgtgtcgatggcatattcggcgaacacgatcggatcgttataggtgaacgccaccgaatcgatgccccggtcggccgcgacctgcgcgattttctccggactggcttccacgccgagccggtcgaaactgcgggctttggcaatatcccaattctggcagaatcggcaaccggaattgcagccagccgtgccaaaactcagcacgctggaaccggggtggaagtggttgagcggcttcttttccactgggtccacggcgaagccggagctgcggccgtaggtgtcggagacgatgagtccgtcgtggtttgagcggacgaagcaaaagccgcgttggccgggcttgaggacgcagcggcgcgggcatagttcgcagcgagcgcggttggtaccgtcgtggaattgcgtttgccagcgggctatggcggggttacgaacatctgtgactgacgccgtatgaccgcacgattcccggtgaccaccctctgattctcggtgaccaccctccgtcgcttcgcgccacctcccgccagcgggaggggacatggttgctgcgttagtgctcggcataggcggtcacctcgtagcgttgacagtcaatttcgccatcgttccagtcgtaggacgggcggataccggccttggcgagcaggtgagcgacgaaatcgcgcggattgggcagctcatcccacacttgtggcaggaatgtggcgctgcagccacgacggtcggcgagaatcagaccgtctttgccggggcgtaatacttcctcaagttcagtgcgcgaacgtaccgggcgttcgacgttgctgccgtcccgtttgacggcgtcggtctgaggtccggattgcagcgatgccagagtcgcggtcttcgagccggtatcgcgcgaatcggcgtcacaggagttcacggtaatcggctcgggctcgcccaagacggatacctccacattgagtaacgggtattccgcggcggtgaccgggttgaaacgtgggtcacgggtggcggcgtccaccgcatgtgcagctatgtccttgccgagcgagcggtgggcggccagcgaaccgatgcacccgcgtagccggccaccctcggtcagggtaacgaaacaggcaccggactcgttcagccatgggtttgcggcaagaatggacgcggtcgaatcagcggcggtcggatgctcgatatgcaaccgttcccggatagcggcacgggcgagtttcagcagcacatcaccatgggctgttcccgattcgcctaagtcatctgcaccggctggagcatctgcttctggtttggattcccacgcggcaaacgagacatatcccactaccggctcgtcggcgtctcgcattgcggggcgaggttggccggcaagcgccaccacgccgtcgtcgccggaagtggaacagccgagctcgaagagcttcatgtccttgcggccttttagcacatccagaaggccgttgatcgggtatgcgccacaggcccggcgagggtgaatcggcagatgcaaagccgcaatgtccgcaatggtctggtcatccaacgcgcgggcgacttcgtgcggatgatagtgcgagagatccgaactaatcacgatgacggtttccgggccaccccacaaagcacgcaacacatcacccgcctcttgtggcgtggcatcgccggcgttcaacggcacaatagtgaggtctgggccgagcacggtttgcaggaacggaatctgcacttctaccgcatgttcttgtgcgtgggttgggccattgacgatcattgcgggagccgacgcgcccggacgggcatgtgtaccggagcgcaatggctcattgacagacaggcccagagccttacgctcggctgcaatgtctaccggcacagtgcccagcggcgtttcaaacgccgctgccgtggaacaggcgacgcctcgcacggccacacggtgagtcggtcccacgattaccgcgcgagtcacactcccccgccctcgttcgagcaaagcataggcaagcgcggccgccgtgccggaatacacataaccggcatgcggcacgattacagcctttggcactcccgctggaagcgtgggctccaactgttgcagaacctctcgactgtaatccaattgatgggtaatgagttgcttgagcgttgtgcggtcagcggggtagaacgaaccagccaccgctggcggacgtattgcgccagtgattttgccgctgccgtctgccgcgcttgctgcatctgacgcactagccacactaaccgtatcgatttgcacaccggcccgggcggcctcgcgaacctcattgtttccacgaaatatctcggatagcaccataactaccacctcttattccatggtagccgttcagttcctcaatgaagacaagttcgcagtgtcttcttcggcttcaaggggccgattccgcctcttggagacatctacttgcatttcgaggggctggtcatccgctcaatcgcacatagaaacggcttcataccaacgtcattccgccgtttttaagcgctgtctacttggacatcagccccttgaaacggaagtagatgtcccgaaaactcaaaatccgcccctcgaagtgcagaaacactcaaattagcggtcgttcgatatatcgaccgtcagaataacgcgtcctgggcgaagtcatcatcgggattggcaccgaattcgtccggctcggcgggtttgaacgcgcttgcaccttcatcggccaactggtcggaagccgaggccgaggcttcgcgcaggtcgccgtcgagcaccacggcatcgggcgagacgaggaacatgcgttcgttgacgccagccaaatacagtccgcccagcgattcgacgcgggacaacgccacatatcccatgcccggcgcgaaggtgcgcttcagatccatgaccgcacggtcaagcgtcatgccttgcgacttgtggatggtgatgccccacgcgcaacgcaacggcacctgcgagacggaggcgagcacggtgtcgccgtccatcatttcccatgtggcctgtttcatggtgacgatgttgccgttttcgaattccacgatcggccagccgcccttgttctcctgcgcgaagccgcgcacggtgccgagcgagccgttgacgtactggcgatcggtgtcgttgcgcagggccatgacagccgcgccttccttgagtaccagtcgctcgggggccaacatgttcttcttgagtcggtcgaccaggttggcagggcctgctgtctcggcgtggaactcgtgcggctcaagcatgatctggttcaggcgcatgtcgttgagattgtcggcctgccggttcaccgggaataggtggacggcgacctggccgggctcgggcagtttgcccagacgggtgacgagcacgtcacggtcggactgggtcacgtcgccttcgcgaatgtcggtgagcacggtcagcagttcgccggtgtcctgacggtgctgttcggtcagatagcagatcaccgggttgagttcgggccataccagcgattcggtgatgaagccttcggggttcaagccggcacgggcataccgttcgcgactggcgatgaattcgggggtgggggcgatgaggtcgcggttgcgcccggacaccgaaaccggcggcagttggaagaagtcgccggacagcacgacctggatgcctccgaacgggcgtgggtcgcgacgcacttcgcggcagacttggtcgaccatgtcgaacagccatgcgtgcagcatggagacctcgtcgatgacgaggatgtccgtagcctgaatcttgcgtttgcgccgggatttgatgagtttgagcagactcgggctcagggcggtggccacgccgacgccgctccacgaatggatggtttggccgttgatatgcgtggaggcgatgcctgtggacgcggtgactgccacgctggcgccgtcggcccgagcctggcggatgaactcgttcaagacataggtcttaccggcaccgggcgcaccggtcagaaacacgttcgcgccggcgttcagaatggctagggcttcggtttggcgcatatcaacctctctagactcccctcagggaggggagccaagtacggcggactacttattgagaatgctggtggccacgatgtcggcggcgatggccttggaggcggcatcatccgggccggggacgggggccatgaaggccttacggtagtagcgcaactcgtccaaggactcgatgatgtcggcgagggcacggtggccgccgttcttcggcggacggttctcgtagacggccgggtaccagcggcgggcgagctccttcaaggtgctcacgtccacgctgcggtaatgcaggtggctcatgaggcccggcatgtagtggtcgaggaacttcttgtcggagccgatggtgttgccggccagcagcgggcgcacgccttccggcgtgaagcgcagcacgtattcggtgaccttctgctcggcctcggccaggctcaggccattctcccactcgttgatcaggccggaacgggtgtgcatctggcgcacgaaatcgttcatgtggttcacagccttctcggacggcttgatgacgtaatccacgccctcgtccagcacattcaggtcaaagtcggtgggaaccacagacacctcgacgagttcgtcgccgccgaagatgtcaagtccggtcatctcgcaatcgatccaaatcaggcgcgagtccttcgcgctgtacgtttccgcgtcatggctgtcgaccatggtgtgcctcttttcttcgctggtc

SEQ ID NO: 577 - DNA, 2850 bp, Unknown
  R48_24m  MAG No. k141_91148
gccgcctgcccaagcagcatctgcttcaacacatccttgacccggtcatacatctgcatatcgttgcccgaacgggacagtgcgtcgaagaacgcatactcacgcttgacatagcgcaacgcctcggcttcgtgttccagtcctacaatctggtggccaacctcacggccaaggagaacgtggagctcgcctccgaaatcatgaaagacgcgcaggaaccgacccaagcgcttatcgacgtggggcttcaggaccgtatcaacaacttccccgcgcagctttcgggcggcggacagcggcgcgcggccatcgcccgagcggtggccacgaacccgaagattctgctgtgcgacgagccgactggcgctctggactacaacaccggcaagcaggtgctgcagattctgcaggatcagagccgtaagaagggtgcgaccgtggtcattgtgacgcacaattccgccatcgcgccgattgccgaccgtgtgatccacatgcatgacgcgcgcgtcaaatcgatcgaagtgaacgagcacccgatggatatcaaggatctggagtggtaagcagtatgaccgatctcaatgatttcaccgaaacgaccaaccttacgcccgcgaccgactccgcagccgattccgccgcaaattcagcaaacgactcctataccgcgcccggcagaacgccccacgcgcacaaggccaagcgcaaccgccgacgcaacgggtcattccatagcgcatgctatggaaagacacccgcgtcaccatggccaaatccaagggtcgattcgcctccatcgtgagcctgatgacgcttggctcctttgcgctcgtaggcctgttcgtcaccggcccggacatgcaaataaccggcaccgacttctttaatcagaacaatctcgctgacataaccgtcatcagcgattatggcctgaccaaagctgacgaaaacattattcgcagcgcgccgaagtggccaaggcgatgaggggcggggccgtctccgagtccgcgccgatctactacgaggagatgtcgaaagtggccggcaaggagaacgacaaacagtcgattaccctgatcgccactgatgacgcctacaatttcggcgactacatcaccctgcgttcgcgcaccgggcacaagccgcaggtgctcaccgaccgtggtgcgatcatctccgaacgtatggcggggatgatggacgccaaggtaggcgacacgattaccgtcaccgattcgagcggtaccgagcgcaaggtgcgcgtggacggcatcaccgaaatgcatatcgggcatttcatgttcatgacttcgggtggctgtaagcacgtgttcggcgaacagtaccagtcgaacgcctatatggtgaggctcaagaaccatgagacctccaatgtggagtcgcgtagcgccaagctcataaagttggacggcgcgaagggcattgtgcagaacacgacttcgaagaaacaggtggccacaatcgtcgacttgccggatcagatcatggaagtgctgattctcgcggctgagctgctggccgtggtgatcctctacaatctgacgaatctcaacgtctccgaacgtatccgcgaactgccgaccatcaaggtgctcggcggactcggcgtgctggtctaccggcggttgaagacggtcgacatgctcggctccctgaagtcggtggaatagcagcggaatagcaaatgggatcggctttgaagccgatcccattcaattattcgctcactgctttctgagccttctgcgctttctgctccttttggcaatcagggcatagtccgaagacctccagggtgtgggattcgacggtgaagccgtggccgtcggccactttgcgcagccaagcctcgctgggcgggtcgatttccacggttttgccgcaccgcttgcacaccaagtggtggtgatgtccgtcgtcgccgcataggcggaacagctgctggccgtccaggcggatcgtgtcggcggcaccggcatcggccaaggcgttgagctggcggtacacggtggccaagccgattttcgagccttcgtcctccagcctgcggtgcaggtcctgagcggagatgaactcctcacagtcggccaaggcggcgcgaatcgcgtccttctgcttggtctggcgttcgatatgttcaaccatcgataaggtcacgccttctttttcaggtcgtcccagcagccggtggcctcaaggtcagcaaccgtggcatcagggttgtcggtgagcacggtgatgtggcccatcttgcggtcgtgacgcacttcggccttgccgtagtcgtgcacattccactccgggtgggtggcgatcagcgcgcgcgtcggctccacatgctggccgagtacgttgaccatcacggccggcgagagcagcttgggcttgggcatgggccagccggcgatgccgcggatgtgggcgtcgaactggtccatcgagcaggcctcgatggtgtagtggccggagttgtgcgggcgcggggcgagctcgttgacgatgacctgatcgtccttggtgatgaacagttcgatggccagcgtgccagccagttcgaagcccttggccaagcgaatcgccagttcatgcgcttcgcgagccacatgttcggacacttcggcgggggcgatggtcatgtgcaggatgttgttgcggtgctcgttacgcacgatggggaaggtgacgaagtccttgccgttgccggagaccaggatcgaagcctcgaatgcgaagtcgacgaagccttccaggatgctcggcgggaagccgccaccacggtcggaacgggagcggatcttctccaagtcggcgtcggaacgcagc

SEQ ID NO: 578 - DNA, 2817 bp, Unknown
  R48_24m  MAG No. k141_94024
cgtgacgccgcacctgtgctattactcgccgcgtattcccggcaacaccggttcggccatccgcctgtgcgcagtgaccggcacgattctgcatctggtggagccgctgggcttcaacctgcgcgacaccaagctgcgccgtgcgggcctcgactaccatgacatggcccacgtggtgttgcacccgaatttcgacaacctggtggagtcgatgcccaattcgcgcatcatcgcgttcaccgcgcacgccaccaagctctacaccgaggtggaatacaagccgactgacatcctgctgttcggccccgagcccggcgacatccccgacccgatggacatcatggagggccctcatgtggccgaacaagtgcggctgcccatgcgcccgtccctgcgttccctaaacctcaccaactgcgcatccatcgccatctacgaagcctggcgccagctcaattttgcgggcggagcgtgaggagaaggcccggtgggccttcgagtaacgacgccgaacgaacgccgacaggcgcgagagcggaaacactgagcttcgcgcagtgatgaacgctgaatataaggccacctgcgtttcgaggggcggatttggcatccgccggaggtctactgccgcttcaaggggctgtcaaaggacgagaccccgagtatggccgttgaaatatcaatgcttgtactcggggtcttcatatataccagcccctcgaaacggaagtagacctccagaaaggtcggaatcagcccctcgaaacgggaatagacctccagaaaggtaattcgagctggtatctgccttcaaagaggtacattcgagcgtttgcagaatgctatctgccttcaaagaggtaccgcaatcgagaaaccccgggtatgagtgttgatattccaacgctcatacccggggtttccgcatataggtacctctttgaaagcagatagctctccgcgaggggccaaatgtacctctctgaaagcagataccctaccgaatcaattcttgaagctgtgaatcggcgcagggattcggccgccacgggtcacgaaggcctcgcagctggtctggttcaccggaatgatcggcgcatagcccatcaggccgccgaagttggccatctcccctacgcctttgccttccaccggaatcacgcgcacggcggtggtcttctggttgaccatgccgatcgcggcctcgtcggcgatgatgccggaaatggtggctgcggtggtgtctcccggaatggcgatcatgtcgaggcccaccgagcatacgcaggtcatggcttcgagcttctcgatggtcaggcaaccggaagaagccgcgtcgatcatgttcttgtcttcggagaccgggatgaacgcaccagacaggccacccacgtagctggaggccatgatgccgcccttcttgacctggtcgttgagcatggcgagcgccgcggtagtgcccggtgcgccaacctgttcgaggccgatcttctcaagcacttcgccgacggagtcgcctacggccggggtcggcgcgagggaaaggtcgatgatgccgaatggaatgccaaggcgacgggatgcctcctgtgccaccagctggccgacgcgcgtgatcttgaacgcggtgcgcttgatggtttcgcacaggaactcgaaatccttgcccttggcctcgtccaatgcacgggagaccacacccgggccggaaacgccgacattaatcaccgcgtcgccttcggtgacgccgtggaagccgccggccatgaacgggttgtcgtcaggcacgttgcagaaggccacgaacttgacgcagccgtaggagtcgttgtcggcggtgcgctcggcaacgtccttgatgatgtggccgagcagttcgaccgcgttcatgtcgatgccggtcttggtggaaccgacgttcacggacgagcagacgatgtcggtctcggaaagggcttgcggcagggagcggatgagcaactcctcggccggggtcatggacttggagacgagtgcggagtagccgccgatcaggtcgacgccgacctccttggccgccttgtcaagcgcgtgggcgatcttgacgaagtcctcgctcgtcttgcaggagctggcaccgaccagcgagatcggggtgacggtgatgcgcttgttgacgatcgggatgccgtagtcgcgttcgatggccttgccggtggaaacgaggtccttggcataggtagtgatcttgcggtagatgttgtcgcaggtcttgtcgacgtcgtccgaggcgcagtcgagcaacgagatgcccatggtgatggtgcggacgtcgagcttctcctgctcgatcatctgattggtctcgtggacctccatgatgttcagcatggtttgttccttacaggatatttgaagactaatttggcggtcaccctcatcagagggataaggatggctccgtcagcggaaagcccaccgggctttccgcctcctcgcgtgcggcggcctgctgagcgggccgcctcaaatacggtgcatcttggtgaagatttcctcacgctggcagcggatgcgcacaccgatgtcgtcgccgaggtcctcaaggttgccgaccatcgcgccgaagtccttgtccgcgttggcgtagtcgacaatcatcatcatgttgaagtaaccgtcgatgatggtctgggaaatgtcaagcacgttgacctgatgttcggaaaggtatgtgcagacgcgtgcgatgatgccgacagtatcctgaccgacgacggtgatgattgccttgttcatggaactccctggtcgtatacaaaaagcgggtgactaccc

SEQ ID NO: 579 - DNA, 3288 bp, Unknown
  R48_24m  MAG No. k141_94464
aagttctacacgtcctacgcgctcaagacgttcgatggtcgcctctatcttgaggacttcccgcagcgttgcaccgccgtggcattggagctcgccgccggcaacgagcagcaggccatcgaatacgccgacgaaatgcttgccggccgtttccagcctgccaccccgaccttcctgaacctcggcaaggcccagcgcggcgagccggtcagctgcttcctggtgcgcatcgaagacaacatggagtcgatttcgcgcggcatcaacgcggccctccagctttccaagcgtggcggcggcgtcgccctgctgctgagcaacctgcgtgagctcggcgccccgatcaaacacatcgaaaaccagtccagcggcgtgattccggtgatgaagctgctggaggattccttctcctatgccaaccagctcggcgcacgtcagggcgcaggcgcggtgtacctcaacgcccaccacccggatatcctgcgattcctggacaccaagcgagagaacgcggatgagaagatccgcatcaagtcgctggcgcttggcgtggtgattccggacatcaccttcgaactggccaagcagaaggcccagatggccctgttcagcccctacgatgtggagcgcgtatatggcaagccgttcgccgacatctccgtcagcgagcactacgacgagatggtggccgacgatcgcatcaagaagacctacatcgacgcccgcaagttcttcaccaccatcgccgagctgcagttcgagtccggctacccatacatcgtgtttgaggacacggtcaaccgcgccaacccgatcgaaggccgcgtgaccatgtctaacctgtgctccgaaatcctgcaggtgcaggagccgagcgcatacaacgaagacctcacctatgcgcacgtgggccgcgatatctcctgcaaccttggctcgctgaacatcgccaaggccatagacggcggcctggcccacactgtggaaaccgcgattcgcgcgctcacctcggtggccgagcacacgagcatcgacgcggtgccctcgatccgccgcgccaacgaggagggtcacgccatcggcctcggccagatgaacctgcacggcttcctggcccgcgaaggcatccactacggctccgaagaaggcctcgacttcaccgacatatacttcatgacagtggcctaccatgcctaccgcgcctcgcacgcgctcgccgtggaacacggccatccgttcaagagcttcgctacgtctgactacgccaagccggccggccaaggcaattactttgacaagtacaccgatggtcgccgctcgcttgaaccgcgtaccgccaaggttcgtgagctgttcgccaagtacggcatcgagattccgaccgtgtccgattgggagacgttgcgcgacgcgattttgaaggacggcatctacaaccagaacctgcaggccgtgccgcccaccggttcgatctcctacatcaaccactctacgagctcgattcacccaattgcctcgaagatcgagattcgcaaggaaggcaaaatcgggcgcgtctattacccggcggcctacatgaccaacgacaaccttgagtactacaaggacgcctacgaaatcggctggaaggccatcgtcgacacgtacgccgaggccactcagcacgtggatcagggactgtcgctgaccttgttcttcccggacaccgccaccacccgcgacctcaacaaggcgcagatctacgcctggcgcaagggcatcaaaaccctctactacatccgtatccgtcagcaagccctggaaggaaccgaagtccaaggctgcgtctcctgcatgctctgattgttcgatggagcgtccttgtcgttgctcctcggtcgacgtaccttcgtacgccttccctcggtgcgcctagaggccgcacgcatcgaacaaccacagatgtccattcatatatcgggctccctttcttggctcccctccctgaggggagctggccgcgaagcggactgaggggagcccaaccactctaaggaaccacaatgtcaccaatgatttataaggcactgctccggctgaccgcgccggaggagttcgaaaacaagtccaacgacgataacgataacgacaacgagtaaaaggaacactactcatggcacctatctctattccgcgcaaaccgctgaaactcatcgaccgcgtctccgcaatcaactggaaccgccttgaagacgagaaggacctcgaggtctgggatcgcctgaccggcaatttctggctgcccgaaaaggtccccgtctccaacgacatccccagctggcagaagatgaccgaagatgagcacacgctcaccatgcgcgtgttcaccggcctgaccctgctggacaccatccagggtacggtcggcgccgtctccctgattccggacgcgctcaccccgcacgaggaagccgtgtacaccaacatcgccttcatggaatccgtgcatgccaagagctactcgtccatcttttccaccctgtgctccaccgagcagatcgacgcggccttcgactggagcgagaacaacgagttcctgcagaagaaggcggagattgtgctcgactactacgagggcgacaacccgtacaagcgcaaggtggcctccaccctgctcgaatcgttcctcttctactccggcttttacctgccgatgtacttctccgcgcacgccaagctgaccaacaccgccgacgtgattcgccttatcatccgtgacgaggccgtgcatggctactacattggctacaagtaccagaagggcatcgcccagctcaccgacgccgagcgcatggatatgcaggactacacctacgacctgctcaacgagctgtacgacaacgaagtggagtatacccagtccctctacgatcgtgtgggcttgaccgaggatgtcgagaagttcctgcgttacaacggcaataaggctctgatgaaccttggctacccggcgctgttcccagctgagatctgcgacgtgaaccctgcgattctggccgcgctgagccccaacgccgacgaaaaccacgacttcttctccggctccggctcctcctacgtgatgggcaaggctgaagaaaccgatgacgacgactgggatttctaagggtttcgcggtccgcgaacccgcagcgccgccgcgttcgcacgacggcgctacgctggaggcatggaacaggagccgttggtcagcatcatcatcccggtatataaggtcgagaaattccttgatgaatgcgtgaagtctgt

SEQ ID NO: 580 - DNA, 6620 bp, Unknown
  R48_24m  MAG No. k141_95203
agctaccgtctgcgcgactggctgttctcccgccagcgctactggggcgagcccttcccgatcgtttacggcgaagacggcaccccgcacctgctgccggattccgcattgccaatcaacctgcccgacgtgcccgactacgagccgcgcaccttcgatccgatggacgccgagtccaatcccgaggcaccgttgagccgcaacgaggactgggtcaaggtcgagctcgacttgggcgacggcaagaagacctactaccgcgacaccaacaccatgccgaactgggccggctcctgctggtactacatgcgttacatcgacccgaccgacaccaagcacatggtggagaaggacgagttcgactactggatgggcccgaaccacaacaagtactcgggtgacgaaggcggtgtggacctgtacatcggcggcgtcgaacacgccgtgctccacctgctctactcccgtttctggcacaaggtgctcttcgacctcggctacgtggcttcggccgaaccgttccacaagctgttcaaccagggcatgatccaggcctacgcctacaccgacgaccgcggccagtacgtgccggccgacgaggtcgtggaaggcccggccgacgcctccggcgagccgacgttcacctggaacggcgaacatgccaatcgcgagttcggcaagatgggcaagtccctcaagaacatcgtgaccccggactacatgtacgagaactacggtgccgacaccttccgcctgtatgagatgagcatgggaccgctggacgagtctcgcccgtggaacacccgcaacgtggtcggcggcatgcgcttcctgcagcgcctgtggcgcaacgtggtggacgagaccaccggcgaggcccacgtgaccgaggacgcgcccgatgagaagacactgaaactgctcaacaacacgatcgccgaagtgaccgcggagatggagggcatgcgtccgaacaccgccatcgccaagctcatcgtgctcaacaaccatctgaccggtctgaaggccgtgccgcgtgccgcagtggagccgttggtcctgatgctcgccccgatcgccccgcacatctgcgaggagatgtggagcaagctgggccaccccgagtccctgtccgccgagccgtggccggtggccgacgaacgctacgtgggccacgacaccgtgaccgccgtggtgcagatcaagggcaaggtgcgcgccaagctcgaagtgccggtcgacatcgacccggccgacctcgagaagcaggcgctggccgccgtcgccgaccgtcttggcggcaaagagccgcgcaaggtgatcgtcaaggcccccaagatcgtctccatcgtccctgcggagtgactccatctaagctccccttgtcaggggagctgtcagcgtagctgactgaggggtagccaatgtgcgatatcgccccacctcaattgtggataacttcataagctagaaccacataccccgtttcagctggacaaacgcccatgaatccatcagcgtggatgcatgggcgtttctcataaccatcgcgcaggccatgccgccaaccgtttgcgcgcattcagcaggcagagcgaagccatgccccaaccgcgagcggaacggcccacgacgcctccgccgcctcccggccatgcacggattcgtccggccggccacccgccccaaacggagcagagcggcctgcggcaggcgacccgtgacaaacgtgcgttatcggatctgatcggcgtacgttccgccgatgccgtcggcgaatcagccagactcacccgggatcagccgcgattgtcgttcaccattgggcatgccttggccgtgatattgctgctgatcgtcgcccttggcatcagcttggcattgctggtccaacagtcgatgaatatggccatgctgtctcaaccgaccgccatgcagaccacgggcggctccgctggagatcaggcgacgccatcgcagaacaccacggacgagaaacgcacggatccgcagcagtcggagcattccgatgccacagcgaaccccgaatcggataccacgcaatctccgcacatgcagacggacggcagcgatgccggcgctgccacgcatggtctcatcaacctcaacacggccaccgctgaagaattgcaatccatcaaaggtattgggccggttaccgctcagcggatcatcgatcatcgcacggcgattggcgggtatgcatcagtcgatcagctgctggatgtcaaaggcatcggctccaagacgctggagaccatgcgagggcaggtgacggtcggatgagcagggatcggatactgcgcgagcaggggagccgcgattggaggatgctgccgatcgccatagtgatgtgggcggcgagcctgggagcgcacgcattattcgcatggaggatgtctgatggactcggcaccggtcaggcaaaggccgatgccggagctggcattgacgtcaccataatcggcatggaatggcctgtcacacgaatattacctataacagtggcgtcatgtgccgctgtggcggcgacgatcgtggtgtctttccgcctgcggatcaggtggacgggaacattgaccgtatgcgtcgcggtggcgtgcatcggcagtatgacggcaatcgcgtcggacaccattgcctggcatgatcctgcctccgcacaagctcgccaatccagttcataccacgaagtcatggccacggtgacgacgcccgtgatcgcttcggaccaacgcacatacgattgtcagacggacatacggctgagcggcatcactgtggatggcgcggacgtacgttccacggtcgccgtgcgcgtatacgccgatgaatcgtattgtgggcagttgcgtcgaggcgcggtctatctgttgacgggcgtattgcagcaagcgcgatatggacgcataccgctatggctgctcttggaaggaaaacagccggtagcgcaggtgcgggctccgccgtggcatctcgccgcgatcgcacatatgcaggaggcgtttttcaccgtgaccggacaattgtccgatcaggggcgtgtgttggtgccgggattgacgatgggtgtgcttggccaggattatatcggcggcgatgccggtccgatgccggtcaacagcacgtatgcgcaaacgttggaaaatcagttccgccggtccggcatcatgcacctcatggccgtatccggcggccacttcgtactggtggcaggactggtgcgtcggttatgcatgtggatgctgcttgatcggcggctgacggcgttgctggtctctggagtatatgcgctgctggcattggcgatgttccccagtgattcggtcacccgcgcgttcatcatgggattgataggtgcgttggcgtatgcgatgggacggcgtacgcaagcgttgagcgccctgtgctggacgataatcggtgtattggcggtgaacccggatatgtcggccagctacggattcgccttgtcttcggccgccgtactgggtatcgtgctgtttgcggggcggctggccggtgtctttgagcgagcgatgccgcacagcatcgccgaaatgatggcgatgaccgtggccgcgcaattgttcaccctgccgattcaggtgttgatggaaccggaattgccgttgctgtccgtgccggcgaacctgctggtgtcaccgttcgtgggattggccacgatggcgggattgatggcactggcgtgcgcatggtgcacgccatggctggccggcgtattcgcgtggatatcgtcatggggcacgctggtgatggaacgggtggcgttgtggctgggcggcagcacgatggccgtcatcccatggaaagacggcgttacgggcgccgtgctgattgtgacggcggaaatcggtatcggcatgctactggtgttcgtcagccgttgcctccagcatgtccgtcgttatgaggccggaatgtctggcgtgcgcttcggttccgcttggcgcgtccgcctcagtctctggtgtgaggagacgagacgcctctttacgcggcggcaagccgaatagccaatgcggtattcggtgcagcaaccatcgcaatcccagccgaataccactatcttgacggcagcggcaaaatcgtgatgccggcaggtcattgtccaacctgtgtggcgagatggtggcatggcgaaaacagcagcgaatgcaccggtaaccgtggtgcccggaggcgactcgtatttgaacgacgcgcgcaccaaggcactgtgcgcgcaggcgttgaaggcgcggcccgacgccgacctcatcgaactcgacgccacatcggccgaccagtatgccttcgatgaagccgtcagcccatcgttgctttccgacgttgccgtggtcaaactcgtcaacctgcagaatgccgacgacaagctcgccgaagctctggtggcgtacaccaagcaggccgccaaggatccgaacggctccagcgtggtgatctgccagcacgagggcggcgtcaaagggcgcaaaatcatcgaccaactggtgaaagccggcgctcgcaaagaggacgtgccggatttgaagaaaccggatgcacagctcaatttcgtgctcggagaattcgagaaacgtggtcgtagagtcgaaccgatggccgcacagcagctggtatccgtactcggcggcaaaaccggcgaactcgccgccatgtgcgagcaactgtgtttcgactttgacgataatccgatgggcctcgaccgtgtcaaccagtatttgaccgccaatccgcaggtcaccggttttgccgtggcagacaaggccgtggaaggcaaaaccgcagaagccatcgtcatgatgcgtgcagctgtggaacaagggaccgatcccatcgcgctgatcggcgcgttggccatgaagctccgtaccattgccaaagcctcggcggtacgggccggcacgatttcccaggccgaagcgaaaaccaatccgtgggtgctgaagaatgcgatgcgccaacttggcggctggacttcggcaggactcgcgcattgcatccgtatgctcgcctgggcggatgagcaaagcaaaacaaacggtggcgacccggtatatgcgctggaacgctgcattgaagacatcagtcataaaggtcggtaaaagtcgataaaggggtatttatgagcgaacacactattgcggctcccaccagcgaggccatgcaggagctcggccgtcgtgtggccggaatggtacacggcggcgatgtattgctgctctcaggccctcttggtgccggtaaaaccacattcgcccagggcttcggggcggggctgggcattaccgaacccatcgtgtctcctacattcaccattgcccgcgaactcgacgggcatttcgccgacggcactccgtctcatctggtgcatgtggatgcctaccgtctgggcggctcagcctatgcgccggggcaggacgccatcgggcgtttgttggacgagctggaatcgctgggattggacgaagaacttgaagaccccggcgagaacacggtggtgcttatggagtggggcgaacaaatggccaccgccttggcgccagaacgacttgaaatccatatcgatcgacctctcgattcctccgatgccgcatccgctggatcagacggcgaactcaccagcaacggcactcgtaccgtcgcattcgtcccagtcggcaagcgatgggccgcgttcgatctgcagtaagccatgcgcctatagactcctcgatgtacactctctagaggctttacgactaggaggattcatgggttgcacgttggtgattgacacctcattcggctcgacggtcggcattgtggggcgcgatcccattgtagagaccgattcgcgcacccatgtggagaaactgcaggtcaatatcgcgcgcgcggtcgaggaggccgggttcccagcatctgacattgcaacagtcattgtgggtaccggtccagccccctttactggtctgcgtgccggtatcgttacggccaaggcactggctttcgcaacgggagcgacgcttatcggccataatgttcttgagtctcaggtgcaatggaatctcattcgccgtggcaaagccggcactctcggcgatactcataaatgccatgtgctcactcttgccgtaaacgacgcacgccgcaagcaactctattttgcgttgtactcggaccccctcgttggcgatcccgatggcgaaaccgtggcgacggctctgattgacatggatatcgattaccctgcatccattgcgcagcgcgtgaatgatgccgttcatacgtaccgcgacggacttatgccagaagacagcaatgtggatgtggtcgtggatgttgtgggtcatggggcccgcaaatatgcggatgcgctgggtgcaatcgagcagcttggcgacatcaccgatgaatccgtattggaccaaggggagcaaggtctcgctatctttgccactgatgcggaactggttgccaaccgtaatcccgatacgccggtcgaaccgttgtacctgcgccggccggacgccgaagtgccgaacccgctgaagcacgtgctcggccatgccggcgccgataaggcgtgagac

SEQ ID NO: 581 - DNA, 3387 bp, Unknown
  R48_24m  MAG No. k141_96873
catcaacatcgcccacatcgagtaccagaccgagaagcgtcactacgctcacgtcgactgcccgggccacgccgacttcgtgaagaacatgatcaccggtgccgcccagatggatggtgccatcctcgttgtggccgccaccgacggcccgatggcccagactcgcgagcacgtgctgctcgcccgtcaggttggcgtcccgaagatcctcgtcgccctcaacaagtgcgacatggtcgacgatgaagagctcatcgagctcgtcgaagaagaggtccgtgacctcctcgacgagaacggcttcgatcgcgactgcccggtcatccacacctccgcctacggcgccctgcacgacgacgctccggaccacgagaagtgggtccagtccgtcaaggacctcatggccgccgtcgatgactacatcccgaccccggttcacgacctggacaagccgttcctgatgccgatcgaggacgtcttcaccatctctggccgtggtaccgttgtcaccggtcgtgtcgagcgtggccagctggccgtcaacaccccggtcgagatcgttggtatccgtccgacccagcagaccaccgtcacctccatcgagaccttccacaagaccatggacgcctgcgaggctggcgacaacaccggtctgctgctgcgtggcctcggccgtgaggatgtcgagcgtggccaggtcgtggccaagccgggctccgtcaccccgcacaccaagttcgagggcgaagtctacgtgctgaccaaggacgaaggcggccgtcactcgccgttcttctccaactaccgtccgcagttctacttccgcaccaccgacgtcaccggcgtcatcgagctgccggaaggcgtcgagatggttcagcccggcgaccacgccaccttcaccgttgagctgattcagcccatcgccatggaggagggcctgaccttcgctgtgcgtgaaggcggccacaccgttggctccggtcgtgtgaccaagatcctcgcctgattatcatcagacaagaatcttcgcttgaactagcgacttaagaaatccccttcgaggaaactcggaggggatttcctataaccgcagcaggatatggatatgtaccacgacttccggcctggatgcgctagtgttgctttccaatagataaacggactgctgcactgcgagggtatgacactgatggcaggccgggaaagaaggtcgatgatgactggttcgcaagccgcacactgtggttccgtatccgcgctttcactgggactgcccgtctccacggcgattcccgaagccaaaggcacactgccgaaagccttgttcgtgggcaaggcaccgatttcaggcaaactcaagcagcgattggtgaacgaaatcgaatccattaccatgctggcgttggtccggtcgattaacactgggcttgcggacggcaaactggttccggaagtgctggtcatcggactgaagcttacggccaaagccactggcataccgaacgaggttatcgatttgattgccgggcagcgtaaatcgggcatcgtgttcgtgtgcgtacgcgacgtgccgttcgagggcagcacacgtgaggaatgtgcgttcgccgtgcgtcgggcgataccggggcgtgccggccacacgccgatctatcgggtatatgccggcgattggcagccggcgggggaggcccagctggagctggccggctctactattgatgagctgtgggcctcgctgtgctcacagaccattctgggcacgccggagatcgaaaatctggatgcgcgcatcattcgccatactgaaattgctcggctcgaatccgaagtggacaagctcacccgcgaccatcagcgcgtcaagaatcctgttcagcgcaatgaaatctatgccaagctccacaagaccaaaacacagctcgcaaaactgcgcgaagcatagtgatatgaaaaccattggggtcccgctggcgggagctggctcgcaaagcgagactgagggtggtccaggtccgtggcctagggctacgcccaagctaattgaaatattcgtgcatcatacagcgtacagttaaaccatgttccctctgctcgaaaccctggtcgccgtatacgaggtgggccagttcacgctggctgccgacgaactgaaggtgtcgcagtcgacggtgtcgtcgcgtatcgcccaattggagcagatggtcggcgcgccgctgttcgtgcgcaatgcgaaaagcgacgtgacgcccacacaggccgggcggatgctgtaccagaccgccatcggcatcgacggattatggcgggatacgcgtgagcagatcgcccgcgtgcaggaggcgcgtgagccgctggccgtttcgttctcgcacacgaccgcggcgatcctgctgccgaaggcgttgccggtgatggctcggaacatggacagtttcgacttcgccgtacacgtgatgaactcggatgcgattctcgaacgggtcagcatgaaggccgtgcagctcggcgtggtggaaaagccgatcgtgaacgattcggtggaccgcgtcaccctgtgcgaggaccggctggtgttggcgggggagcccgacggcgtgtggatggtgcgcgagcacggttccggcgtgcggtattacacggatttgtatttcaagaccgctcaggttgtgcctgcacgcacgatggaagtgtccagtaatgcggcgattgtggcggcgctgtccgccgggttcgggcagtcgttgatttcggaagccgccgtgccggcgggcgtgccggtgcagcgggagcttggcgatgagtttgtgcggcggttctatgcgctggtgccgagatccggtctgacgcacgatcagcgggagttggcggagatgattattgctgcgctgcgcgggtagtcagatagtcgactgagggaaggtcgcgaacgttgtttctctccctccgtccgcctgcggcggccacctccctcatcagagggagatcaattaggtatcgacaaaatcgatgatatgtattggttgcaatgatttgaccgatgtaaatgcttgagcttcaatagacaccgtgagagagttctgtacaaaatggtggaagcgcattaccaccgttgacatgttgttcattggcgttctgactctgctggcctcgctgttcgcctcctggctcaagcagttccccggattcagcctgttcggcgcgcttatcatcgcgctgctcatcggtatgatcatccagttcccgatccgcagtgcctacgtcggttccaatgatggccgcaaggcaggcgtcaaggacgccgctggcctgatttccaacaagctgctgcgcctcggcatcatcctgctcggtttcaagctcaacctcgccgtgctgttcacg

SEQ ID NO: 582 - DNA, 33793 bp, Unknown
  R48_24m  MAG No. k141_96878
attaagcaaaaccaatcatcagggattgggtgggttggggtgtgtgttgctggaccgtaaagacttggcctgagcggcccggagcatgtccagcaacataccacccccacccacccgaggtcagctgcaatggaaggctaaagcatgggcttcaggaacttgccggtccatgaggattcgcattcggcaacctgttcgggcgtgccctgcgtgacgatggtgccgcctccgtcgccgccctccggaccgagatcgatcagccagtcggcctccttgatcacatccagattatgttcgatgacgatgaccgtattgcccttgtccaccagggactgcagcaccttgagcagcttgttcacgtcttcgaagtgcaggccggtggtcggctcgtcaaggatgtacacggttttgccgtcggatcggcgctgcagctcggtggcaagcttgacgcgctgagattcgccgccggacagggtgggtgcgggctggccgagtcggatgtagccgaggccgacgtccacgagggtcttcaggtatcgggagatgccggtgtacgccttgaagaagtcggcggcctcctcgatgggcatgttgaggatgtcggccacggtcttgccgttgtacgtgacttcaagggtctcgcggttgtatcgtttgccgtggcagacctcgcagtccacgtagacgtcgggcaggaagttcatttcgatcttcagcgtgccgtcgccgtggcaggcctcgcatcggccgcctttgacgttgaaactgaagcggccggggccgtagccgcgcacctgggcttcgggagtcttggcgaaaagggtgcggatcttgtcccacacaccggtgtaggtggcggggttggatcgcggcgtgcggccgatcgggttctggtcgacgtggatcaccttgcgcacctggtccacgccttccacgcgcctgtggcggccgggtacgatgcgtgcaccgttgagcttgtcggcgagcaccgggtagaggatcgtgttgaccagcgaggatttgccggagccggagacgccggtgaccacggtgagcacgccgagcgggaagctcacgtcgatgttcttgaggttgttctcgcgggcacccacgactttgagcacctgggtcttgtggatcttgcggcgcttggcgggcacggcgatctctcgccggtgggcgatgtagtcgccggtgatggagcgcttggcttcgatgaggtgcttggcggggccggagtagatgacttcgccgccgtgttcgccggcgccggggccgatgtcgaccacccagtcggcgcggcgtatcgtgtcctcgtcgtgttcgacgacgatcagcgtgttgccgagatcgcgcaggtggtgcagggtttcgatgaggcgttcgttgtcacgctggtgcaggccgatggacggctcgtcgagcacgtacatgacgccgaccaggccggagccgatctgcgtggcgagtcggatgcgctgcgcttctccgccggacagggtggcggccgcgcgcgagagggtcaggtagtcgaggccgacgtcgttcaggaagccgagtcgggccttgatctccttgagcacttcgccggcgatcagctgtgccgagccttcgagtttcaggccgttgatccaggcgagttcgcgtacgacgggcatgtcacatacgtcgaagatggatttgccgtccacggtgacagagagcacctcgggcttcagacgacgtccgtggcagacctggcagggcacttcgcgcatgtacgactcgtagtattcgcgcatggactgcgaatcggtttcgtcgtggcgtcgcatgagcgtgcggatcacgccttcgaagccggtggagtattcacgcaggcgtccccagcgattgcggtaggagacgttgaccttgaagtcgtggccgtagaggatgtcgtgcttgacgtcgtccggcaggtccttccaaggggtcttcatggagaagcccatttccttggccaagccttcgaggatgtggccgtagtactgggaagtcatcttggtgccgctccacggttcgatgacgccgtcggccagtgacttgtccgggtcggagatgatgaggtccgggtcgatttccagtttgaagccgagaccggtgcaggcggggcaggcaccgtagggggcgttgaaggagaaggtgcgcggctcgacctcatcgagttcgagcgtgtgcccgttcgggcagctgcggtgttcggagaacggctggcggcgggccgggctgccttcctcctcgtccacgaagtcgatgacgatgctgccgttggcgagcttgagggcggtttccaccgaatcagtcaaacgttggcggataccgtccttgaccacgagtcggtcgaccacgacctcgatggtgtgcttcttctgcttggtgagtttgatgtcgtcggacagctgtgtcatctcgccgtcgatgagcgcgcgggcgtagccgtcggagcgcagcagctcgatcatatccacgaactcgcccttgcggcccttgaccacgggcgcgagaatctggaatcgcgtgcgctccgggtagccgagcagcgtgtcgacgatctgctgcggggtctgggaggcgacgggctcgccgcattcggggcagtgcgggatgccggtgcgggcgaagaggagtcgcaggtaatcgtagatttcggtgatggtgccgacggtcgaacgcgggttgcggttggtggtcttctgatcgatggagacggccgggctcaggccctcgatgaagtcaacatcgggcttgtccatctgacccaggaactggcgggcgtaggcggacagggattcgacgtagcgtcgctggccttcggcgaacagggtgtcaaacgcgagcgaggatttgccggaaccggacaggccggtgaacacgaccatacggttgcgtggaatcgccaggtcgacattcttgaggttgtgttcgcgagcaccctgaatcgtgatcttgagatcgttcgggatgtgcgagatatcagctaccagcgaaccatcgtgttcgatcagcggcgcctttttgatttcccggctcaggaaggagtcgctggtcatcaccttttcgacgatgacctcaccgttcttgcctttgctggttttcgcgccctttgcgcttgttgcgcgccttgcgccagtccgcgttgccgccacagccacaccccaccttccatctcaccgttcccgcgcgcacggttatgcgcgcgccaaatctgtcccaaggatacccgaacacacgaccaaattcgaacgcttgttcgatggcgtgtcaggccggaaaaccgaaccatagtatgcaaaattccggaccatcagtggaccgaaacgcaagagccggcccacgcgacatcaaccgtgcgcccagccccagtcaagctctatcccgaagacctctcctcctctgatttgccccggttcgcatgtcaatcgtttgacgtccgcatcggggcaaaacccgctgtcccggttcgtgattttggcctgttttcgagaaccaggacattccagtttccacgaaccacataaaacgcgaacggaaacggcggaataaagccaatctcagaatcgccatgttgtcccgattctcgcatcaaacgattgacgcccataccggggcaacacaacatgtcccggttcgcgaaaaacacccgaaatcacaaaccgggacaacggattctgccccggtacgtccgtcaaacgattgatgttcgaaccgggacaaaatcttcaatggactccacggggatgccaagcttgcgtaattcgtcaactgcatcacgcatgggaatgcgttcctgttcgatacgccgataagcgatggttttgtcagcacacagtcgttcataaagacgtcgctccgccgattgaaggccgggcgtcggcttaggctcccgcatagcaatcttcgcgctgcgttcagtacgatcggtaccaaaatcgtcgtggcccggatcgagataacggaaccgcagttcggtcggccgttttgacagacccaacgtttcgacaccgagcagtcggcaaatggccttacgccgattggtttttgactcattcagccatttgccgctgaatcctgtcagtggaatctgtgcgacggtgcgcttcgcgatattccgccgccagcgtacgaccaaccacacgcatggctattgattcgtcaggaacgacgactttggagatcaactcgacagaggtgcctatggtgcgatgcttggttatgatttcgcaaccattcttgcttgcccattgccgtatctcattgttgttgtcatgcactgcaatcgcattggtttccaaaaatgcttggtccggcaatcccaccggcacgggaaatggccatgccggttcgatgtcgtacatatgtgaacgcatatgtttcttcacgcatgtggtgatcgcagcgatgtctttcatgccggccatagttcccatcacctgctttcgaacatcgtcgagtcgaaccgaatcgtcttaataccggcgacgccgggactgctcattcggcaaccccgtcatccttcaatatatccgacgatgattcatcgtccatgtcattctgatgcagcacggcctcgcgcagggaggtgaggccggtgtcggggtccttgtaggtcacgtaggccttggtggagacctcgaggatttcaccggtcttgctttccggggcggagacgatgacctggaatccgaggcgcggcagcaccgtgagggcgcgctgcgtgtaacggccgtcggccttgatgagcgcctcgtcgaggaacagcgtggtgtacgagggctcgctggtcaggccgccgccgagcaggtagatgagcgccgcgccgtatacgaacgaggtgagctcctgcaaggcgccgcccgaacggccgccggtggaggtgatgcgttcgtccggaccgtcggcatgatgcacgatggcgtagaaggacgagcggcagcgcgggtcgaggttgcgggcgccgtagcttttcacgccgttcgtgtccttgacctgcgcgagttcggcgcgcagcagcccgaccatcggcgcgcaggccgcgaaagccttgcgcgaggcgtcggaatcgttgacgtcggcggatttccaatcgttcagggtgccgatgacgcggatgagctgcgcccagaaggtgcgctcgggacggcgcacgtccgcgtgcagggacaggctgccgtgcttggggccgaactgttggcccttgagcatggcgttgatgcggtcaagctggtcgtggatgtcgctggcatccgtgtcgatggcgcgtttgatggtcaggaagctcctgagcagctgttcgaggcagcgccggtattcggcgtcggtggcggcaaccgcggccagctgggtgaggctggcgagttcgtcgagatagtaccggtagtcctccacgctggcggtcagcgaatcatcgtcggccgcgtagagcgcgatgtaggtgctcattttcgattcgacgccggtgcgcgcggcgtcggcctggccgttcagcagattgatgcgggaggccatgtccttgccgatgccggcgatggtgcgttcggggaagctctcccccggcgcctgcgttcctgccgcgcccgcgccgatgatcatgtgcgcgcgcatggccgcgtccgccaatccggcgaatcggttgtcgtaggattcggcgagcgccgccgtgacttcgtccggcagcgggccggaagcggcgtcatcgtcattgtcggcggtggcaccggcggcgtccgtcgtgccggtgtcggcatggtcgcgcagccagatgagcgccgcttcgacggcgctgccggcgcgggccgcggcctggtcggattcgatgcgctggcgttccgcacggtcgagttcggcgttcagttcgtcgcgctgtttggcgagttcggcgagtttgggatcgtttttgatggatgcgatggcgtcctgcgtgtccgtgatggtccgttgcgcgccggcgatgtcgatgcgttcccatgacgtgtaggcgagctggttggctagttcgagttcgcggtggaggttatcggactgtgttttggcggccgtgtagtcggtgtcggcttggctgagcgcgttgcgggcggcgtcgacctgcgctgcgagcgcgttgaggtaggtttcgttgacgaatccgatgacctgggcgcggtctttggtgccgtgctggccgcgtgcgccggatttgatctgaccgtcggcctgcacctgacggttggtgcggtcggtgtcgtcgatggcggtgacgcatagggcgtcgaatcgttcgtcctgggtctgcgagcgcagccagtcggcgaagggcgagtcgtcgcggtagcgcagtttgccggacagccagtcgccgtcctgttctccggtgagtatgttcgcgtgcgcgccggtgtcgtcgtagtggcgtgcggtgtccacgaactgccaggtgcgtcggggcatggtgcgcgggtcgatggtgctgactttggcggcgaagccctgttcgtggcgcttgtcgacgaggatggtctgggcgatgggcgcgtaggcgacgttcatggcgagacgccagtcttcctcgtgttcgttcacgtccatgagttcggccacgtacggcagttcggcgggggcgagtccggtggcgcggcagagcatggcgcgggtttcgtccatctgctgggagatgcgggtgcgctgggagcgttgccggtcgaagtcgcgttgcagtcgttcgaggtcgccgcgtgcgccggcccgtgcgttgatggcggcggtgagggcttcctcgcattcgccgtctcgtttgttgtattcgcgtttgaagttcacggcgttgatgcggcgttcgttccaggactgttcgttgccgggcagtgtctcgccgatggatgcgaacgtttgttcgattcgtgttcggttggcttgcatgtcttcgagggtgcggcgggcctggtcgagttcgagttcgagtcgggtcaggttgccgccgtccagaccctgcatctggcctcggatcatgtcgaggcgggtgcgcaggtcttcggttcggcggcgcagcagcttggcttccgcctcgctgttctgttgttcggcgcggtcggcgggcagttgggcggcgacttcgccgcgcatgcgggccaatgcccagtcgcgcagcacggccggcaccgtgccgtcgacggccggcttgaccggttcgaaggcgcgggccttgccgcgtgcggcggcgtattcgccgtaggcctgttggatgccgcgcagcgtgtccatgcggcgggtcttctcgtccatggcgtggaagttctcgtcgtaacgttcgtagtcctcgaccgtggtgcgggccaggtccagggcttcgggcacgccgagcacgccttgtttgaagatgtcgtcgagccgggagggcgcgtcggcggactggatcttgtgcagcagtcggcaggcggcctcgctcaggcccattgcgctccagatgtgtgtgtggaacgcttcggcgctggggaatgtgaggcagtcggggtaggtggctttgagctgggctggtgtgaacggggcgtcacggtattggtccatgcgcctggggtccacgggcttgccccagaccacgtactggcggcgcacgtcgccgcggccgtcgccgggcatcaggtagaggaatttggcgcaggaaagcacctggccggtggtctggttgcgataggtgtccacgatggcgccccacacgggttgcggcgcgccgttctcgtcgcgaccgcgcaggtagagcggctcgtcgccggtttcggtgctgcccacgccgaccatgccgcgcaggtaggtgtagtcgctgcgttcggagcggccggagttcgaggccttgttgaacggcgtgccggtcgggtacagcagggagatctgcgcgtcgaccagcgtggatttgccggattcgctggcgccggcgagcagggtcaccggcagcttgtggtccgtggaggggcggaattcgtggtagccctcataggagccccagttgatgagtcggcgggattccagcatccaccggtccgcgatcatctgcacgtctgtcgcctgcatcattcggctcccttctcgtcgtcatcgtcatcttccgtgtcgccgtcgccgtgttccgcgacgtcgagccaggtgtcggccagttcgcggtcgagcaccacgggcacgagcggcgtgatctggtacatggcttcgtcgtccaggcgcgccaaatacccgtaggtgatcatcgcggagacgatggcgccgatctgctttgccacgccttcctcgtcattgcgggctgccaggtaaccggcgccggtggcgagcgcggcgcggatctcctcaaagctgacgagccagtcggcggggtcggcgtgcacgttctcgtattcgaggacgcggatgcgcaggaaggcgagcagcgcggcctcctcgcgtttgaggctgacacgggttttgagcgagcgcagggtcacgtcgtcgccggccacgggcgtggcgtacatgatgcggtagcgttcgttgatcaccaagtcgagcaggtcgttgttcagggagcgtacgacgacgtcgcggttgtcgagcacggtgtcgtaggtgggcccgctgatatagcggtcgcgtttgagggcgatggcggccatgcgtgcctcggccggcatgtcgccggtgtcgccttcgaacagggcgtacgggttggcgttgtccatgtgctcctcgtgttcctcggccacggtcatccttcctccacaatgatgttcagctcgtccatgtcggccagcaccggtctagtgatccagtgccggggctcgccgtcgatcgatacgcaatgccaagtcgcggtatcgccgcgctgcgccggggccggctcggtggcgatgtcgctgtcgatgccgacgccgtcagtggacggctcgtcggcgatggcgctgccgcttacggctcccagcccgcccaggaagccgacgatctcgctttcgcggcgttcgctttcgggcagccggttgaagctggcggcgatgtccacgagggttgcgttggacctgtcatcggacctgtcaacggtcaccgggttgcgccggatgaggctgaccatgcgcaggagtcgggggccgccgctgttgaccatatcccgcagatcggccaccggagtcgcctgcggggcttcggcggcgaggtcgctcaggccgggtgcggtggcgcgggtcatggatttggccgggcgcatcggcaatggcgcgaacagcgcgtccgcggtggccgtgtcgtacgggcgcgaggcgtctcccatatgggttttcgcatccgcgttgaggcgcgcgtacagtcggttcaagcgggtgagcatcgtacggtagcgagtgtcggtttgctggcgcacgagccggctgatcgcctcgtcggagacgcgcatctggcggcgcacggcttcgatgccgtcgtagatgcgggccagttcgtcgcggatctggccgagcagcacgccggattcgccggccagatacggggttttggcgatggcgcgcagggcttcgtcgatttgctggcggccctcgtcggtgatgatcacctggaaggcgtcctcgaagcggcggccgctgtccgattcgctgaacgagcggcggtattcgtcgtggtagcgggtcaggttctcgtccacgctgatgtcgccggtctgcatgcgccggcgcaaggcgtcgccgttgtcccgctcgtcgagcacgagttcgcgcaggtcgatgggtacgccgcgcagcgtgttgtggatcacggcgatcacgtcctccacttgggcttcgctcagcgtggcgtgctgcttgccctgttggatgcgtttgatctcgtgcttgcgttccttgatttcacggttgaggagtttgatgcgctcgccggggtcggcggtcagctgcatgcgcgcgtgttcgatttccatgatgatgctgttggcctgcgcgccggacagggcgcgtgattcgtcttcgagcctgctcagtgcctcgatggcgcggtgggcgcgggccgtcaaacggtagaggaatcggtgtgtggccgcatcatgcgagttggcgagccaggcgtagtcgccttcgccttcacgggtcaggtcggcgaggatctgatgggcggcctcggcgaaggtctggtcctcgcgcggcgcatattcgccggcgtcggccagagcgttcagactttgcgcgaaccgctcctccacggtctcgcgcggcagctcgccggtgagcgggtcgaacgtggaacgcagcagcgacacgtacagcatcgcgttctggcgcaacagcaaccgcaggacgcccgtctcatacaccggtcgcagccgttccagctcccgcatcacatcggccacagcatgcctccctctgtcgtgaccgcaccatactagccgatagccgcgaaccacaccccgcccgcgccacgcgtgctctctcccgcccagcaccaatatgtcacttttactgcacatgtcatcatgtgcagtaaaagtgacattgaggctgcgcactcatggtgatcgttcactccagccgtcgcccctattcgccgcgcagggcctcggtcggggtgagacgggcggcgcgggaggccgggtagaggccggcgaggatgccgaccaggatggcggcggcccaggcgagcggcagggaggtccagtcgagggcgatcggctggccggcactggcggcgacgccgatggcagcgccggcgccgagcgcgatgccggcgaatccgccgagtgtggacaggagggccgcttcggtgacgaattgcatgcggatgttgccgggcgtggcgccgagcgcgcgtctcaggccgatttcgccgcgacgttccatcacggtgacaatcatcatgttggcgatgctcatgccgcccacggccagcgcgatcacgccgatcatcaggccgagcgtggtcagtgaatcgttggtggtgtttcgcgctttggataggtcggcggacgcggtgacggacacgttgccgccggccgggttggcggcgtgggcgagcgtgcggcgggtgccttcggcgtcgccgggcgtggtgcgcacgtagatggcgctgatccgtccgatggtgtcggcctggtcggggtaccggccgagcgcccattgctcgccgatgatgacggcggcgttcatgttttcagcctgcggcgtggggttcaggatgccgatgacgccgtaccatgcgttgtcgatgaggatgcggtcgccgggctcgttgacgccgagccggtaggcggcgtccgagccgagcacggcgacgggcaggtgctcgttgttcgcgtcgatgccatgaccttgggcgaggcttgctccgacggcgtcgagtgcgccgggccgcatgatggcgagggccagcgcgttgccgttggttttggggcacagcccgttcttgaagatctgcaccttctctggcgcggtgtcgaagacaccgacccgttcgacctgcggctgacgggcgatggttgtgggcgcgtaatccggcagcggaaccttctgctgggcggcgtccacgccgggggcgaccaccgacagattcgcgccaagcgcgtcgagttgggcgaggagcgctgcctggttcgatgcggcgatgccggacaacgccacatatgcggccacgccaagcgcgatgcccagcgatgccagcaccgtgcgggacgcccgcccggcggccccaacccaagccgcatgcatcaaatccgcaattcgcgtgcgtattggtttactcataggagtacgttcactcatatctctcccccagtcagcctttggctgacagcccctcgtcagagggggcttgattcggcttgtcgagttcggtgactaggccgtcttggatgtgcagacgcctggggaaacgtgcggcgatggtctggtcgtgggtgaccatgaccaggcttgcgccggaatcggccgccgtaagcagcaggtcgacgatggtgtggccggtttcgcagtccagcgcgccggtcggctcgtcggcgaagatgatgtccggccgtttggccagggcgcgggcgatggccacacgctgctgttcgccgcccgacaactgggccggccggtgatgcaggcggttccccaatccgacctgttccaacgcctcggcggcccgttgccgacgttcgccgcgcggcagggttgtgtattgcaggcctgtcatcacgttctccaaggcggatacggtggcgatcagatggaactgctggaacacgaagccgatgcgcgcggcccgcaggacgctgcgctgccgctcacccatcgcattcacatccccgccgtcgtatcgcaatattcccgaggtcggcatgtccagcgtgcccagtaacgacaacagcgtgcttttgcccgagccggacggcccgacgatggccacgagctcgccgcgatcgatggccagcgatgtatcatgcaatatctccagcaagctcccgtccttgcctggaaacgccttcgtcacatgctccaacgtcagcaatgccccatgctctgggccagcgggggcaaactcgatgtcgttcatgagaccaccaccttgtctcccgccttgaggccgtcggacttggtgatttgcacttgcgcgtcggacaccagcccgattgacaccggcacacgcaccaacttgccgccgcgtaccgcttcgaccgcatacgcgctgccggcgctggcgatcagtgcggtcaccggcacgatcagcgcctccccggtcgaggcatcggcgttcgggatgatgacttgcacggccgtcggcccgaaagccgccacctgcgactggtccgggaagtcgatgcgcgccgatggctgtgtggcttgcccgttgtcgccggtcttctgcccgccctgatcgaccgaggcgagcgtcgtttcgacggtggtgttgtccggcagcacgacctgcgccttgtctccggctttgaacatcgccgcctgcgtggcggtcaacgtggcctgcgcatgcagggtgacgcccgtatagcttgccgggctgacctgtgattggccgagtttcgcgttcaccgccgtgatgcggattggtgcggccgcggccagggccaccgtattcgggtcgaatgtgccggtgaccgcgtcgccggtcaggccgagcgagcgctgccattgccggatcgcctcgcgggtcagccagttgaaatgcggtccgacctcgccgccgtagaatccgagttcctgcaggttctgctccagttgcgtgacgtccgggccgtcggagacgccatcgccgatcgtccgccagaacgggcggtcgccatggaacagcggcacgggcgcgccgtccatctcgtacacctgttcgccggtgttgatctgtttgccggccaccggcagttgggtgattgtgccggaagcggccgcgaaatcggagtcgtcatcgtattgcagactcgcgccgagccgggtctcggcgttgagtacgcccttggtcacctcctgcgtgcgcagcgtggacacatccacctgctgcgatcggccagtctgcccggtcgcggtgacgtgcccggccaacgtccacggcctcaccgccacgcacaccgcggccagtccgatcacggcgatcgccgcgataatcatcgtcacgattctgcggtgtttcccgaatctgcgcgcttccgtccgtgtcatgattgctcctttgtccgttatcggatggccgtctcattgctggggcgcggcttcggtggacgcgctgccggaggtgaattcggagaggactttgttgtagtcatagccgaattcctcggtggtgccggcgaaggcataggagatgttcgcgccatcggtcgggcattccttgaggaatcggcgcagttcggattcgcttacggtgccgggaatcgtgatcgaggtgggcgtatcggcgtccgggtccttgacccagtcgaagcccttcttacgcgcggcctgggcgtaggcgagcgccgcctgcttgtcttccccggaatactggtgttgcggccccatgtccggaatgggctgggtgaagtcggggttcttggcctcgcagtcggcgtattcccgctgtttggattcgtagggtgagccggcgagcgccttggcgtccttgaacaccacccaggtgctgtcgtcttccatcgacgtgtaggcagcgttcgggtagagttgcgggccgtcgtcggatgcgctgaggctgttgccttgggaggcgaccggcttgccgtcggtgccgatcatgcgcagtgcgaccgcgtttttggtcggggcttgtttgcccgagccggagccggacgacacgccagcagccgtacgcgcgtcgaatcctttgccggtcaggcaggcggcgaatcgcttcgccgtggcgtcggtggtggtcgtcgcatcggaccgatcgtcggcacctgagcctgttccgactgccgccagcggtgacgagcaggcgcccagcatcgaagccagcgagagtgcggacgtaagcattgcgattcgccgtaccaggcgcgtatgagtagtggacattaccgtctccattccgtgagtcgattgtgacgacttccatccaatcgccctcaccgtggagcgtcggtaagcggacggattactttcgccttaccgtagaatcgggaaaatgttgggtgatgccattggttcgggaaggctcggaaggggacatgatgcggattctgatcgtcgaggacgaccgcgaactggccgccgcgttggacgacgcgctgcgctacgaggggtacgcgaccagtctggcaaccaccggcgtcgaagcgttgaagatccttgccggcacgaacgtggacatcatgctgctcgaccgtgatctgccggtattgtccggtgacgcggtgatggccaccgtcgccgcgaaccgcattcccgtggccgtaatcatgctgacggccgccgccgaggtcagcgaccgcgtgagcgggctggacctaggggccgacgattacctgaccaaaccgttcgcctatcccgaactgctggcccgtatccgcgccctgcaacggcgcagcgggaccagcaacgcgaccgcagccgtgctcacgcgcggcgacatcaccctcgattccacacgccggctcgtgttccgcgaccacgggcgcacgctcgtcaaactcacacccaaggagtacggcatattgctggagctcatgcgtgcggaaggcggatacgtgaccgcgcacgaactctacgatgcggtttgggatgagccgaccgccgccgacccgaccgacgtgatcaaaaccaccatctattcgctacggcgcaaactcaccgatcgcgaggccatcgtctcgacacgcggggaaggataccggctgcaatgaaggcgacgaacacggcgaaagcatcaggtcgtatacaggcgcttgccggcaaactgcggcccaaatcattccgcgccaaactgacgttggccatcagtctcgtgttcctcatcgccatgggatcggcgaccctcgtgcagaccattgtggtcaacagcatgttcacgtacgccacgacggtcaccgccaaaaaccctgagatgcaggtcgaaagccagcacagcggttccggcaccggcaaacgcccggattccgacccgcgaatgttttcccggggaagcggcacaggtctgaacgatatcactggaacatccagcgtcggcggcgatatgggcgacggtgactatcaggtggaatggggcaaggacgggtcgtataccatcaacaccccgtatggcgtctccgtgtggaaccaggacaacatcgccaccggattgcgcatcagcgcggccatcatcttcgtgttcttcgggatcaccagcattctgatcatctggctggtcacctcgcgcatgtcccggcaactgacctccatcagcgcgcaggcggcggcattggatccggccaaacttgatacgcgcatcgacgtgaatgggccgccatctcgccgtaggccccagttccggcgtgcgggcagacgcgggaccgaggattgggatcatagcacggacagccgcacggacggtcgagctgccggccaatcctccgaagtcacgcagctcggtgacgccatcaacggcatgctcgaccggattcaggccgcatccgaagcggagcggcggttcgtgtccaatgcctcgcacgagctgcgcacgccgattgctgcggtggagaccaatctggacgcgccgttggcccaggggcggttccccgaggatgtgcgaccgtcggtacagcgcgcactggatgccaatcggcgcggcgcgcaactggtgcaggcgctgctgaccttgtcccgtatccaaagcgggaccatcggcggcaagcaggcgggcgatgtgacacagatgagtcccgcatcaacggcacgcacatccacagatttgtacggatgcgtcggcaactcccttgcggatatcgacgatgccgccaccaagcgtcgcatcaccataaccgtgaacaaggccggcggcgacgcggacatgtttctcatcgccgccgacccggcgttgctggaactggcggtcggcaacctgctgcgcaatgccgtcgtgcacaacacggatgatgggtcgatcgacgtgaccgtcgtatcggatgaggatggaagcggaccccgtctgaccgtcacgaacaccacggatgagatgctgccggacgatctgaacgagctgacccaaccgttccatcgcggcgagaactcgcgtatcagcgccgtgcccggcgtggggctcggcctgtccatcgccagtgcggcatgcgaggcgatgggagccaggctggaactcggccaaccggccgaaggcgagttccgggcgagcattcggttttgatggaacactcaggctccccttcaaagaggggagctctattgtttcgcacgcaaaaatcacagacagactattgccttgcgggaaatcatcgttagattggcgagaggaatattgtcaatgcatacgaaacggaaaacatcgtgaccgcaccgaacacgcccgccgaaacctctgaccagctcaacaagcccgccaaatccggcaaactggaggtctccgacctcatcaccatcggcgtgtttgcggccctgtacttcgtgatggtgtgcatcgccacactggtgagcaccctgttcaccagcggcttcggctccatcttcctgcccgccggacgctcgattcgcgcgcgagactcttccttctgctggtggcgaacctcatgctgttcttccatgtagggctcgccacgcaaatcgtcatggtcgtgctgttcctgttgcccctgctggcggccgcccgatggcgaaccgcgttgaacttcggcgtgacctatgccgtactcaccgcgctgggaatgctcgaccccgatgccctgggactgccgtggctgcatgtggtctccgcgctggccgtggacgtcacgatgatgctgccctgtttcatcaccgactcgcatggctcaacggcgtggccgaccggtacgtggtattcgacggcggacatatcgtgcaggattacgaggccgatgaattcctgtccctctcccccggctgcgtggccgccatgggattgcgggcgtttgacttggaaccgtatcggcaccggattgcggccctggcttcaagcccgtccgccgaagacagcccgttccgctggctgctggccatcaaccctctgccttcgcgcaaggcgttcgccgagggcgggctgctcagccacctgcatttccagtacgccaacgatctgcacacgctcgtcgccacggatgaggccaccggcaccgagaccttgcgcaatccgcgttggtacgcacaccatgtgcgccaacgagggaaccaccgaggaccgttgcgccatcatccgtgcgttgcaccacttgcagtagatctggcaacatacggcggtatgacggctccccgctagtgaaacagcagcgcttcagtagccgtgcgagtacagatactcgtcatcgaagccgaaataatggccgatctcgtgcaacacggttttgcgaatctgttggcgtagctcggcccgtgttgagcatacgcgttcatgcgaccccttgaacagggtgatgacgtccggcatcacgccgctgtagcccgtggttcgcttcgtgatgggtatgccctcatacagtccgagcagctcaccgcacggattgctcattgtggccagttcgcgctcattgggttcgtccgcaacgacgatgccgacattctccagcacccgcgcaaaccgttcaggcaaatcatccaacacctgttcaatggcccgttcaaactcatcgtcaccgatgtgcatactcaatccttcacctgttgcttggcccccacgataacagacatattccgggttccggcttcttgcgggtgccataacgttgcgcggaacgcttccaatcattcattaggtcgattcttcattcattaggtcatgaggctgcgattgtcggtgttggaatggcaccattccagtggtgactgtcagagctcaccgacctaatgaatgaagaatcgacctaatgaatgcgtccggtcatatctcattgtgaaaatgacccggtattgcggtattccgcaattgcacttccaacgattctgaagtattcatccagattctgcgtggtagcgaacgttcttcttgtggcgggaaaagtcttatagcccgcgaaggagaggttgttccttttctcgatatctccttcccatcggtttcggtcatagtggtaccgtccgtcgtattccagaatcacatgatcattcggatacaccatgtccacaatcacttctttgttctgcaatgggaggtatatcggagcattcacctccaattcgggtaatccacgttttaccgattcaaggcgaaggatgctttcctgcggcgaatcggtgttctctctgcacaacgagagcgctttgcgaaataatctgatacctgggaatctacctatatcggcgaggaacaacgatatcttgtctttcgttgtctgtttcaaatgctcattacggcaggtggcccaatccaaggcaatgaccatactttccacatcgacgaactgtgcgatctgacacagcgcctgttccactgaaaccacggcgataagatcatcaatcatcgtctggtcaatgccatgaccccaataatggcattgcgtttcggtgagattcgacaatctttcagccccggacaccgtaacgtgcagtttgttggggtcatagttgggcttgtaattcagcgtggccgtcatgccagcaagctgtagcctggtgccatggctgaagcaaagctcctgtgaagtgcgcatcgatctggcacggcattgttccagtgttttctgggcgaggtctcgcgcctcatcaagtgtgaagaacgtgttgtatgcataggactccatgccatccccctgatggttgtatccgtgaaccgcgttattcacggatacaactcacgatggcataaccaacttctgcgcgcaaccagctcggccgaatcggtggatatgtgtataacctgccagctcagctgttgcggttgatttcgatgtcggtgacggtgaggttggcctcgttgatcaggttgaagaggatgacctcggccagcggaccgggctgcatgaaggtgtgctgcttggcttcggagacgtagtcgtggctatcacggtagaaggcggtgtcgatgccgcccggatagacggcgaccaccttgacgctggtgcccttgtatgcggcctgcagactcttggtatagcccttctcgccccacttggtggcgcagtacacgctttcgttcgcgttgccgcgcgtggcggcggtgctcatgatctgggcgattttcacgtcgcgctctccacaggccttgagggtttccaccgtccacagaatcatgcctttgagccccttgaggcatttgtcaatgtcagcggcttcataggcggtgggcaccttgaacgaaggctggccggcgttgttgatgagcaggtcgatgtggccgagcgcggcgatgctcgccacggattccttgacaaatgcttcgtcggtgatgtcgcctacgaaggcgcggtaggattcggctggccactgcgcgctcagctcggcctgacgttcggcgttgaagtcgatgccggccaccagccagcccttggcgatgagttggctggcgagctcgtagcccaaacccagcgcgctgccggtgacgatggcgatcttctggcctgttgtggttggcatggttgattcctttgcatgcttgcgagactcccctcagaccgcctacggcggccagctcccctcagcgaggggaacctagggttaacccgttctttgctgacagctcccggtaggggagccaagaggtaggactattcttcggctacgagttcgaggtacgaatcattccagaggtcttcgtcgccgtcgggcatgaggagcacgcgctcggggttgagcgcctcgacggcgccctcatcgtgggtgacgagcacgatggcgccctcatacttggcaatggccttcagaatctcctcacgggaggcgggatcgaggttgttggtgggctcgtcgagcagcagcacattggctcgcgaggtgaccagcgtggccaaggccagacgggtcttctcaccgccggaaagcacatgggccggtttcatcgcgtcatcgccggagaacaggaacgagccgagaatcgaacgggcctgcgtgttgtcgagctcgggcgccacatgctgcaggttctccaacacggtggcgttcagatccaaggtgtcgtgctcctgcgcgaagtagccgatcttgcagccgtgaccgtattccacggaaccggtgtccggctcctcgatgtgggccagcaggcgcagcgtggtggtcttgccggcaccgttgtagccgaggatcaccacacgcgagcccttgtcgatggccaggttcacgccggcgaacacgatgttggaaccgtaggccttggagatatccttggccatgatcggcgtgcggccgcagggcgcgggctcggggaaacggatgtccgccaccttctcggccttctgcgcctcggaggtgttttccagcagcttttcggcacggcgcatcatgttctgcgctgccacggccttggtggccttggcgtgcagccgaatgccttgcttcatgagacggtcggccttcttctcggccacttcgcgttcgcggcggcggcgctcctcgtccaccacgcgctggtgcaggtaggccttccagccgagcgaatacatgtcgatctggccgagctgcgcatccagatgccagaccttgttcaccacttcgtccagcagttcggtggagtgggagatgaccaggaagccaccctcgtacttcttcaagtagccgcgcagccattcgatggaatcggcatccaagtggttggtcggctcgtcgagaataagggtgtcggcgttggagaacaggatgcgcgccagctcgatgcggcggcgctggccaccggagagcgtgccgagctgctgctccatgacctcctgcggcaggccgagcgaggcggccatggaaatcgcctcggactgggccgcgtagccgccagccttgtcgaagtcctgcatggccttgtcgtaccgggtcatggccttgctcatcacgtccggatccgggtcggtcatatccttttcggccttgcgaatgcggctgatgatggtggcgatgtcacgcgcgctcatcatgcggtcgagcgcggtctgcgtgggatcggaggcgtgcgtgtcttgcggcaggtagccgagcttgccggagacgcgcaccttgccggcggtgggcagcatgtcgccggtgatcacgcgggtcagcgttgtcttgccggcaccgttgcggcccaccagaccgatcttgtctcccttggccacatggaagttggtggggtgaagcagcgtgcgcgcgccgatctgaatttcaagtccctgcacctcaatagccatgaataacctacttgcctgttacgaatactgtctcttaccaaagtccgactgtccatcatagcgaacaccatgccgaccgggctcagccgacgctcatgcgtccatacgcttatatgcccgtaggctcatgtaatacctgcaatgtgcgcgataagacagttgaatcgtgatttccgtcgtacactatccatatccgggcacgcttgcggcgcaatgcgtgtgcagtataggaaggatttcccgcatggaaccaaattatctcgtgttattgggaatcgtgatcgtgattgtgggtttcgccctcaaacttgatgcgattctgatcattatcgtggcggctgtggtgactgcgctggtcggcggcattggcgtcgacggcttcctgaccacgttgggtacgtcgttcgtctcgaaccgcagcatggcggttttcatcatcgtgttgctggtcaccggcacattggagcgcaacggtctgaaaaccgcagctgcgcagctgatcggcaaagtgaagaatgcgacgcccggtatggtgatcgccctgtatggtgtgatgcgtctcgtgttcgccgcgttcaacgtgagttttggtggcgtggccgggttcgtgcgtccggtcatcatgccgatggcggtgggtgcgattgcagcgtccggtcacgagccgaacgacgagtatgtggaagagctcaagggcatggcttccggcatggagaacgtcgcatggttctttggccaggtgctgttcgtgggtacggccggtgcgctgctcgtacagtccacgttgaagccgctgggttatgacgtcgaactgttgcgcatggccattatcgagattcctgtcgcggtgattgccgtggcggtcaccgccgtctattacatcatcaaggacacacgactgcgcaagaagtactacggtgccgaagccgccgctcaggccgccaccgctaccaccaccggcaaggaggcctgatatgtcgttcttcatggaccccagcgtgaccgttggcacgaaaatcctcgagttcttctatattttcatgggtttcatgtccgtgtatgcgggcgtacgcaacctactcgataaaaccaacaaggcccgctacggcactttcgtgttctggacggcgctcggtatcgtcatcgcgttcggccgttggattccggccattgcggacggcgtgctcattatcatcatggtcattcccgccatcttccgccaagtgcgtaagggctcggcatccgattcgagcgctcccagcaccgccgaagtggccgcgaacttccagcgcatcggcatgcgcatcttcattcccgccctgtgtctgggcgtgttcgccattatcggcgccctgattcccagcgtcagcgccctgaccggctgctgcatcggtgtgatgattgccgccgtgattctgttcgcgttctcgcatgacaacaagccggtcgtattcctcaacgattcggaacgcctgttgtctgccatgggtgcgctctgcatgctgccgatgctgctggccagtctcggcgcgattttcacagccgcaggtgtcggcgacgtgatcgccacgctggtcggcggcattattccgaagggcaacgtcacgctgggcatcatcgtattcggtgtgggcatgatgctgttcacgatgatcatgggcaatgccttcgccgcgattaccgtaatgaccgtgggcattggcgcgccattcgtgctcgccttcggtgcggacccggcggtgattggcattctggcgctgacctgtggctactgcggcacgctgtgcacgccgatggccgccaacttcaacatcgtgcccgtcgcgatgctcgatatgaaggaccgcatgggcgtgattaagaagcaggtgctgcccgcattggtgatgattgtggtgcagatcgtctatatgctgatcgcgcaataacctcgttgtccaaataccacaacaatccgtgaaataaggagctaatgatgagcaagattctggtgaccggattcgatccgttcggcggcgagccggttaaccccgcattcgaggcagtcaagctgttgccggatgaaatcgccggtgcgacagtggtgaaactggagattccgacggtgttcacgcgcagtgcgaccgtggttgaggaagccatggtgcgcgagcagcctgactatgtgctgtgcattggtcaggctggtggccgttcggctctgaccgtggagaaagtggccattaatttggccgaggcgcgtattcccgataatgatggcgagcagccgttcgatacgccgttgcgtgaggacggcgacaccgcgtatttcgccacgttgccggtcaaggccatggtcaggaacatcaatgaccacgggattcccgcattcatgtcgtatacggcaggcacgtatgtgtgcaacagcatcatgtataacgtgttgtatctgattgaccgcaaattccccggcgtcaagggcggcttcattcatgtgccgtatgcgaccgcgcagggcgtgggcaagccgaacggcacgccgaccatggaaatcgcgaccatggcgcgcggcatcgaagccgccatcgaggccgctgtgggcaccggaaccgacgccaccgacatcatgggcgaaacccactgatacgcataacgatgcccctgctgacagcagttgtcagcaggggcatcgttatgcgttgaacgttacagttcgcgcagctgggcggcgatctggatggattcgacgctggcctcggccttgttgcgcgtctcctgccattcggtagcgggcacggagtcgagcacaatgccggcaccggcctgcacgctcgcctcatggtcgcgcaggaacgcggtgcggatggcgatggccatgtccatgttgccagagagatcgaagtagccgacggtgccgccgtagatgccgcggtcggccggttccaactcgtcgatgatttcgactgcgcgcggctttggcgcgccggaaagcgtgccggccgggaacgcggacttgaacacatcgaatgcggtcagcgaggggtcgaccttgccggtgaccgtcgagcagatgtgcatgatgtggctgaaacgcttgatgtccatgagctgcacgacttccacggactgcggcacgcacaccttgctcaggtcgttgcgggacaggtcgacgagcatgatgtgctcgctgcgttccttcggatcggcaagcaattccttggcgaatttctcgtcttcctcaggggtggcgccgcgagggcgggatccggcaatcgggaaggtcatcgcgtggccgttgtccaccttgatgagggtttccgggctggagccgatcacgttgaagtcgcggccctgagcatcggtcaacgccatgaaatacatgtacgggctcgggttcagcgtgcgcaacacacggtacacgtcgaacgggtcggcaggcgaatcgatgtcgagacgctgggagatgaccacctggaacacgtcgccgtcgacgatgtgctgcttggcgcgttcgacggcctgctcgtagtggcttttctcggtgcggaagcgcagctcaggctgggcgaccgtttcgtccaagatgttgacgcgggactcgcccggagccggggtggcggcatcgtgctgcatctggtcgagtcgagcgacggcctcgttgtaggcgacgtcggcgcgggtggatttatcatccacgttcaccgcgttggcgatgagccacaccgaaccggatacgtggtcgaccacggcgatatcggtggccagggcgagcacggtctcaggctggccggtctcgtccggagcttcggcgcgcagggtcggttcccagtggcggatggcatcccagccgaccgtgccgaccagaccgctggtcaggttcggcaggccttccacatgcggggccttcagagtcttcaacgtggcgtgagcgacttcgaccacgtcaccggtgactggcacaccaaccgggaccttgcccagccagtcggcctgaccgttgttggagcgcagctgggccatcgagttgacgccgatgaagctgtaacggctccacgtgccgccgtattccgccgattcgaggatgaaggtgccggatcggccgccggcgagacgctcgtagaagccgaccggggtgagcgagtcggcgagtagacggcgcacgatcggaatcacacggtagccggcgtcggccagttcgtggaactggccgcgactgggccaggtggcgccccacttcaggtgtttgacgctgcattcgctcatattcgctcctttacttacaactcgatgtcttgtttcgtagtacgcggtcgttcggcttcccccagtcagggaagcccgttctactgctcggccgggcgatggccttcgaccacggacagggggccgccttcgaggaagcagctgcgcttgccggtgtggcaggcggcaccgacttggtctacttcgacgagcagtgcgtctccgtcgcaatccagggacacgcccttgacgtattgcacatggccggatgtatcacccttgcgccagtattcctgacgggaccgggaccagaaggtcacgcggccggtggtcagcgtgcggcgtaatgcctcgtcgttcatgtagccgaccatcagcacctcgtgtgtgtcgtactgctggatgacggcagcgaccaggcccttggcgtcacgcttcaggcgtgcggcaatacggggatcgagttcagtggaattgtcgtatgtagtgtctgtcatacctatcttccttatgtggaccaccctcagtcagcttcgctgacagctcccggattatgtgcgacatgtgcatagcgcactgctacgaacaatccactggattgttcgtccagcgggagcaaggtgtattcgtttagcgaacggtgtagccgtgcttcttgagttccgccttgacatcggcgatggtcaggatgccgtaatggaatacggatgcggccagcaccgcgtcggcacctgcttcgatggcgggcgggaagtcctcgaccttgccggcaccgccggaggcgatgatcggaatcttgacttccttgcgcacggcgcgaatcatctcgagatcaaagccttccttggtaccgtcggcgtccatcgagttaagcagaatctcgccggcgccaagctgctcggcgcgcttgacccaccagatggcatcaatgccggtggatttgcggccgcccatcgtggtgacctcgaagccggattgcgtgtgttgctcgcccttttcgcggcgggcgtccacggagagcaccagcacctggttgccgaaacggtcggccacgcggctgataagcgacgggtcattgatggccgccgtgttgacaccgaccttgtctgcaccgcagcgcagcagcgagtcgacgtcctcgggcgtgcgtacgccgccgcccacagtcatcggaatgaacacctgttcggcggtgcgggagaccacgtcaatcatcgtgttgcggtgggagctggatgcggtcacatccaggaaggtgatctcgtcggcgccctgacgatagtattcggccgccagctccaccgggtcgcccgcatccttgaggttttcgaaatgcacacccttcaccacgcgaccggcgtcaacgtccaggcacgggatgactcgtaccgccaacgacatgcttcactcccctgttcggctttgcattacagtccttcagactacctaccgcccgttacatgcgccgcacccgtttctggaatatgagaatccgagctgacgcgcccgctgagcgatctcaaggccgccggtgccaaggtgacgcttgccgccactaccttggacccgtgtgagacggtgcagcacgaccgctacgaaggcgagacgctgacgccggatgcgctgctgagcgacgtgcagaccgctgattatgacctactggtggtgcccggtggtacctgcaatgtggatcgtatccgcgtcaatgaggatgcgatcgcgctggcgcaggagttcgcgcacgaaggcaagccgatcgccgcgatctgtcatggcgcgtggctgctggtcaacgcgggtctggtggctggcaagaccgccgcgccctgccgttatatcgccgccgatatcgagaacgcgggcggccattacgtcgacgagcagctgcacgtggacgacgccaacggcttcaagctcatcacgtcccgcaagcccgctgatttggactacttcgtggacgcaatcaaggatgcgctgaagtaactaccgctccttagcggccaactgcccgcaggcaccgtcaatgtcctggccgcgggtgtcacgcagtgtggcggtgatgcccgcgcggtgcaggatctccaggaaccgctgttcgtcttccggcttggaggcggtccacttcgagccctcgatggggttgagtggaatcgggttgacgtgggcccagttgtcgccgtaatggttaagcctcttggccagcaactgcgcatgctcggcctggtcgttgatgccgcgcatcagcgcgtattcgatactgacgcggcgcttggaggccagccaataatcgtgcgcggcatccaacacctgcgtggtgttgaaacgcttgttcatcggcaccagctcgtcacgcagttcgtcgctgggggcatgcagggaaacggccagacgcacgggaatgccttcggcagtgagcttcttgatgccgggcaccacgcccaccgtggatacggtgatgttgcgcgcggaaatgccgaagccttcgggaggcatggcggaaatctgtcgtacggcggacagcacggagttgtagttgcccatcggctcgcccatgcccatgaacacgatgttgctcaggcggccctctcccccggccacttcgccgtcacgcatcattttggcggccacacgcacctgttcgattatttcaccggtggacatgttacgggtcaggccaagcttgccggtggcgcagaacgggcagcccatgccgcagccgacctgcgaggaaatgcacagcgtggtgcgggtcgggtatcgcataagcaccgattcgatgagggagccgtcgaacagcttccacaaggtcttgatggtggtgccttcgtccgccacttggcgggtcacctcggtgatgagctgcgggaagaacgcggcggcggcctcgctgcgcttggctgccggaaaatcagtgaattcggcggcattcacatcgaaatggccaaagtaatggttggcgagctgcttgactcggaacttcggcaatccgagttcggccgctttctcgatgcgctgctcgggcgtcatatccacaaagtgcagcggcggcttaccacggcgggcatggtccttggatagcacgtcacggaaggcacctgatgtgccgccgggagtaatgccggtttccggagtgtcaggatgctgtgtggtcatgatgggttcgcttcgctctcaatatcagaaaatagtcaaacatgcaatagaaatatcagaatccaccatacggcgtgccgcatacgaatcagatggcccatgtcttagcccatggcgaacgcatattgaacgatgattgcccccatatatgacatgtggcaccgtgcgatatacacacgatgccacattgttcatgcacgaggcatgcgaatcacagtccggtgacccacagcaaggcgcaggtgaacggtgcactcatcaaaatggaatccacacgatccatcacaccgccgtgtcccttgagcagatggcccatgtctttgatgccgatatcgcgcttgagcatggaagcacacaaatcaccgaacgtgcccacggcgccgatgagaatacccgccacgatcggcacccaccaacgagtggcccatttcgaggcatcatacgtgcatgcgaatacggcgaatgcgccagccatggcgaagagcatcgagccgatcaggccctcaacggacttcttcggcgagatacgcgggctgagcttgtgcttgccgagccaggcaccggcaaacaaaccacccgtatcggagagggcgggcaggaacaccagcatgatggcgtgtgcaatcggatgcccattgaaagtcagcgagatgatgatgcaactggccagcaacggaatgtacaacacggtaagcacggacacagccacatggctgagccgggaatgatgctgttccccgccctcatgattgaacgaggattcgaggcgcgcgctggcatccgtgttggacagtttgccggcaaccgccagagataggcggttgccgacgctgatttttgcgctggccgcgatggcgaccagaataatcgacacgatgatactcagcgacatcgtgatgagatggtacggggaataataggtggcgatgagggtgaaggacgcgcacagccacagcatgaacaccgggatgtgcaggcctacggtggcgaagtccaccctgagctcccacagcgccagaatcatgaacacgactaccagcagcacgaagaggtcgacgctgagcagcaggcacgcgacaataaggatgaccagtgccgcgcctgtggcgatggcctgcggcatgttgcggccggtcttcttgttgatccggtcgagcgtctcctcggcctcttcatggagttgttcgttgcgttccataattctccggacctggtctgaatcagacctccatgatctccttctgcttggtctccagcagagtatcgatctcgtcggtaacggacttggtgaccttgtcaagatccttcagcaggcgatcgccttcgtcctcacccatctcgccgtccttgacggccttgtcgatggtttccttggtcttacgacgaatgttgcgcacggcgaccttgccgtcctcggccttgcccttggcgagcttgacatactccttacgacggtcctcggtgagttccggcatggtcaggcggatgacgttgccatcacggttcgggctgatgccgaggtcggagttgcgcagggccttttcgacggcaccggcctgggaagcgtcaaacggggtgacggacagggtgcgcggttcgggaacgccgatggaggcgacggccttaatcggggtgggggcaccatagtagtccacggtgatgccgttgagcagggccgggtttgcgcgaccggtgcggatgccggagaagttttccttggtgttttccacggtcctggccatctgttccttggcctggtcgataagagacatattcactccttgtgtgttggtgttcgtctgtgttgttcgtctatgaacgtttgattcgattgtaggcgtttgcggcttactcggccacgcgcgattcggcggtggagaccagcgtaccgatttcatcgccgacgagggcgcgggtcacgttgcccggctcttcgaggccgaagacgcggatgcgcttcttgttgtcgcgggccatggacagtgcggaggcgtccatgactgccagattgtccacgagggcgcgattgtagctcagggtttcaaaacgcttggcgttctcgtccctgcgcgggtcggcggtgtagacgccgtcgacgccgttcttacccataagcacttcgtcgcagtggatttcgagggaacgctggatggaaaccgtgtcggtggagaagtacggcatgccggcaccggcgccgaaaatcaccacgcgacccttttcaaggtgacggatggccttgagcggaatatacggctcggcgacctgtcccatggtgatggcggtctgcacgcgggtggcctgaccctcctgctccaggaagtcctgcagggcgaggcagttcatcaccgtgccgagcatacccatgtagtcgccgcgggaacgatcgataccggcctgctgcagttcggcaccgcggaagaagttgccgccgccgaccacgatggccacctgcacaccctgttgtacggccggaacgatttcctcggcaatgcgacgaatcacatgggtatcgatgccgaccttgccaccaccgaatgcttcgccggacaacttgagcagaactctgcgcggcttgtcgctatcagtcatatcatgcctttctcaaaaccgaaagtgcgaaattatccgtagacaagcgtatcggtttacgacgacaccccctagcaacgacacccttggaatagcgaaacgccatccgattattgaataaccggatggcgtttcgttgaaattacgctaagcgcgtggagtaagccttaggctcactcctcttcgcccttgccgacctcgacacgggcgaatgcggtggcgttgccaccgacttccttgaacaggtcgccgacggtcttggacgggtccttgacgaacggctgctcgagcagcacgacttccttgaagaaagcgttgagacggccttcgacgatcttcggaacgatcttctccggcttgccctcggccagggacttctcggtggccacgcgacgctcggactcgaccacatcggccggaacgtcctcgcgggtcagccacttggcgcccatggcggagatctgcagagcagcttcgtgagccacggcggcgccggccttgtcggtggcgatcatggcgacgatgctcggcggcatctcggcggacttcttgtgagcgtagacttcgacgtgctcgccggagatcttggcgaactggccgaccttgacgtgctcaccgaacagggcggcggcctcctcgacagccagcttgacggtggtgtcgccggccttggcctcgagcagctcgtcagcggagttggcgtcggcgtccacggcgtagccgagaacttcctcggtgaactcgacgaacttcggggtcttggccacgaagtcggtctcggagttcagctcgacggcgtagccggtctcgccattggcggtctcgacgaccttggaggcgatggtgccttcctgagccttgcggccttcacgcttgccggctgcggcgatacccttggctcggatgatttccttggcgcgggcgacgtcgccttcggcttcggtcagagccttcttgacgtcgagcatgccggcgccggtgtcttcacgaacctgcttgatcagtgcggcggtaattgctgccattgattattctccttgagaaattttgcttacccatgaacgatgggaagcgcttattcaggcacttcccatcgtagagcatcactcggccttgggggcctcggcggtttcgccctcggcggcagccggagcggcggcttcagcggaagcctcggcaggagcctcgttggtcaggagttccttctcccaagcggccatcggctgctcggcggcttcgccctcggccttgttggcgccggagcgctccagcagaccttcggcgacggcgtcagccatcaggctggtcagcagttcgatgccgcggatggcgtcatcgttggccgggatcgggtactcaacggtgtccgggtcggcgttggtgtcgacgatggcgacaaccgggatacccagcttgtgagcttcctcaacagccagggcctccttggtgatgtcgacgacgaacatcgcggacggggtgcggttcatgttgcggataccgcccagctgcctgttgagcttgtccttctcgcgctcgagcaggaggagctccttcttggtcaggccggagccgtgcacgtcggtgaagtccatttcctcaagttccttgaggcggttgacgcgcttggagacggtctggaagttggtcagcatgccgccgagccaacgctcggagacgtaaggcatgttcacgcgggtggcctggttggcgatagcttcctgagcctgcttcttggtgccgacgaagagcacggtgccgttgtgggccacggtggtcttgatgaagtcgtacgccttgtcgatcatgtcgagcgacttgaacaggttgatgatgtggatgccgttgcgctgggtgaggatgaactgcttcatcttcgggttccaacgacgggtc

SEQ ID NO: 583 - DNA, 8817 bp, Unknown
  R48_24m  MAG No. k141_97283
tatgaacgtgcagaacccgtccgcatcgcgcggcatcgctattcaggccgtcgacttggtcaagaactacggcaccggcagcaatatggttcacgccctgcgcggcgtgaacgtgagtttcgaacgcggcaaattcaccgccatcatgggcccatccggttccggcaaatccacgctgatgcacacgctcgccggtctcgactccgccacttccggccatatcttgttcggcggcgccgacctgacccgcatggacgacaagcagctcaccttgctacgtcgccacaagatcggcttcatcttccaaagcttcaacctgttgcccatgttcaccgcagagcagaacatcctcatgccgctgactttggccggtgataagcccgaccgtgcctggttcgacctgctcgtagaaaccttgggactcaagcagcgcctgaaccaccgaccgaacgagctgtccggtggccagcagcagcgcgtggccatcgcccgcgcgctgattaccaagccgaagctggtgttcgctgacgagccgaccggcaacctcgactccgtttccagcgccgaagtgctcggcttcctgaagcgttcggtcaacgagcttggccaaaccatcgtcatggtcacgcacgatgcggtggccgcctcctacgccgaccgtgccatcgtattcgccgacggacagatcgtggccgatgaatcgaatcctactgccgaaacgatgaacgagctgcttatggccgaacgcgaacgcgccacgcgcactgccgtcaccagcacacgcgccgacacgctcgcccgtcttgccggcgtagaggatgtgcccaacctgcccatcaccgacgctccattgcccccagccgggagaaccggcaccatacgccatgcccgcgccgccgcacagcacactcgctgagccggaaagcgagagacaggatacccccatgttttccatcactctgaaacttatgaagaaaagcgccaggatgctgattccggcaggcatcgccatcctgatcggcactgcgttcatcgccgctaccttcctgttcggcaacgcgatgaacgatgcgcttgccgcccagaataccgcccagctcggcggcgcgaactacgtgatcagcccggatagcggcaaggacctgaccgataaggaccaggactacatctacacgcgcacggttaacgacttccagcttgaccgcatccgcgccaccaaaggcgtcaaggacgcacgtgccggctacgcgggttccgtgaccgtaacccgtggcaacaagcatgccagcagctacgtcatcaccaccgccacaaagcgcacgctgctgccggtcaccatcacgcaaggagaccagccggcggacagcaacgagatcgccctgaccaagtccgtagccgaccagctcggcgtcaaggtaggggaccgtgtgaccgtcaactcgcaggcggcgcagtatgcgggcaagaccggcgattcggccggtaataccggtgacgctggtgatgagtcggcccagaacgccgatggcacgagctcgcacgacggtgattccgatgccgcgtccggcgcgtccgccccatccgacggcaccgacacggccgccgactccggcatgaccgtgcgcgtggtcggcctcaccgacgacccgaacggtgcctacgcctactacggtggcgcttccgtgctttccgacaacgtcatcaccgcaatggccggcagcaacgatttcggcaacctgcctgtctacctcgtctatctcgacatcgacgatgccagcgacacggccgcggcatccaccgtaaaacaggtcagcacactgctccctaagcatttcagcgtgcaatcccgtgccgcgctcgtcgaggaatccgtcaaaagcatgagctcgggcgaaaccagcatcaccaccatcttcctgctgagcttcggcatgctcgccatgctggtcgcggcactcgtcatcgccaacaccttccaagtgctcgtggcacagcgccgccgcacactcgccctgctgcgcaccatcggcgcgaacaaaagccagctgtatgtctccgtgctgtttgaagccggtgtgctgggactgatcgcctccgcactgggagtgggcctgggcatcggactcatggccgcactatgccagtcgggcctgatgaaagccaccggcatgaccatgcgactggtactatccggtccggtgttcacggtgcctatggcattcggcatcattatgacggtgattgcctcgctaggctccgcgcgttccgctaccgccgtcaccccgctggaagcgttgcgacccatcgaactgaccgacacgcgacgggccggtgtggtccgcgccgtgattgctgtgctgctgattgcggccggtgcggcactgtgcgtgttctctgtatggcagatgtccgagaaaatcgccggacgtgattcaatggccgacaagcagtatccgctggtgttgctcgccgccatcatcggatgtgcattgatcttccttggactggtgctttccgccacgttctggctaccggtgctcatgcgcggcgtgggcgcgctggttgcactggccggtccgtccgccaaagtggcacatgcgaacattcagaagaacccgcgccgcgtggccgccaccggtgccgcactgcttatcggcgtgaccctggtctccaccatcgccaccggtgccgccagcgccaagcaaaccatgaacgaggcgctgaccacgcgctacagcgtcgacatgattgccgctggcgccgatatgactggcaaacaggccggcgaggcagccaaagtcaagggcgttcagagcagtatctacgcgccgacccgcatgatgaccatgaaggatgccgacggcaagagcctgagtgtgctggtcgtgggcgtggatggtgtcgacgcgctgcgcaaggtggtgcgctccgatttgtccggtgtgaccattgatggcgattccgtactgatgcccaagtattccgccgctacaggcaaggatattccgctggacaagagcgttacgttcacggctggagcggccgaagcacaagccgatgccgccaatggtccgtccggtaatgatgcgaacggcagcgccgaaaacggcaatggacaatccggcggcacacagacgctgacgctcaaaccgcggaaggtggactatcaccgcattgcctccaactacgccgcggtcgccttcgtggacgccagccacttcaccaacggtggaatcaaggccgacgggcatatcatgcttatgcgtattgacgccgagggcgcgggtgttgcgctgaacgacgtattcaccaacgtgcagaatgtgttctccgccagtgctggcgttaccgtgaccggtccggtggccgaacgtacgcaatgggagaccatgatcaacggcatgatggcattgttggtcggtttgattgcggtggctgtgctcatcgccttggtcggcgtagcgaacacgctgagtctgtcggtgatcgaacgcacacgcgaatccgccaccttgcgtgccatcggcatgacgcgcggccaactgcggcgctcgctggcggtggaggcgttgctgctttcgctcgtctccggcgtggtgggagtggtattgggtaccctgttcggctggctcggatcctacatggtgtttagtttgtacggcgacaccgtgttcccgttcgaatgggccaccaacggtgtggtgctcggcgtcgccgcgctcgccgctctgctggccagcgtggcacccgcccgccgggccgtcaaaacgccaccagttgaagccttggccgaagcgtagagcaataagctccctcatcagagggagcttttttgttacaccagcccgttatcgtacgcgaagactacagcctgtacgcggtcacgggcgttgattttggcgaggatatgcgccacgtgggttttgacggtgggaagggagataaagagcttgtccgcgatctcctgattgctcagaccatgggcgatctccaccagcacctcgcgttcacggtcggtaagcagatccagttcgggatcggtgtatgctgggcgtgacgtattggaaccgtcggaagcggccccggcaggggaggggatgccggtcatcgagccggcaccgttgccggccgcaccgccagagacgccgacggcggaaccgtacacggcaccggagcgcgcgacatcgccggtcagcgaaccatgctgcgcgtaaccgtcctgcatcatcttttcgatgagtcgcttggtggcggaaggcgcgataatcgcattgccttggaatacagtacgaatcgaattgagcaacgtttccggttcggtgtccttgagcaggaagcccgaggcgccggcattgatggccgccatcacatactcgtccaaatcgaacgtcgtcagaatgattacgcgcgtcggccggtcgtcagccgattcggccgagacggtcgcgttgtccggcgcggcggagagcgaggtaatacggctcgtggcctcaatgccatccatgccgggcatgcgcacatccatcagcaccacgtcgggatgcagggattccgccaacgccacggcttgggcgccgtcggacgcctgcccgaccacctccatatccggttgcgaaccaatgaccatggcaaaaccggcacgtaccagctcctggtcgtccgcaataatcacgcgaatgcttctgctctcgttcatgctctccactgtatccgtttcctatcggagcgccgctccataaacaccctgattgttccctgagttcttattgggcaagtctctcaccggggtaacgttcccgcgtgttgcatctgactatccaacgaagccgccggtcgcaactgcatatccggctgcacaccctcatgggcctcgtcgctgaacccggtttcacgcaacactctcaacagctgacgcatatgagccaatgcggcgcgcccccgagcaccaatcgcggcaaaagccgcttcaatctgcatactatcaggcgcaggttcggcgttgagcatcaccagtccctcgtcagcctgcgcaatcaccgattccagcgtggtcagtacttcggtttgcatcgccgcactaatacggttgcgctctaagttggccgccagcaccttttgccgctcctgctcggctcgcagcgcctcctcgcgtcgcaacagcaccagagcgtttgcgccacgcgaacggctccatcgagccatcgcaatgcaggcaaaaccggccaacatgattcccgcgcccggcagcaagccggacaaaaccagcctccattttgagagcatggaactaccatcgggcaaaaacagatggaacagctgactgtatccattccacccagccatcaccttgatgcccgcaagccacgaatcggctgccagcgccacgctcacccagcgccaagcggactctcgtccatacaataccgccgaatacacggataccatcgcaaacatattgatggtcaaaatcgatggcaagaacaacagttgcacagcagacagcaccgccatcgccagcgcgctgccctctgggaagcggcgacggaacgccaaaggcgagagcataataatcgtcagcgttatagtcggcacgcggttcggcgaatacggggcattgccgatcatttgcaaatcgccatacgtggcggaatcaaatagcgcaatcagcacgatagtggcgataacgtccatcagaagatagtgccgctcggtccactgcgcaaatcgacccacccagttcgactcatgcgtatctccttggtcgagtactttggggcgcgcccgatccatcaatcctcgtatacgcgagataacggttagcaccggatcctccgtatcggtgccagactgtggggcggcaggggagagcggaatcgttgccgccacaataaagccaccattcggccctgggccggcctgcacgctgccacccaacgactcaatgcgttcatgcataccaaccaatccgtatccgggcttatgaccgtctgctgcagacgtcgcgccacggccgttatcggatacggtaatcgacagcacatcgtttgaccagatttcatcgatggtggctttagcaccctcgcccgcatgtttgcgcgtattggtcagcgcttcctgcacaagacggaacacggcggtttccgcgtcggcggacagccggtcaggttgcgctttgccggtcatatgccgggacaccaccagatgaccgtcaaacagcgaatcgatgtcggcatatccggtactgccactcgcaccgaacacattgaacagacgctgcatatcatgctgcgcgcgttcggcctcatggcgaatcgtacccatcgtgtgcttggcgatggccagatcatgcgcacccgcataccggccgccatccgactgcacaataatcgtggagagcgtatgtgccaccacatcatgcatatcacgggcgatgcgtgcgcgttcggccagcgccgcgatgcgcgtctcctcggcctctttcgccacaatggaagcgttgcgctcgcgcatggccgccagcgtggcgttgcgcgctcgctgccacaaggccatgatgatgacgctcagcacgctcgattcgatgaacgccgcctccatgccgaagtcagcgagcatcttggccccgcagttgacggcgccgcttgcccccacgacgccggtgaccgccgggcatgtgggcatcgtgatggcatcggacagccagccgtcgcggatgacgcgcgaaccggaggaaggtccgtcgaacagcggacccacgttgaaagacaccgaccagaccatcgccgcgaccagtcccatgacgaacgccgtgacgatgaaccgccaggaatgtcggggattgccgtacagaatcaccgaatacaccatgatcagggcgtagaaatcgaaatacatgatcgccgggccgaacacaagatgcgtgatggtcagcgccacgaacagccaggccgccggctccgggcaatacctgcgcagcatcagcggcacgaagaccggcagcgaccacagcgtcatcgacgcctgagttgcgggaaacaatatgccgcccgtcgaatcagggctggtgacgccgatgaacggcacgcagccggcgatcagcgctgcggcgagcaacgtgtcccatagcagtgtgcgggtcgactcccgtgcgcaccatgccctcacgcgcgccataatctccataacgcgcaaggctagcgtgtccggcgacgaaccggtatcactcttcaggaggatttatggactagagtcttgaaccatgacaatgctgagcaaatactacgtgcccggactggccatagaggaccattccatcgatgttccgctcgactggaccggccatgagccaggccaagcgttcgacggcgaaaccatcaaactgttctatcgcgtggtcaccgcgcccgaacacgtgcatgacgacctgcccctgctgattttcctgcaaggcggtcccggcggtgccggcccgcgcctcaacagcccgacctccgacggatggatcgaggaggccatcaggcacttccgggtgatcctgcccgaccagcgcggcgccggccgctcctcgcgcgtggacacgcacgccatggcccgcatcgccgccgcgcacgacgatgatgccgcggccggcgcacgagcccaagccgactacctgaagaagttccttgccgattccatcgtgcgtgacttcgaacatctgcgcctgaccgaattcggtggccgcaagtgggtgacgatgggccaaagctacggcggcttcctgaccctgaccacactgtccctgttcccggccggcgtaatcgccagcttcaccaccggcggcatcccgcacgtgccggtcgacgccgctgaagtgtacgagcataccttcccgcgcatggtgcgcaagacgactcagttctacgagcgctacccacaggacaaggagcgcgtggccgccatcgccgacaagctgccgactactgcggaagtcgccgaattcgttggcaaactcaccgattccgtactgaatccgatggctggtaccgatgtggagcatcgacttggcgtgatcgccggcatggccgcccacggcttcccgctgatgccgaacggcgacccgctcaccgtcgaacgcttccagtgcttgggatccgactttggcatgaagccgagcttcgagcgtgtccattggattcttgacgacgccttccttgatggcgatggttccgcttctgccgactcgccgttgtctgacgaatttttgaccaaagtgatgaacgccacgtcgtcgcgcccactgtactggccgctgcaggagttcatctacgccaacggtgagcttgacgagcccattcgttgggccgcccagcgcgtgcgcgatggcaagcccgaattcggtgctgatgaacgcccgctcaacttcaccggcgaggccatgttcccgtggatgttcgaacaggagtctgcgttacgtccgttcaggccggccatggacctgctcatggaagacacgcacttcggcgtgatctatgacgaagaacagctggcccgcaatgaggtgccgttgcaggccgccgtctatttcgacgacatgtatgtcgattccggcctgcagctcgacaccttgagccgcgtgggtaacagccactactggaccaccaacgaattcgagcatgatggtctgcacggcccgctcgtcttcaagcatctctatgacgaagcccttaaccggtgcgacctcgaagaactgttcttactcaaggaagcaagctccctctgatgagggagctctgtatacatgcacgaaaggaaaacgtatgactcagaacctcacca

SEQ ID NO: 584 - DNA, 7905 bp, Unknown
  R48_24m  MAG No. k141_98035
gagtggacggcgtgccgccctggttaccggtatccaccctgttggcggcgtcctgctgctccttctggaactgacgattgtaggaatcgacctgggaagcgatcagtacggtctgggccgcctgcttggcggattgggaatccagactgtcgatcatggaagacagttcgtcacgccttgtttcgccctcctggcgtagcttgtccaaagcgtcacgttcgctttgcgcggtttcggcggcggtctgtgcggaagcggccttctcatcggcctgggtcttgagcacagcgatctgcttttcgatggccgccagacgttcgccacggttcttcgacgtgctcagtgaggtcgcggcggaggaagccgcattcgcctcgttgcgggacaacgcgtcccgggactgcatggagttgacgaagtcctgtgtgctggtggcacccgtcaccacgctcatcacgtcggaagcattcgagccgtgcatctcgtcacgggccagctgggccacggcggcgtgcgcgtcatcgtagtccttgccggtctgcttgatccgctcctcgagcgtctccttgtctttctgcgcggcggaaagacgtttggatgcggcgtcggcctcgtcctgagcggtggcggcatcctcgttggcctgcgtgaccttggcctgcgcggcgacaatcttgttgttggtcagatcgtccagctcaagtaccttattcgccaggtcctggctggcaccggccagctgctgcttgagttcggcctcgcgctgtaccgacgcggcgtgctggttctgcgcattgatcaggtcggaataggtgtctgcctgggcaggctgtgccgagctgaacgccagacctcccacacaggctgcggcggccaccagtgccgccagtgcgggcttgatcacacgtacgttcgtcatatgtgaatagtcctttcgctcacttaagccaataccataacatgcgaacctgagaggcttgcacacgatgtcatcacatttctcgcgggtaagccggtcgcgttacgccctcaaataacgccgcaacgagatggttgaagcgatgacggacagcagtatcgcgcccacaaccaggaacggcgatatcaccagtaccgtgagctgattcacataaggaatccatgtaacggatttcgccagccagccggtgacgaacacgttgacgatggccgaaagcatcaggcacgagagcaccgagccgatcagcgaggcgatggtgccctccagaatgaacggcagacgaatcgtccagttcgaggcacccacgtacctcatgatttcggtttcggttcgtctggatgcggcggacatacgaatggtggttccggtcagcaggatggcgaccaccaccatcacgccggcgagcacggccgtaaccgccgtggctcggttgagcacggcgaacaccgggtcgaagatctggcgctgatcggtaacgtcttccacaccctccttgccagagagcacttcggagaccacctgatatttggtggggtccttgagcttgagccagagggagtcctgcatatcgtccgcggtcagcgtacggccttggaattcaccgttcgggtactgcttggtgaaggtgttgtcgtagaaatcctgcttgctgacatagtcgatgttggagaccacgtcgttgagttcatcgcgaatggttttctgcagtgccgtgatctcattggctgagggcgatttgccggaagcacagttcgcggactggctggtgccgtcgggacatagccacaccacgacctcgaccttgtcgtaccagtcgcccttggctttggtgatctgcgcctgagtaagcaccgaagcgccgatgaacaggaatgagatgaaggtgaccagcgtcagcgacagcagcatcgacaggttacgggtgaggttggcccacgtttcggacagaatgaatcgtgctcgcatgatgatcccccttactccttcgcgccctcagcgggttgatcgtcggatgtttggtctgcggcggactgctcgtcagcaggctgctcggcggcggactgctcgttggccggcggtgcgggcggttccggcggtgcgggcggctccggcggggccggcggctcggcggcggatgacacggacgtatcggcaaccgcggcggtcgcggcggactcgtccttgaccaggtcgaacgcctgggtgctttccagggcggcggcctgctcatccaacggaatgcccttgccccaggtcagcgtgtcttccagcggcgcaaacgtctcgccatagcggccggtgcggccggaatgcacggaattggccaaacgggcgatgccttcagacggctcgtcactgccctcgatggccttggtcgccgccgccagcacatgatgggcggtgtcggacttggcttcgacttcggcatccgggaagaacagggcggaatcgtaggagccatgagcctcgtcacgcacgatcttgccgttgtgcagttcgaccacgcgcttgcgcatcgagttgacgatctcttcgttatgcgtggccatgacgatggtggtgccggtgcggttgatggcgtccagcacttccatgatgcccagcgaagtggtcgggtcgaggttgccggtgggctcgtcggccagcagaatctgcgggtgattcacgtaggcgcgggcgatggccacacgctgctgctcgccaccggagagctcatgcggatagttcttttccttgccggtgagtcccacggtattcagcaccttgggcaccaacgatttgatggtggaccgccgcgtgccgatcacctcaagggcgaacgccacgttctcccatacggttttgttattaagcagcttgtaatcctggaacacgaagcccagcgaacggcggtactgcggcacttgacggttggtgatgcgccgcagatcgttgccggccacgcgaatctcgccgctggtggcctcctcctcgcgcaacagcaggctcaagagcgtggtcttgccggagccggacgcacccacaaggaacacgaaatcaccgcgttcgatatcgaggttgatgtcgtcaagcgccggtcgggtgcctttgggatagatcttggacacattgtccagtgagatcagtgccataatgctgtttactcctcggtttcggtggcgcggcgctgttcatggcgccagcggatgccggcctcgatgaacgcgttgatgtcgccgtcgaacacggcctgagtctggctggtttcgtagccggtgcgcaggtccttgaccatctggtaggggtgcagcacgtaggagcgcatctgatcgccccagctggccttgatgtcgccggcgagctccttcttcttcttggcctcctcctcgtggcgcagcacgagcagtcgggactggagcacggccatggcggaggcacggttctgaatctgcgaacgctcatcctgcatggtcaccacgatgccggtgggaaggtgggtgatgcgcacagccgagtacgtggtgttcacgccctggccgccggggccggaggaacagtaggtgtccacgcggatgtccgtatccggaatgtcgatatggtcggtggcctcgaccagcggcaccacttccacggcggcgaagctggtctggcggcggccctggttgtcgaacggggagatacgtaccagacggtgggtgccgccctccacggacagacggccgtaagcgtagggggcgtccacctggaaggtggcggacttgatgcccgcctcttcggcgtaggaggtgtccatgaccttggccttgaagccgttacgctcgcagtagcgcaggtacatgcgcaacagcatctgcgcgaagtcggccgcgtcgacgccgccggcaccggagcggatggtcaccacggcggaacgttcgtcgtattcgccatcgagcagggtctggatctccatctggtcgagatccttctgaatctcgccgatttcgctttgcgcctcgtccagagagtcctggtcaccctcctcgtggccgagttcaacgagcgtttccacatcgtcgatgcgctgggaggcggagttcagacgcttcagctgcgattccgcggcggacagccggctggtgatcttctgggcgttttccggatcatcccacaggcccggggccgcggcctgcgtttcgagatccttgatatcggccttgagccggtcgacgtccagcgccttggcgatggattcgtatttggcgcgggcttcgccgatcgcctgggtaaagtcaaattctgccatcgtggtttaccttactgttgattctttgagattctttgggaagtcacgtccttgttgacagccttcgcacattcctctggcgttggcgggcattgccgcgccacacacgcatccgcctgcaatccatgctgccagaaggttccgggcctgccttgccgatagccggccgggcgacctcacaaatccctcgcatcagacgtgttcaactgcgggcacgaatatgcgaaggcaacgtcaaagccccgcgtaaatcgccgggatgatcagggagccgagcatggccacagctatgacgacacacaccacacgcacgacggtgcggcggcggttctcacgctgctgtcggccgtcctgatagttactcacgagaccaatagtgtactcaccgcttacgaccgcaggacttgccgccgacgccagccctgccggcgggcccccacggccctttcctttgcgctttcagcgccgccagatggtgtttcatggccaccagcatgatgtgcgaatcctcaaggcccaagtggcgttcgttgtgggcggaatcaagcgcgccctgacgtttggcgtaggcgtcgagcgtgttgtctccgtaaggatgctcgttggtgggcaccgcgccggggtcccactgccggctcatcggcagggtatcgatgatggtgatgcgcccggcacggtagctttccgcatatccggcgacgttcagcatgaaccagctatgttcgaaggtggcgttatgcgccacgtacggctgctgggtaagccgcgcgagcaggccggcctgggcttggggccattcgtcgaagagtcggtacccggcctcgctgctgcggccgcgtacatcgatgccggtgagtttggcgatgagggcgttgccgagcgccgcgttttccggcggcacgccaaaagcgagacgggactggccgtaggcgtcgccggcggcgtaatagccctgctcataggcgtatgtctcaggttcgccggccgggcgcggactggccatgttcatgaactcgaagccgacgtcgatgatgtagtcacgcgccggatcgatgccggtggtttcgatgtcgatgcccatcaccgcgtccacgtcgcggccgggcagataggcgtcgcgccagtcgggcttgggatggtggccggtagcgttgccagacgaggcggcaccacccggcgaagtcgcgccggagagattggcgcgggccatcgccgcatcgcccgcacgcttctggaagcgctgggccttacgtcgttcggcgcgtgcgtcaagaatcgccgccgtacggtcttggatatcgtccaaggcgactgttgtggggaacttgacatcgctgttttcggcagcagtgtttccggcagatgcgtcaccggtttcaccgctcagattcagcatgccttggtcatcgttcgatgggcggctgccggagtacggcctgagcacggcaacggtagtcctcccccgccgttcgcgactgaccacccataggtgttgctgttcgcccagatgcaacagcgtgttgatgttgtcgttgagccgacgattggcgtaggcgagcgcgcgaggcagacgataggagccgatgaatcgatcgtaatcggtcatgaatgtgctgttgcattgggcgatgattgattccagatgctcgcgtgtggcgtaatcgatcttcaatgcgtcgtggatagcttgtggcgtcagttccggttggtccaacccgagctgaggctgtgctgcggtttcgccatattgctcaccatctgcagcaagcgccagcaatacgctgatgccatgcatcaggtccagcgaacgcacccagtcccagtcaatggtggtgccgtcggcgtctttgggcatggacgccgcccattggggaatgtctcccttggcggcgtccagccatgtgcggtcgatcatagtgcgaagccgagttcttcggcggcctcggtgggtaccgggtcgtcgcaccaataatcctcgaggttttcggtggtggtcagcgaacggatttcggcgcgatcgatatacagttcgccgctcaaatgatcggtctcgtgctggaagatgcgtgcgggccagccgtgcaacggctcgctgtggtgcttgccgtcttcatcatcccattcggcggtgatgtcgagccaacgcttgcgcacggcctggtatccgtcgaagctcaggcagccttcgtagaacgaggcggttttgtcgctggtgggtttgtagcgcggattgatgatcacgtggaaggggaattccgcgatttcgcgcggatcatcctcgtcgtcgcgcacgtggtcttcgaccacggcgagcgcgagccccaagccgatctgggtggcggcgagccccacgccgggcgcctccagcatggtggtgtgcatcgtatcgatgagtttggcgagcgtacgcttggaaagctggccatggtaggccaccgtccgttggcgcaacaccggttcgccggcctgcacgatgggcaggagcttctccttgccgccggttttgatgagttgttcgacatcacggttgagttcgaggtcgactttggcgttctttccaaacattgcttttccttagggaagggtgctacagcgcgagttcttcggcgacgatcttggcgaggcgggtgcagacttcgtcggcgtaggcctgggtggcggcttcggccatcacgcgtacgagcggttcggtgccggaggggcgcagcagcacacggccggtgtctcccagcagttcctcctcgcgggccacggcatcctggatgcgcttgttggtggcggcggctttcttgtccacgttcggcacgttgatgagggtctgcggcagctgcgggaagtcggcggcgagctccttcaggctcttgccggacttgacgacctcgttgcacagggtcagtgcggtcagggtgccgtcgccggtggtggcgaattcgcggttgatcacgtggccggactgctcgccgccaagcgagtaatcgcccttgagcatttcctcaagcacgtaacgatcgcccacggcggtttccacggtcttgatgcccatgtctttcagggcgagcttcagaccgaggttgctcatcacggtgaccacgagggtgtcgtggttgagcttgccttcgcgctgcttggcacgggccagaatgcccatgatctggtcgccgttgatcatgttgccgtcttcgtccacggcgaggcaacggtcggcgtcgccgtcgaaggccacgcccatcacggcatcggtggccttgaccatggcctgcagctgctcggggtgggtggaaccggcgttcttgttgatgttgtagccgtccggcgaggcgttgatcacgattacatccgcaccggcacggcgcagggcttcgggagccaccacggaagtggcgccgttggcgcagtcggccacgatcttcaggcccttgagcggcttgggctgggttttgtcatcgttcagcggagcgatggtggccaccagatgatcgatgtacaggttggtggcggtggtctggtcgtggctcacgcggcccacgccggcaccggtcgggcggtcccagtcctggccgagcacggcctcgatgtcgtcttccttctggtcgggcagcttgaagccgccgcgtgcgaagaacttgatgccgttgtcgggcatcgggttgtgggaggcgga

SEQ ID NO: 585 - DNA, 6050 bp, Unknown
  R48_24m  MAG No. k141_98550
acgcaaggccggccactgggccgacccgaccgttgacgacgatcgccatgacgaaaccagtctgttcggccacggtgagtccagcgaagatggtgaaaccgaggaataaatgagcactccgagtcaggccgaggtgcggcgcatggtcgcagcagccggaaccattgtcgtgaaagtcggctccagctcgctgacccagccgagcggtcacctcgacccggacaagctcgacgctctggccgccgcccttgcccaaatacgactgatgggcgggcgtgtagtactggtttcctctggtgctattgcggccggcttcggcccgctgggctttgacgaacgcccggccgacgtggctactcagcaggccaccgcagcggtcggccaaggtttgcttatggctcgctacgagactgcttttggccgtttcggtattcgcgtcggccagattctgatcactgccgaagatacgattcgtgccacccagtaccgcaatgtggaacgcacgctggaccgtctgctcgacctcggcgtggtgccgattatcaacgaaaacgattcgttggcctcgaacgagattcgtttcggcgataacgatcgactctccgccttggtagccaatctggtgcgggccgaagccttggtgctactgaccgacgtggacgcgctgtacactgcaccgccctcgcagcccggctcccgccgtgtggaatatgtgccgaacgttatcgatgcacttggcgacatccaagtctccggctccggctccaaggtcggcaccggcggcatggtcaccaaactcgaggccgcgcgcgtggcggccgtctcgggcatccccacggtactcacctgcgcctcgaacgcgggcccggcgatgatgggcgatccggtgggcaccgtgttcgcaccggttaaggcccgcggctcatcacgccgtctgtggattggttttgccgccgacccgcgcggcacgattgtggtcgatgcgggtgccggccaggcgattcgcggcgggcgtgcctcgctgctggcggccggcgcgctcgaagtgcatggcgatttttccgccggcgatccggtctggatcgatgccgaaagcggcgaacacctggcccgaggcctcgccggcttcgattccgaagaaattccgcagatgctcgggcgtaacaccgcccaactcaagcgtttcctcggcccccagtacgcccacccactggttcatcgcgacaatcttgtacttgtgtgactgatgggatctgtcacacaacaggtttcatcaccatagtgcggctctggcgatttttcgtgctgtaggtttagcatggaagccatgactatggcgcaatggcagactctttccgaccgtatcaacactgtggcaccgagcgctacgctcgccgtcgattccaaggccaaggccatgaaggccgccggacttgacgttatcggcttcggcgcaggtgaaccgaatttcccgacccccgcaaacgtggtcaaggctgcggcagatgcctgccttgacccaaagaattacaagtacacgcctacgccgggcctgcccgagctgcgcgaagcgattgcggctaaggtgctgcgcgattccggctacgaggtgtccgccgaccaggttgtggtgaccaacggtggcaagcaggccgtgtatgaatccttccagatcttgctcaacgatggcgatgaggtcatcatccccgctccgtactggaccagctatcctgaagccgtcaaattggcgggtggcgtgccggtcgaagtattcgccggtgccgacgtgaacttcgagccctcgcttgaggcgctggaagcggcccgtaccgagcgtacgaaggcaatcatcgtcaactccccgaacaacccgaccggagccgtctggaagccggaaaccgtggaagcgatcggtcgttgggccgtcgagcaccacatctgggttatctccgacgagatctacgagcacctgaactacgacgacgcgcgcaccacctacattggtgccgccgtgccggaatgccgcgggcagctgctggtgctgaacggcgtggccaagacctatgcgatgcctggctggcgcgtgggctggatggtcgcgccgcttgaggtggccaaggccgccaccaagctgcaggggcatatgacctccaatgtggccaacatctcccagcgtgcggctctggccgccgtggctggcccgctggacgaggtgcatgagatgcgcaaggcgttcgatgcacgtcgccgcgcgatcgtggctgctctgaacgatattgagggcgttaactgcccgactccgaccggtgcgttctacgcttttgcggacatcaccgctttgcttggcaagccgctggggcccaacggcactgtgtccgatacgtccgctgattttgccgccgcactgttggatgaggcccacgtggccgccgtccctggtgaggccttcggtgctcccggttacctgcgtttctcctacgcactggccgacgaagacctagccgaaggcatgcgtcgattcaaggaatgggctaactgagaagagtcgtgtgccgcgcacatgccatgcgcgcgacacgcgatttgcgataatccaccggagccgttactataacaacttggcggtttcgccgtggcgaagcgttctctacggaatgcacgccgaggtggatcttcacctagggaagtggcgcaattggtagcgcaacggtctccaaaaccgtaggttgtgggttcgagtcccgccttccctgccaagttttcaataatcaagcagctgacgcgaggtacagaatggctaagacgaacaacagcgaaaaggtagtcaagccgaatgtcttcatgcgtatcggtctgtttatcaagcagatcatcgacgagcttcgcaaggtcgtaacccctactgccaaggaactgttcttctggtctctggctgtgtttatcttcgtgctgctgctgatggccctcgtcacgggcatggacttcggtctgggcaagctcgtgctgtgggtgttcggctgatccgcacaacctaaggtgaataacaacgcatgagtgatgaactgaatctcgagaatctcgacgccgtgccggctgaggagcctgttgtcgaggcttccgaagctgctgccgatgaggcagctgccccggctgaaccggttgctgacctttccgcagaatctgacgcatccgtcgacaatgcagatgttgagtccgccgctccggccgcgactgaatccgctcccgttgcttccactcagaccgagaccgtttctctggatgaggacgaggaagaagtcaacgaatccgagcaggccgaggaaaccgatgccggtcagcaggccgttgacgaattctccaagtccctgcgttcccttgatggcaagtggtatgtgctgcacacctactccggctacgagaagcgcgtgaagaccaatatcgagtcccgcgtcgcctccttcggcatggaagaccagatcttccaggtcgaggtgccgatggaagaagtcgagaagcacaccgaaaagggtaagaagatcatcacccgcgtgcgtgttcctggctctgtgctgattcgtatgtggccggatgagaacgcccgccgtatcgttcgcgaaaccgaaggcgtgaccggcttcgtcggcccgaccaaggatccggcgccgctctcccgcaaggaagtcgtggcgatgatggctccgatgatcgcttccgaggcactcaaggccgccggcgacaagcccgccgccgccaagaagcgcaaggtcgaagtctcctacgccgttggcgatcaggtcaccgtcaccgatgggcctttcgccaccatggccgccgttgtttccgacgtggagcccaccacccaaaagctcaccgtgctcgtgtccatcttcggccgtgatacgccggtggagcttggcttccaccaggttcagaagctggattaaccccaaactttgcagagcccgaccatcgtggtcgggctttttgcgttgtccgggtggatttgcataataggaaagcttgtgtctggagggaagacccgctagcacagcacagcaatataagttgcgggaggagaccgaccacaggccgattgcctacagcatgcacggataaataacgagtcaagaccgagcgtgatggcaggcaagcggatctgaggacggcgaccattcgaaccgcgttatagaaagaagaaccataatatggctcccaagaagaaagtctcggcgctgatcaagctccagatccaggctggcaaggccaacccggccccgccgctgggcccggctctgggttcgcatggcgtgaacatcatggacttctgcaaggcatacaatgcccagacgcaggacaagatgggtcaggtcatccctgtcgagatcaccgtttacgaagatcgttccttcaccttcgttctcaagaccccgccggctgcagctctgctgaagaaggctgctggcattgagaagggtaccgagaacccgctgacccacaaggtcggctctgtcaccaaggcgcaggttcgcgaaatcgctgagaccaagatggaagatctgtctgctcgcgatatcgaggccggcatgaagatcatcgagggcaccgctcgctcgatgggcatcacggttacggactgataaggagaaggacagatggtaaagcgttccaagaagtaccgcgaagccgctgagcgcgtcgatcgcaacaacctctacaccgccaacgaggccatcgctctgctcaagagcatgcctgcctacaacttcgaccagaccgtcgaggccgtgttccgtctgagcgtcgacccgcgtaaggccgaccagctcgtgcgcggtaccgtcaacctgcctcacggcactggtaagaccgccaaggtcctcgtgttcgcccgtggcccgaaggccaccgaggccaccgaggctggcgccgacatcgtcggtgatgacgacctgatcgcaaaggttcagggcggcttcctcgacttcgacgccgtggttgctactccggacatgatgggcaaggtcggccgtctgggccgtgtgctcggtccgcgtggcctgatgccgaaccccaagaccggcaccgtgaccatggatgtcaccaaggctgtcaaggacatcaagggcggcaagatcgagttccgtgtcgacaagaacggcaacctgagcttcctcatcggtaagatgagcttcgatgagtccgctctggacgagaacttcaaggctgtggccgacgaagtcaagcgtctgaagccgtccaccgtgaagggccgttacctgaccaaggcgaccatcacctccacgatgaacccgggcgttccggttgacccgaacaccctggcctgaggctagcgagcttcaatagctactgaaagggacttcccgtaaagggaagtccctttttgcatatgcgatgaccggttgcgagaaggtgaacctggatggtcacgcaatcgaattcttgcaacacgccggtgaacgcatgaatttgttacgcatcggcaatgcaaaacggattattctggtatcagaacagcgtaaataggctgtttgcgacacgccgaaggaaccgtgtgattgcaacgattcctgaggcttttgcgcgccttgatttgcgcgaatccaaacatgcgtgtaagttattcatctgttgccgctcagcgcggcgggttccttcttctggttggttttccgtcttgctggtgtggtggtggtttgagaactcaagagcgtgtttgtactacttctttatagtcaatgattgccagttcattcctcgcctgattgcctgttgtggtggtcgggtacccgggagggtttgatgaggggtgaggtttttttgagggcgtccttccttaaggacgtgctcgtcgattttttttgagagtcatctgtcgatgtctcttcgcatttttttgtggagggttcgattctggctcaggatgaacgctggcggcgtgcttaacacatgcaagtcgaacgggatccatcgggctttgcttggtggtgagagtggcgaacgggtgagtaatgcgtgaccgacctgcccca

SEQ ID NO: 586 - DNA, 8257 bp, Unknown
  R48_24m  MAG No. k141_98829
acgggtcgaaaatgtcggtgtggacgctgccgactattgtggtagccaagagaagcgatccgtttccgaggtgagattcgggaacggtccgactctcggcagtgatttatctacgcagacaagccaaaggagcctcgccatgattctcgtcaccaccaccccgtccgtcgacggatacaccatcaccaactaccagggcatcgtcttcggcgaagtggtatccggtgtgaacatgttcaaggatcttggcgcgggcctgcgtaacatgttcggcggccgcagccagggctatgaggaagagctgatgcgtgcccgcaacgaggccatcgccgagatgcagcagcgtgcggaggcgatgggcgcgcacgccgtggtcggcgtggacatcgactacgaggtgctcggcgccgacaacggtatgctgatggtcaccgcgtccggcaccgccgtgcagatcgcgcgtacggcctgagcctgccgagcttgggcccgagctcgtccaccgagccgggctttgtcggttatcgtgacgcattacactgacgctcatgaccatacgaatcgaagcatacgaccggttgcccgacgcggcccgcgccatccgcgagcaggtgttcatccgcgaacgcgactggcggccggaattcgatgaatgggatgccgcgtccgtgcatctgctggcgttcgattcggataatgatgcgcccaatcgccctggctcgtccgcgcaattggcctcacgcagccagtccattcagcccagccagaatcaccccgtagcgacctgtcggttctacgcggaccccgatcatcccgaccagcccgggcgatacatcatcgcgcgactggcggtgctgcccgaggcgcaaggcaggcacatcggctcgcggctgctggccgacgccgaacgccgcatcgcgcaagccggcggaaccatggccgccgtgcactcggagaacgaccactacaagttctacgaacagcgcggctaccggctcactgacgaggtctatgaaggcggccgtcacggctggctggtcaagaacctatctcgtaacgtatgaaggcccgcctcggtgctgggcgagcgaacctacagcgcgcagacaatcagataaatcgccacgacgtggcaggcatacccgatgaccgtgcccaagtgaaacacctcgtgaaactcgaaccagccgggcacggggttgggtctgcgcaacgcgaagcatacagcgccggcgatgtacgcggcgcctccgcacgcgatgagcacggtcggcgccgggcctactgcgggagccgtccagagctgcggaataagcgttaccggggccagtcccaacacgacgtatacggtggtgaacacccagttcggcgtccgcagccagacgatatgcagtatcgtgccaatcgccgcggtcgtccagattaccgtgagatatggccggcgaatcgccgggctgagcgcgaacagcacgggtgtgttggtgccggcgatgatgaggaagatgttcgaataatcgatgccgcacagcacgcgagtcaccttcgcgctgcgccatggcacgacgtgcagcagcgcgctgttgccgaacagcagcatggccgaggcgccgtacaccgcgcaggccgctttgaccgagccggccggcgcgatgcagatgagtacgatggacgccgcgatgcacagcggcagggtggcgaggtgaagccatccgcgcagtcgcggcttgcgattgccgaatgcatccacggggacgatctggcgcttgatcgccttcagtgcggccttggcttggcggtagcgcgattgcgcggccctgtatcgggccgatgcacggtccagtgcggtggggttggcgtttgcgctggatttttgactcgcggttgcggaaggcgcaactgttgcggcggaagccatggttcgtccagatggcgtgctgatggaaacgctcatactgatcacctcgctatggccggcgacgctctcccgaccactaacctacgctaccgtaacctagtataggcccgcgcaataatcaaggttgatttcgtaatgcttacagttcttccgtggtgcggtattcggtggtgcggttgcggaatacatcgccgagtctgtgaactcgtattatgcgtgtctgctgggtccgacttgtgtcggttcctgatttcggattgctgcgaatgatgctcccaacgccgccccgccagttgccggattcgtacggctcggccgttcggccgagctggtcgtcggtgactccagatacttcgttggtttcgtctcggttcatgatgttatgtaatgctagtttatggcggatggaaagttgaggaaagttaaatctgcttcatgggcttctctctgatctgtatttgtcccggttcatatgtcaatcgtttgacctgtcgaccggggcagaatccgctgtcccggtcggcgatttcggcttgttttcgtgaaccgggacactccggtttcctcaactcatatcgtctggcagacggaatcggcggaataaggccgattctggaattggcacgttgtcccggttttcgcataaatcgattgacatttataccggggcaacaaaaattgtcccggtttgcaaagatcgcccgaaatcgcgaaccgggacagcggattctggcctggcttgaacgtcaaacgattgatgcaggtaccgggacattttccgccacgaaagttgggccataagtctcaagtcctaaagccccccctgaaaaacggcgcttgcccggacaaagcaaaagggctggaaccttccgattccagccctttagttgctggtgcgagtggggggagttgaacccccacgagcatacactcactgccacctgaagacagcgcgtctaccattccgccacactcgcagacaatcgactaacttacacccggctgggtaatcatgcaatcttcggcgtgtcgcatgggaggcagggatatatcgcttgtgggtctcctgcgggcgccgtgatctttgagggtggcggcactcccctcagtcacttcgtgacagctcgtccgcaattaaggacgggccttgcctgcaacctgctggttcgactatcgtctcaccttcgactacaaacagcccactgggctgtttgcttaacgtctcagcctcagcgaggggagcagagagaagttcggcacaagccgcaacgaaggagaaaaactcacaaccctggccggcgctcgccgttgccgtagaagtgggccaacgcttcgtcgcggaactcatcaaagtatccgccgtcgatcgaggcgcggatgtcgtctagcagcttcacgaagaaatgctcgttatggatcgtggccaacgtaaacccgttgaactcgcgggcgcgcagcaggtggtcgacgtacgcgcgcgaataatgctggcatgtgtagcagtcgcatccctcctccagcggcccgaaatcgaacttatgctgggcgcgcttgatgttgtaccggccggcgcgcgtgtagatcgcgccgttgcgggcgcagcgcgcgggggccacgcagtcgaaggtgtcgccgccgttctccacgcacgcgaagatatcgtccacggaggcgatgcccagcacatggcgcgggcggttctccggcatcgcgtcgcagatccacgcgcaggtgtctccaatgatgcgcttctcgattgcgccgccgattcccacgccgtcgaagtccagcgaggcgatctgcgaggccgcgcgccggcgtagatcctcgtaattcgcgccctgcaccacgccatacagcgcctgatagggcttgcccagccgctcagccgtcagccgctggtgctcgtccacgcatcggcgggcccagcggaaggtgcgctccaccgagtcctcctggtaggagcgggtgttcatcagcgtggtgagttcgtcgaacgcgaacatgatgtctgcgccgattttgtgctggatgcccatcgaaatctcagcggagaaacgatgtgcgtcaccattcaaaggcgacttgaacgtcacgccgtcctcatccacccaggccatgcgctccttgcccttggcgatgatgtcgtccgacttcatgccggtcacgtccattgccagcgtcttcttgaagccgacgcccagcgacatcacttggaaaccgccagaatcggtgaacgtgggcccatcccagttcatgaaacgcgccaagccgccggccgcgtccagcacgtcctcgcccgggcgctcgaacaggtggaaggcgttggccagcaggcactgtgcgcctagatccttcatctgctcgggcagcacggccttcatcgcggcttgcgtgcccaccggcacgaaggcaggcgtgcgaatatcgccgtggggcgtgtgaatgatgccggtgcggccgtatcgggcaccgtctcgcccaagcccgctggccgtggatggcaggcgggtgatcgtttcgaaatggaaggcgctgcggtcgccgggctgtccgggctgtgcgcccaacggatgttcaagaaggctgatcgtcatatgttcactttaggcagaagggccagaaaagggccggaaattgtgaagaactcggtttcgaggggcggatttcgccgctcccgaacgtctacttccgcttcaaggggctcccggtcaagtaggccggctgcaaaaatggcggaatggcgttaaatgagggcccttgatactcggaattgaccgcgcgaacagccccttgaagtgcaagtagatgttcccgaaacaggaaatcagcccctcgaagccgagatgcccataagactctgcgatgattacgcatagactttcaatcaacgttcagaaaacctccagattgactgcctttactactgaggtagcacacgagaagtggcaatgggcaagtgcccgaatagccgccgaacagacgtgataggaatttaggaaaaggagcagcaatggctgacgaatttaacccgcagggcgtcgaccagaccccgcggaataacgaaaaccccaatagtactgccgataccggcaacgccgagccgaagaacccgtttgtgggtggcgactcggttgatgccggcaacgccagcgattccagcgagcagcaagccccggtttcctcggccgccctcgctgccgatcagcagcctacgcaagccgctaccgacactgccgccaccgagcccatcccggactacgcctccgccaagggcgagagcacggtggtctcctcctcgccggcttctccggcagcaccggccgcaggccagacctcggccacaactccgctgtatcgtccggccccggaatatggcgcttatggtccgaccccgactcaggcacagggccagcagggcggccaggccggcagcaatgcccagcccacgcagcaattcccgttcggtcagcctgcacagcaaaccccacagggccagcagggcaaccgcaatccctactacaccaataacccgcagccgcagggcaacggcaatccgttcaatccgcccacgcagccgcagcagaacaacggcaacccgtttgccagccagtccggtcagaatggccggaatggccagcagccccagcagggcggtctgttcggtttcggcactcccggtaccggtacgccgaacggtcaaggcccggcccagccgggacagcccggtcagcccggccccgccaagcagggcatgtccaagacggcgagcaacatcctcatcgccgtggtcgccgccgttctggctgcgggcctctgcctgggcctcggctacggcgccctcaccagcggcctgatcaccttgccgaccagcaattcgctgtccaacgtcagctcgaataagtccggctccgggtccgccaccgccaagagcggcgaagcccccgactggcagactgtcgccagcgatgtctccggctccgtggtctccatccagaccgcgttgagcaacggcaccgccaagggctccggcgccatcatcgacaccgaaggccacatcatcaccaacaaccacgtgatctccggtgcccagcagattcaggtgacgcttgccaacggcaacatgtattccgccacgctcgtcggcaccgacaccaccaccgatcttgcggtcatcaagctcgacaacccgccgagcgacctcaaggccgtgaaattcgccgattccgacaagctcgccgtcggcgagaacgtgatggccatcggcaacccgctcggctacgacgacaccgccaccaccggcatcgtctccgccctgaaccgcccggtgaccgtgaccgacgacaacaacaacgagatcgtcaccaacgccgtccagatcgacgcggccatcaaccccggcaactccggcggcccgaccttcaacgcggccggccaggtgatcggcatcaactcgtccatcgcctcgaccgccacctcatccgactccgcgggttcgatcggcatcggcttcgccatcccgtccaacctcgtcaagcgtgtggccgacgaaatcatcaaggacggcaaggtcaagcacgttgccctcggcgtggtcatcaagtccgacacggttgaagccgacggcgtgacccgcggcggcgcgaccatcaccaagtccagcgccactggcagcgcggtcgtctccggcggcccggccgacaaggccggcctcaaggagggcgacaccatcgtggccttcaacggcaacgcggtgaacaacaactattcgctgcttggttacgttcgtgccgcggctttgggagacaaggtgacgctgaccatcgtgcgcgacggcaagaccatggatgtggacgtgacgctcgatcaggaggagtcgtcggtgaacggttcgtccagctccgattccaacggcaacagccagaataagcagaacaaccagaacggcaacggccggaatggttacggcaatggcaacggcaacaacgatggcggcaccggtgatggcggcggcttctccgacccgttcggcctgtggtaaagctggttcagcgcgtcacacggcgttgagcggtaaccgttgaacgccgtgtcagataggcaaaggtccgcagcagtgagcaactcctgctgcgggcctttcgtatacgctattgtgccctgcgcccatgccgccaacgtagtttcgatatccggcatgtcgcgcaacgctcgttgatagggtaggtcaagcactgagttcgggcggcgctccgaacaaagcgcataattcaatacaaaactgaacatttctttacgccgtgtatcggaaggtcgcgcgggagccgagcaaagcgaagccccaggcaaagccgccggtgggttaacaaggcgtgaccgcagcgccgattgcgcgggccacgcttgccgtaccgcaatcgactccgtatacgagcgtaaggagcaatgatgggcgcactcatcagattcttcaccaaaattctcgacatctgcaagcttgtgccgatgcttccggtcgtcgtcatcgccgcagttccgctggctttactaggcgattggcgtccgtggggcaatgcgatggcgattccggtacttggcaatccgggcttcggccagtggctggttatcgcattggtgctgattatcgtgattgacactgtgcgcggcatgattgacgatttgcgccacgggcaggtcggagtcgatgtgctggccgtggtcgcgatcctctccaccgtggccgtcgccgaatactgggcaagttgggcggtgacgctgatgatcacgtccggcgaggccattgaggaatacgctcaagccaaggccgagcgcagtctgaccgcgcttatggaagccgcgccgcagaccgcgcacgtcgtcaacctgcctggtgtggggcgtgggtttgctgccgataaaggcgattcgtccgatggcttccggcgtgtgggcttggcgtcgactgccgccgccgcgcaccgcttcgacacggtgccggtcgagcaggtgcagctgggcgacgtacttatggtgctgccgggcgaaaccgtgccggtggacggcgagctgctgtccggcacggccacgctcgacctgagcaatatcaatggcgagccggtgccgcgtgaagtgttcgccggcgcccgcgtgatgtccggcgcggtgaacggctcgaccgcattgaccatgcgtgccacccaagtggccgccgattcgcagtaccagcgcatcctcgagctcgtggcctccgcgcaggaatcgcggccagccgtggtgaaaaccgcagaccgcttggccgtgccctttaccgtgctctcgctggtgatcgccggcatcgcatgg

SEQ ID NO: 587 - DNA, 12622 bp, Unknown
  R48_24m  MAG No. k141_98872
gagtgaagccagtcatcgttgaatagcctttcttaatgattgttgaatcttgcgattgttgaattgttgcttattgagtttttagataaaagttttaagaatgctgcccgaaacggaaaaaggggaaacgcttcgggcagcacgatttagttgtgtttttgccgattttggcggttgcgctcaggcgtttgctttagctgcggcttgggccttgagctgcttatcggtgtagaacggatcaccgccgacttcctggtcgtccttcttgatcacgaagaagccgtagattagggcggccagcacgatgccggagatggtgaagaaggtcggacggtcgcccatggcgtcatgcagggcgcccatcggggtggagaagatcacctggccgatttgggaagcgatctggaagcccaccatgtacagggttgccgacagtttggtgtcgaagtgcagggtgaagtagcggaatgccggtaggcagaacagcggaacctcgatggagtggaacagtttgacgatggagacactgaccggatcgtggaacacgccgcacagaccgatacgcaggaacatcacggttgcgccgagcagcagggagttacgaacgccgatcttcttcatgataatcggaacgacgcccatcatggcggactcgaggaacacctggaaggagttcagggtgccgtaagtggcgttgccgatttcggtggtcgggaagagggaagcgtagtagttagggaacatctgctggtcgaacacggtgtagaaggtgttggtgaacagcatgaagacgatgagcacccacagagtcggcatcttcagaacggagatcatctctttgaaggatgggttggttggagccgcgttcggatcggcttctttcttgagctcttccttctgctcgaccggaacccagaaagcgtagacgcacagcatgccaaggccgcagatggagccgacccagaagttcagcagcgggttgatattgaacaggaaacctgcgcacagtgccacgatggcgtagccgaaggagccccaagcgcgggactggccgtattcgaagccgaacttacgggagtagcgttcggtgagcgcttcgaacagggagcagccggccatgaagcctgaggagagcacgatggagccgatgagcacgccgatgaaacgggtggtgccgccggcagtcagcatcggggcatacacgaactgtacgaacgggccgacgagcgctgcgatggcggagacgaagatcacgagcttgcgcttgatgcccagctgatcttggatggcaccataggcgaacatgatgaccagggttgccaaggagttaatggagtagatctggccctgctctgcggaggtcatgcccagaccgtgggtcgggtcggtgagccagcgggagaggaaggaccaccagatgccccaggagcagaagaacatgaagatgccgaaagagctctgcagataggaaggattcttccatgcggatttggttgcacttgccataatcatcctttgattactacttggttggttattggttatgtgacgctcctgctcgggcggctgtgcctttgtagaagttgttgtgtagtaattactatgcgacgtcaatcgatttacgtcaatcgattgacgtcatcggcgtgtcgtacccgttcgagacgcaaaaaggcctccgtgctgaacggaggccttgagaaatcgcgtgggcctcggttacttcaccgaggccttttcgatcagcgtgcagtggatcttcgccggaatcggcgcgtcgatcggcggcaggggagcggtggtcgctggccgtgagacgtcgtccatcgagcgtccttcgataattgacaccagcttggccacggcccagtagcccatctcgaaatgcggcagttccacagtggtgagcatcggttccagcgtttcggcgaacacgcgatggttgtccacgccgatcacggagatgtccttgccgaccgtgagtcctcggcgtgcggcgcattcgtacacataccaggcgcgggcatcgttgaagcagaagaatccgtccggatgctcggcgtcgaacaaatcgctgactgcggtcagtgccggcccgttattgagcacattgacgaccagacgatcgtcatagtcgaggcaggcgtccctgagcgccgcctgatagccttccaaacgaccatcctgcgcaatcatcggttccgagcaacccacataggcgatacgtgcgcatccggccttaaccaatctggtggtggcgtcgtagccgatttggaactcgtccggttccacgctcgggattttgccaagcgagtcggtggcatccaccaacaccagtggcgtcttggccagcgaagaaggcgcatgggtgatgcggttcgacatcttggcgtacaggaaaccgtcggtgccgtatcgcttgagtgcggcgatttcctcgctctcgctgttctcaccgtcggtgctcacggtgatgagcatatagccgaactggcttgcggcggtctgcgcgcccagaatcataccgccggcgtacggggtggtgaccacctcctcactgatgaaaccgaggatgtgcgtcttgcctgtacgcagcgaactggccagcggattcgaccggtagccgagcttggtggcgatggcgcgcacattgtccgcaatttcggactttacgcgcccctcgtcgcgtccgttgagcaccagcgacaccgtagagacggaaacccccgccttgttcgcgatttccttcatcgtagccatgcgtcaaacgatacaccctaattgacggactgtcgggaaagtatcagtgttctccaccgactccgccgaggttgcgcaccgcaccgatgaataatggtatgccgtccggggtgacgtacgaatacaggaatgggcgatccaccgtgaactcgatgttgtccaccggcgcgctagtgaagtctgcgccggctttggtgaaggacatgaccttggcgccggcctcgttcacctcgatgcgcgtgccttgcagaatcgaaccgatatacagattctcgccgtgcgaatcggtgtcgaccatcttggtgaagtcggcgtcgcctgcactgaacgcatcggtcacccccagtttttcgaatgccttgatggtggcttccgagtcgaacatgctgtcgatggtgaatcgcggtagcgtgacgttcaccgtggccgagttgacggagacgccccatccgggcagactgtccgcggtgcaacccattgcgtcctcgccaggggatgccgacgaacacgtgccgaacgcccatccgagtttctcggcattgccggccagctcgtcgaaatgccctttggccggcagcacgatggccagattgccgctgttgtcgaatggaatctccacccgctgccaagtgttgtactcatcatggctgtaagtcatttggctgaaggtccggtgcatcatcggcacctgagcatctccggcttcgccgtggaaggtgccgtcgccggtggactgctcttcgaacggatccttccagcggccatccgcatagacggtgttgatgatggacaggacttcacggtcacgcagcgtgatcttcggcttgagcgaaccattcgtatgcttggcaatccaatcggacatcttggcggcggcctgatcgtcgaacggtagcgtggtgacttcggcctcgaatatcttcttgacggtggattggtaatcgctggcaagagagtagtcgttatcgatccacagcgagttcgcggcgctcatctcggatttcgcccccgaatattgcccgttgatcgaactcagcagcgattggtagtcgctgtcggccagcgaaccggagcccagcagctcattcagttgcgagcgggtcgtgccattggcgccctgcgcggcgatggccaacgccatccacatcgaagcaggggagtagttcacattgccggtgtctcggtcgccggtttccatcgccaggaattccggtgcggtgcggtaggcgaaggctgcggtgctgtcgactaccggctgcgtggcaggcgtggccttcggcttgaacatattgcgaaccagtacgctgccatcgccggccgtccaccatacgccgccggcgacggcaaggtcaagcactactgtcacgatggcggcgatacaagcgttacggcgtttgcgttgtttgcgcaaccggtactgttccatcagtttctcactcatggtcagcccctttgcttggatcggctcgtgcatcattgcacgaagcccctgattccagtatattttggtctctcttattttgtgcgacgagccacaatccaccgcacggcccacaccacgccgaatccgaggaagctcgccacggcgaacacgatgacgaaatgcaagacctgatccatcgagccccaggagaggtatcggtcgccgatcagcgtgcaggtacttcctatcgggcacgtgtcttcatacaccgtgatgagcgccatgagcatcggcgcaggtaccagtgtgcacgccaacgggaacagcaggcttttccacggatacgtcagtgaggccgggcgtagcgcgtagatgccgttgatgaccagcaaggcgggcggaatcacaaaattgattagcaacgcggcggccatcgcagccatgccgccccgtaaggtcagcgccaatagcaagccgtacatgattgccgtcgccagccagcagccgaagcgaatcgcatcctgacgaatccatgtgagcagtcgtccgctcgccgtctgcggattcggatccacaaacaattcgcgcagaccgtagcgtccgattgcatagcagatgaacgcaacggccgtataacagatcaacagcatggccgagccgatcaacgaatgaaccaatagctgatggccgctttcagcgtgcattagcttccaccactgagcccaggaacggtatgggaaccccggccgtaagcgaagattggtacagccgaatgccagcggtccgatgattgcgctcgccaatgggaaagacagactgccggatcgtatcgaaccgagtatcaggttggtgattcccaacaccaatggccagtgcagaaccataccggggaaccatacgaacaggtttttggcagccctgtcaaggacctcgtcgggcatgagatacattgatgagctccactgcagcagcaacaacaccgctatcagtacaaccatgccaatccaatgcgcgcggttccacgcgaatattcgttgcgtcccgcgctcggcggcggcattgcgcatatcgctcctgttgagcttgctgagtgcttgtgcacggttcattgcagtcctcctttaccgccttgtcaaggattgatgatgattccatcgtaaatcgcgcaggaaatgtggaatgatagttgtcatagtgaccatgacatgtcaggacggagcagttcggcgtcgggcacactgaaggggtgaatgtaatgggagaagcgcgcaaccgcaacatacgcatcggcattgtggacaatgacccgtatgcgctgaaagtgttcggcgcgctaatcgagcgcatgtccagcgattttgccgtgatatggacctgcgatttgggtgccgtggccatcagccgatgcctgagccccaccaagcggcctgacgtgctggttacggatatgtctatgggcgacgtgcccggtaccgaagtctgtcgtgcgattcgtaccaaaacacccgaggttgggctggtgggtgtcacctcatacgcgctcgcgtcatttcacgacgaggcggctcgctgcggggcgcaggccttggttggtaaaaccgatttgaacggcattgcgctcgctattcgcaatgcagcccaaggattgtcgaccaatgagctggtactgggagatgaggggagcggtaattcgctgtccttcatggatgccgcaaccgcctacgcggtgctcgaagatacgtcatacgcgcaccgtggcgcgctttccggcaaagaacgcgacaccctgcgtatgtatgcggatgggtcgaccaccaaggaaatcgccgagcgattgggcatcagcgtggccactgtggcgacttttgaacgccgcgcactcgccaaactcggcgctcgcagtcgcgctcatgccatatcgatctgcgtgaaacggcatgagatttaagagttggcatgggcggtatgtgcaacggcatggatggtaggaaaggaactgctatgaaagcgttacgacaccgattggccgagctggatagcggtgttcgcaatgcatggctgttgattgccgtactggttgttgccttgatatgcacgatggaaaccatggcgggcttggctgctgacagtgtctcggcggcggactgccttgcggagttcatattcgttgccattgtggggtggatggcgtttcgtccggtcaccggatgcgtggcggtagcggtggcttggatagtgttgtgcatgagtccgatctggatgccgtcgggtgcaatgctcgccgtgttattggcggtgggtattgccggatacgccgataagcgattggcgctggcggttgccggcattgccgttgtggtgtggatgttgtcgcgtggtggcgtggccattccttggcttgatggcggctcagacacgatgagcggttctgcggatggcgcggcgagtagtagtgccctaaacggtagtgttgctgatggtggcgctgctgatggtggctcttcatccagtgggtctgacagcgcagggcagtcgggaagcgacttcaccggaagcgcctatgaatcgagcggttcttctgccgagcatcgcactgggcaagtgattcttggtgcgattgccctctatggtgtgatgccagtggccgtgttgtttattggcttcatgcttggtggcatggcggcgcgatggaatcatgaacgcagcttggctcgagcggagttggctcaccgccgtcagcaggaacgcacagctcaggacattcacgattacgtatccaatgatttggcatacctgattttgcgattcgacaaggatattgccgatggcaagaccccttctgaagaagaattacgcgaactgcgtagcgtggctatgggcgcattggatcgcacgcatcaggtcattgatgttattgaaggcaggggagaagcggcgcacagtgcagtgactccgcatgattcgaccgttgatgccgcttctggcattgcatgtggcatcacagacgctgattgcccgctagccgagcaaattcgtgatgttgcgagcaatggtgaccgccgattatcagagcttggctttgaaggtcagacgattatttccggtgctcatggcgcagccggtcggagtggcctgatcgccgggctgctggaggaactgtacggcaacatcgccaaacatgccgacccggaagcgggctatgtaatgacgattggcatcggactggacaccgtccgcatcgcctgcatcgacacggcccgcacgtcatcggattcggatgcggatggcagtgcggacctatccaccggtaccggtctcaaccgttaccgacaattactagaacaacaaaacggcgccctgcatatcaccacgcaagacgccgaatggacattatcagcagttattccactgtgaggaaaccgatcacccaaccgacttctgcgcagtctccgcgccaaagaagccgacaatcagcatcgatgcaatagcaattgcgctgatggccacaaagatggacgtggcaccaagcgaggtaagcatccaacccaccaccataggcatcaacacattgagcagcttggccacggcgttcgcgaagccgacgcaacggaagcgaaccttggtggcgaacagttccggagcgtacacagccaccacggaagccataagcacgtacaggcacatcatgagcaggaagccaacgataattgcgctcacggtagaggtctggaaggcatacattaaaccgaacacgccagtgaacaggaaggccggcacaatcgtgcgcttgcggccgatgcggtcgataagcagagagccaatcaggcagccgaccggggcaccgagcatcatcgccgtggaggtgagcagcgagctggacaggttaataccacgcttgaccagaatcgtcggaacccaagaagtgaaggcgtaggagcacacgttcgtggcggccacagcaaccacagctacaagcaggcagatgccgagcgaacggccgccggcgttgcgggtgtcgctggtgtcggccttggcggctgcgtcgatcagttcggagccgttggcctcaagctgcttgacgatggcgtcggcctcatcgtaacggccgtgcacggcgagccaacgcggggattcggggatgtcgcggcgcagccaccagatgatggcggcccccagaccgatggccacgaacagcggacgccaggaccagcgggggatgatccatgcacacagcagcatagcgatcggcacaccgcagttggccacgagcgagacaatcgcgcaccagtggccacggcggttcatcggtgcgaactcgttgaccatggcgaagccggtgacgatttcagcgccgaggcccaggccggcacccagacggcacagggacagcacggccatgttcggggcgaatgcgccgaggaaggtgaagccgccaaacagcagcaggttgatttggtaagccacgcggcggcccttcaggtcaccgacgaagccggccagcagcgaaccgaccagcagacccaggaagcctgcggacataaaggtggaattttgcgcaacggtggaccagtgtgtggccaacgcgctggaggcaacggcgctgccaatatatacgtcgatgctgtccatcagcatgccagcggcgaccagcgccacgatgcgatggaacatcggggtttcatgtgcgcgatccacgcgcgagataatatcctgaaccttggcttgatccgtcacggtggtacgtgcttgtgcgctttccatagccgcgggattgccggaaatctgctgttcagcagcagtcatatttgagccctcttcttgcaaacctgcccgcgtgcaactgctcaatgatgttgcggcgagcgaactcttgattggactgcgtgttccgttcgccctcccattgtgtgggatgaacgacgtttgcagtccaagtcttgaattccacgtagcgagccaatcgttgtgagatagctcactacatggggcttaactataggttcgatcttgtggcacgccgcgttgcggtcacattgtgaacgataacagagtttgtaacgctcctatatatgccccacttacgctcttaccccgttgaaagaaggcagaaccgtgattcccatggggcggtaaaacactcatggggcggtatttggcccatggggcggttagcggattttgcctttccgcagaatagagccgttttcgcctaccgccccatgagggttttaccgccccatgagatatttaccgccctatgggtgagttaccgccccatgaaacgtgtaataacaaagcatgcccttgctggtggaagcgatgctttgctatttcgcctgcttgtcggcgaggatctcatccaccagcttgggcttttcggtcagctggccggtgaagccgggacggatatccatgtgcagcaccagagaagtgcggtagccctgctcggcgagcttcttggcggcctcaccggccaccttgagcacgtcgtccagattgccttccacgttggtgaacagggcgttggtttcctgcggcagggcggattcgcgaatcacttcgacggcctgagccacgtatggtgaaacctcggagcccacgccattggccgacacctggatggctgccacggtgttgaggtacggtttgccggtttccgggtcgatcggcacttcctgagtaacggcattacggtcaagaaccatgattctcctttttcagtagtgttaagctcccctggcaaggggagcttaacaaccacacttatgtcagcgatacttccagaaatgatccatcgggccggagccgtggccgagattcagctgggtcttcagcgcaccggtcaggtacttcttcgcatgcttgatggccttgggcagcgtgtcgccaagcgccagatacgaggcgatggcggagctcagcgtgcatccggtgccgtgcgtgttcggattattgatacgcgcgccatcaaaccaggtcacggttccatccgtctcggcaagcacatcgttggcatcctcggcgccatgaccacccttgaccagcgcggcacagccgtaacgctccacgatgcggtgggcggcggcctccatatcctcctgatcgcgaatcagcgtatcggtcagtacttcggcctcgggaatgttcggagtcacgaccgtagccatcgggaacagcttgccggtcaaggccgcaatggcatcgtcactgatgagcttggcaccggaagtggccaccataaccgggtcgagcacgatgttcgtggcgtgatggaaggtgagtcgttcagcaatgacgtcgatgatgtcagtggcagacaccatgccgattttcaccgcgaccggcggaatatcctcaaacaccatgttgatctggtcggcgagaatgtccggtttggtgtcctgaatggaacgcacgccggtggtgttctgtgcggtgagcgcggtgatggcgctcatgccgaacacgccgcaagccagcatggtcttcagatcggcctgcatgccggcaccaccggacgagtcggagccggagatcgcgagaacagcgggaagtgtagatgttgcaatctgtgccatagtgttcattctaagtggggcccatgatgtttttcggagcggttttccttgatgttttgccgctcctgtggtgagatgggagggtttgctgattgcgattgattcatgaaatgttcgggaggggacatggctgataacgatgtactgcgccgtgacggcgtcttggtacgcatcaccggttttgacgatgaacgcaccgcatattttggcgtaatgcctaatgggcacaccacacagctcacatttccgcgtcaggaggtgttcgatgtgggcgacgtgttgctcgtcggcacggatttctatcgtaaagtgccgcatgatgtgtggccgttgaagccccgtgtgggcatcgtgcgccgtgcgctcaacgaaggcgtggtcctggagacttccgacggcctcgaactgcttgaaggcgattacccgaattcgatcatgcccggcaacaccgtgcagttcaccgacctgttcggcatcgaacgagtgctgtggcccacggccatccgcccaggcgaatccgatcacgatgacgacatcaagcagtaccgcatcacgccgggcagcgatccgtcgcttaccttcgattcgttcggcggttatgagcaggtgatcacgcgcgccaaggagcttatcgaaacgcagctgggcaacagtgcgcagatgcgtgcgatcggtgccaagcccatcaagggcgtgatcttcaccggtgctccgggcaccggcaaaacgcatctggcccgcatcatcgccaatgtggcggacgcgcagttctatctggtgtccggcccgaccatcgtgagcaagtatgtgggcgatagtgaggaaacgctgcgcatgattttcgccgccgcgcaggcggacaagcgcgccatcatcttctttgatgagatcgattcgattgcgtcctcgcgcgagaacgataccaatggcgtcggcaagcgcttggtggcgcagttgctgacgttgatggatggtttcgagtccaagggcaatgttgtggtggtcgctgcgaccaatcgtattgaggacgtggatcccgctttgttgcgtccgggccgtttcgactggcagattcctttcccgatgccgtctgagcgcgaccgtttgggcattctgcaggtgcaggcccgttcgttgtcaatcgagggcgaactgccgttggtggatatcgcacagcggaccgaaggctggagcggcgccgaagtgtgcgccatctggaccgaggccgctctggtggccgccaaggaccgccgcggcgcgatccgtgctgccgacctcgtcaccgccttcgagcgagtcgagcgtcgtcccgaattaagacaccaccgggcataataattggctcccctcagagaggggagccagagaggtttactcctgggcggtggagtagagcttgccgccttgggcggtgtacttttcgctcatcgcatccatgccggcgaggatttcttcggggctgagcacgttggcggacaccacgtcgttatcgacattggccttggccttagccagtgcctcggagtcgatgccagcagcagcctccttcacgatttgctgctgagcggcctcgccaccgaatgccttgcggatgttctgggagatggccatcgagcagaacttcgggccgcacatcgagcagaagtgcgccatcttggccggctcggcgggcagggtgtcatcgtggaaggcgatggcggtgtccggatcgtaggacagattgaactggtcgagccaacggaactcgaagcgagccttggaaatcgcattgtcacgatccatcgcgtgcgggtggtgcttggcgatgtctgcggcgtggcaggcgatcttgtaggcgatcacgccctgcttcacatcatcc

SEQ ID NO: 588 - DNA, 25526 bp, Unknown
  R14_15m  MAG No. k141_318
cgccaagccgttcctggtgcagggtactgccaccatcaccgatgacgcccttgaccaagccgccgccgactacgtttcggcgattctggactgaatggagctgaggccaggtgcgcgatacacctggccttattgtttttcacggatgagccgcagctctctccctcagtctcactgccgctcgacagctccctcttcagagggagcttgtttcctgtaaacttactggttacttcttgagcggcacgtagattacgttgtcgatgagctcctgatagtgcttgacgatttgcgcgcgacgagtcttcagactcggagtgagcataccgttggcttcggtgaactcatcgggcagaatctcaaacttacgaatcgattcggcacgcgagacaccttcgttagcggcattcaccacacgctcaacttcggcatgaacaatggcgttcttggccaaggcatccaaatccggctccggcttggcaccttgggattccagccaattgttggcatccaccaaatccagcgtgaccaaggcagccacgaacggcttcttgtctccaataaccaagcactggttgaccaccggagaggtcatcacagaagcctccagaaggccaggcgacacgttcttgccgccagcggtgatgatgaggtccttcttacggccagtgatggaaatgaatccgtcttcggaaatatcacccaaatcaccggtatgtagccaaccatcagtgatctgctgggtagtgacctcagggttgttgtggtatcccttgcacaccagcggtcccttgactaccagctcaccatcctcggcgatgccggcggtgatgccgcacatcggcatgccgatggtgccgatgcgattgtcttccggcaagctcacgcacaccggaccacaggtttccgtcatgccgtagccttccagcaccggcatgccaatgccgttgaagaagtgagagagctcggaatccatcggggctccaccggtgatggcaaagtcggcgttcgggccaaagatggtacgaatcttcttgtacaccacctgcccgtagaaagcgtgagcaatacgaccgggaagcggcagcttctcgcccttctgctcggccttggaccattcacgcgcgttttcggcggcgcgcatgaacatcttgcccgcaaaaccgctgccggcacgctgggaagcggcgttgtagaccttttcgtacacacgcggcacggcaagcagcagcgtgggaccaaaggtctcgaagtccttgaccatggtcttcatattggagctcagggccagagaaatggtgccgccaaaactgaagaattccaggaatcgggcgaacacatggctcaggggcaggaacagcagcagacggcggttgggccatgcgccggcacgaggcatgtactgcaggccggagcgcaccaggaacgcgaagttgcggtgggtgagctccacgcctttcggggtgccggtggagccggacgtgtaaacgatggtggcgcggtcgtcgccgtgggaggcgctcttgtattcccagaattcggcatcggtgacgctttcgccataggtcttgatggcgttcaggccgcctgcttcgatgacgaacacgttgcgcagggtgggcacctcgctgcgcacggattcaatcttgtcgcgctgaccgtcatcctcggcgatggcgagcgtgaccttggaatcgttgaaaatccagctgacctggctggcggagttggtctcatataccggcacggtgagtgcgccgatggacatgatcgccatatccagagcggtccactcccaacgcgtgcgagacacgatggccacggagtcgcccttgttgacgcccagaccaatcaggcctttggccagatcgatgaccatgtcgcggaagacctgggcgctgtacggccgccaggtgccatcctcagttttatattcgatcatggcgccatcgggatcgcgcttggctcgctcatcgagcaaatcgaacaggttgatgtcgctgtcaatcggctccttgacgggattggtgaactgcttgacgatacgagtatcgtttatggccttatcagcgatgttttcagtcatactccccatgtaactccacggatgctacaaaacacgcgcgaaacaacggattgtccagaccaaatggccccggcaatccgttatttcgggcaaaccaggtaaatctgtcgcaccgtacattcagcagattactcggcggagtcattggcctttttcagctcgtcgcgaatctcctgcagcgtggcgagagtctgctcttcaacgctaggcccctgttcttcagcgtcagcctcatcctgggcagcagtgagatcacgaagcttattaatcggcaaaatcacacaaaaatacaccgccacgccaacaagcaggaagctaatcagcgcgttaagaatcgcaccaaatgaaacagtcgagttgttgaacgtgatggtcagcagtccggaaagatccggtacgccgccaatcatgccgattaatggactgatgagattgtcgacgatggaattgaccacagcggtaacggcagagcccatcaccacacctaccgccatatcaatcatcgatccgcgcgacaggaatttcttaaagccattcaacggacctttatcggtcaaagcaacaactttgcgagcggttcctcccgtggccttggcaaagtcggtggcaatattcatgggattgtggttactcataacggcactccttacgaaattcagacacttcacttgtatccgactggttttcccacgactccattatgccgcttgttggaatatccctataccactgcggcgttcccgtacatgactatgtacgagaacgccgccaaccctgcttgcagagaacctgttagagctgcttagaactgaatgtaatcgacttccgtatgttcgccggtttccaagtatttcgccacatcatcaggaccgacgaacaccagttcgaccgcttgcgcaatcatcagattgacacgatccattggcgtaaggttttcgaaatagccgtacaccgggattcccagcgcatgcgcatatccgatttcgaacatcgtgcccgggtcctcgtccataagattggcgaccacggctttagcagcattaatgccatggatatcatccgcaaaacatccttcagggccgacttcttcgatctggctgacaaaccgcggcttgaacaataccttgccatgatcttccagtatcttttccaaacgttccatacttgccgtttgctcaggatcgaagaacggaccggccacatagaagtcatactgtttgtcttcactcatggtctctagtcatagcgcagccgcgtcggacgccagccgttattttcactgtatggacaaggggtcgtatcgtgaacattactacgggataaccgtcaatgactacgtacgttgcccccgatcagcacactccgccactttcgccccctcccgtatcgtcgagcacgcgaaccaagccgaccaaatagccgccatcccatgcgctgattaccgtatccgaatgctgcaatgccttgaacaaccgttcgggccactgcgccgattcccaaccaaccgacttgaacagcgcctcaacctgttcgacagtaaaccgcttctcttccgtgtattcgatagccatggaccctcacgataaccgtgaagccccacatgtctttgcatagtttcacatgacgggatgatggatggtggaacctatacgtttacacatgcctaatgcctatggctcatcaccgatgaatagaggctgagataccgtcatgtttccgaagccaagtgcccgagatcggattcgaaccgacgacacccgctttaggagagcggtgctctatccactgagctactcgggcaacgacgtttcattgtacacggccgcacgcccagtcgcatcatgttcgcgtggcagcctacataagacgcatggcagtctgtgtaagctacctggcagaacccgccaccaaggcatggccggttttcgtgctggtttggtgcgaactgctcttgcgcacggcgaaaagacactgaaagacaagccgcacacggtacagtggcaaatcgcacgaaaagcaaggtaacagtaaacaagccggaggaaagggcagcatggcaaaggcacggagtactaccacaggtgcaagcgtacgagctcgcgccgctgccaagccacgctctgccaaagccacggcacgcccagtatccaagtctgccgtgaagccacacaaacggcatcgtctgcttggttttctcgccacgatgttcgcgcttcttgcccttgccggcactgccgcccgcgcgctgcctgccgatttacaggaactgccatttgtgccgattgtggtatcggcaacgccctggttcacgttgcttggcctgattgccctactgttggccatcgtgtcgcggcgtatccttgccgcactaatcgccatcgccgcaatcgcatgcaatggctattggcaatatccgttcttctactcgaccgacccactcccccaagccgcgcagaacgccgtggctgcggcctcccccaacaccagcgatgcctacgcgcgcgtcatgaccttcaatgtatacaaggggcaggccgacccacaagccatcgtcgaactagtccgcgatcagcgcgtcgaagtgctcgctttgcaggagaccaccgaggatttcgtcaaaaaactcaacgaggctggcattgagcactatctgccgtatgcgcaggtctcatcgtctgacggcgtattcggtaacggcctctggtcggccacgccacttgccgatccggccgacgatgacgtgaattccagcgcctcattcatgcccggcggcacggtggatatgggtggtcagcagattcgattcgtatccgtgcacaccaccgctcccgtacccggctattggcggcagtggaagcgatcgctggatgagttgggtccgatgcgcgggcatacggatacacggtatattttcatgggcgatttcaatgccacttacgatcacacgccattccgtgattttcttggcgaccggttcgtggatgccgcacgtgaatccggacatgggtttacgttttcgtggcctacgaaccgcgtgtatatgccgatgttcgccggtattgaccacgtggtgcttgatcagggcatgaaggccgggcaatgcaaggtggtcaaagtcgagggctccgatcatgcggcgttgttggctaccgtggcggttgggtgatttcgtattcctcggccagccgcatacactgggacacggcttccagaatcgcctcgatgccggacttcttgattgagccgtcatcctttaaatacttcatcaggcgcactgtggatttggtgctggcctcggggtcagggcgagcgccgggagcggcgtcgacgataagcatgtggatagtgttcgaaccgatatcaagcacaccaagtcgcgtggtgcgcgaacgcagattgaccatgatccctattcccgaccttacctaacccgtgatggccgaacaacgggccgaccatcgcaatcagccagccgtgcgccaccatggcgagtcgttcggccggcaaccaacaccgcgaggccagccgaacatcacacaaactcgactactgtacaacaatcacaccggctgccgcgccgttcacaacgattcgacgaacgttccgagacgttccagcccctcggtcagggcctcacgtgaggcggcatagctcaggcgcacatgcgtatccgctgtggccgcaccgaagtcgcggccaggagtcagagccacatgggcttcatccagcgcgcgttcgcagaacgtccaggcatccagaccagtacgggagatgttgaagtaggcgtagaacgcgccattcggctccacctcaaccggcaaaccgatgcgcttgagcccgtcaatcacaatgcggcgacgggcaagcaattcctgacgacgagcttcacattcggccaaactctccggcgtaaaacaggcgagcgccgcatgctgggtgggcgtgtgggcgcacaggtagtagttggtggccaggtcgtcgaccgcttccagcacggtggggtcgtcgggcagaatagcccagccgagacgccagccggtcatgccgaagaacttggagaagctgttgcacacgatggcaccgggatcgcaggccagtacggacttgacttcggtgccgtccggctcacggtcggccaaatcaaggtaggtttcgtccacgatgcgccatgcgccgcggctggcggccagcttgcacaccttgtccaatacgttgaagtcgatggtggtgccggtggggttggacggcgacgtgatcattacggccttggtcttgcttgtccagtactggctgcacaggtcggcggtcaggtggaagcgggtggcggccgaggtcggaacgtcgatgacccgcccctcaaaggagcgcacaagttcgcggttgcacgggtaggaggggtcggccacaatcacatcgtcaccggggtccacggtcagcgcggtggccaacagcagggcggccgaaccgccggcggtcacgcagatacgcttggggtcgatgtcaaggtcatgacgctcgcggtagaagtcggcgatggcttgacgcagttcaggtaggcccatggcggcggtgtacggcagggcccggccgtcgtactgttcgcgcatggcgtcgcgtacggcgggcggcgcgccgaaatcgggctcgccaaggcttaatttgatgacgctgataccttgggcgatcatcttgtctgcttgttcgccgaataccatggcacggaagggattggcctcacgcgctcggcgggacatgactggagacgcggccggagattggggctgctgctgcgctgcttcgttttccatatttcggttctatccgcctcacgggacaaggtttcttcttctataatcactgtaggtcgattgagtgtaccaacccgtattcaaggaggaataatgagtcgattcaatggcaaacgcgccgagttcgaggccagcggcgaaaagatcaacgtcgcgattctgggtgcgggccgcatagctcacaccatggccgacaccctgacccagatggctgaaggttcactgtattcctcatggattcacccgtatgcggtagcggcccgtgatattacgcgcgcgcaggcttttgccgaccaatggcattttgacaaggcttatggatcgtatgaggagttgacggcggacccggatgtggatctggtgtatatcgccaccccgcacagtctgcacgccgaacaggcgatcctgtgtatgaaagccggcaagaacgtgctggtggagaagtcgttcaccgcgaacgccgggcaggcgcgtgaggcgctggccgtggccgaggaaaccggcatgctgtgcacggaggccatctggacgcgctacatgcccagccgcaagctcatcaacgaagttatcgagtccggcgagatcggcgaggtgaaagcggcgagcgccaacctgtgctatccggtgtccggcaaggcacgtatgaccgatccggcctgtgccggtggcgcgctgctcgatgtgggcgtgtatccgctgaacttcctggatatggcgatcggtgccgaccatggccgcacgctggatcatttcgatacgtcgatgatggccgccgaaaccggtgtggatgcacagaattccaccacgttgtattacgatgatggcacgatggccgtgtccaccagttcgatgctggtttcctccgatcgcggcggctacgtgtggggcaccgaagggtatttggtggtcaccaatatcaacaatcccgagtccatcgatatctacaacaacgatcacaagcccgtgcgcagtgttgcggtgccgtcgcagttgaccggttatgagtatgaggtggccgatgcagccaacgcgctgctggatggcaagatcgaatgcgaggcgatgccgcacgccgacaccatccgcatcatggagctgatggatgcgattcgcgaccgttggggcctgaagttcccgtttgaggtctgatttcagctcccctccagaggggagctgaaattattccgctgaatctgcatctccttcaacaatctgctcatacagccgtgcgaggcgttcgtcacgcacggctttcgttaattcgcactcccatacggtaattacacgccagccggcggcctccagttcagcccgctgcgcgatgtctcgattgtgattgcgcagtagcttcgtctgccagaattccacattcgatttcggcatcgaatgtttggaacagccttcatgcatatgccagaaacagccgttgatgaacacgatggtgtggtatttcggcagtactacatccgggtggccggggtaacgcttgtcgttcttgcggaatcgcaaacccttgcgaaacagatagctgcgtaccagcacctcgattttggtgtctttgccacgaatatgcgacatcgtgtacgaacgggtgccccgctcatacttctccactggctgtttcttgcgattcacgcactccagactaccgtgacgttgcggcgaggatgaaagcctgaacgaacaatcacccatcttgcccgtccgtgtctcttatcgcgggcaatgatcatctgccggtcgagactgcacgattagactgaatcaaatggatgacatgatgattcgtagggccacggcggccgatattccccaaatcgacgaactgctgcggcaggtgctcgaagtgcatcatgccggccgaccggatctgttcaaaggcggtgtcaagaaatacacggacgaggaattgaaggcgattctggccaacgatcagacccctgtgttcgtggcggttgcgctatctgccaatgacggcactgacgtcgaacataacgccgactcccccgccaccgaccaagtgcaatggcatagcgccaagcgacgtctgctttgcgagatttgcgagagatgaatgcgataccagcgttcatggctatgctccttaatccaatatcaatggatgaacctgccctgccccgtatgtcaccatcataatatatcgaatatcaatataaaaatatcgaaaatcactttcaccattcacccacacacatcgcgacgtgatcgaccgttcttgccttgctcgcagcatccacgaccaacacgggaaagtcactttaaaaaagcactttatcaatgtggataactcggaagctagaaccacatacccccgttcagcttgccaatcagaaacctcatcccataccgtcagatgcacccgcacgcaacgacgcgtcagacaacagaaagaaggaccaatgaacatctctacgtttacccacaactcccacccggcaattcggcatacgcattttgtctagtgcgagattgagagttatgatgacacgaagaaaactcatcatcaagaaacttcggcaagcggcaaagcagcgagggctcgatttctatttgttacggcaaggcagcagacatgaggtttactgcctggacgggttgaggatacccatcccccgccataatgaagtctcagaacgaaccacgctggatatcatcaacgagagcgagcagaaactcggaaaggggtggtggcaatgagcaactatgacgtgcttgtgcaacccgatggccgatattggtacgttcaggtaccagctatcgaacggtcgacccaggccaaaggacttgacgatatcgagccaatggctaaagatctcatcactgtcatgaacgacgacgacaatccggagctcaaggtgacgtttgtgttgccgaaacaagccaaacaacacgtaacagaaatgttccggcagcgcgaaatagcaaaaaaagccaacgcacaagcggctgccgaatcccgactcgccgcacgggccctacgcaacgagggactcacgtatcgacaaatcggagctttattgggggtctcctaccaacgagcatttcaattggtcaacggcaaaacaaagcacaaaacgacagcgtccgaatcgcctcagccaacaactgaatcacgctccccacgcacgcaccatgccacaccgctatcgactccggtctcggcttagcgaacgggtccacaaagcccagactgtttccatcaccaagctcaagagcaccgagcaggatcttctcatcccagcagattgaggagatcgtccttggtgagggtggcgatggaggcgggggcttcggtgagggcgctggcaccggtgccggcttcgtcggcaagcaaggaagcatcggtgaactggcgggcgagctcgctcttggtatgctgaagctccaagatgcgttcttcgatggtgtccttggccaccacctgatacacgttgacgtcttcggtctggccgatacgatgtgctcggtcggtggcctgatcctgcgcggcagcgttccaccatggatcggcgtggatgaccacgctggcaccggtcaggttcagtccggtgttgccggccttcaatgaaatcaggaaggcgggcgtatcgtccgcattgaactggtcgacgagttcgagacgcttctttttaggcgtggatccggtgatggtgtagtagcgtagtccttgcgcgtcgaaacgttcggcgatcagatcaaggaagctggtgaactgggagaagatcagcgccttcttgccttcattcacgcaggtttccaccagttcggtgatggcggcaagcttggccgactgatccttggcatcggcatacagcagccttggatcacagcagatctggcgcaacttggtcagctcggcgaggatgcgaatcttcgacgtgttgaaatcggcttcttcgctgtgttcgagctgcattctgagccgctgctcgtgggccgcatacagtttgcgctgttcgccggcaagctgcacggtcagcgtggtctccaacttgtccggcaaatcggtcagcacttgggacttcaacctgcgcttgatgaacacgcccaccaacgactgcaattggcgagacacccgggcggcctcaggattgacctgtgcggcggcccgaccttcggccgtgctgccatctgcagcccgggcgttggagatgggcaactcgtagcgctcatggaatcgcttgtatgagcccaatagtcccggcatcaggaagtcgaagatgctccacagttcggagagtcggttctcgatcggcgtgccggtcaaggcgaaacgatggtcggcggccacggccttgaccgctttggctatcttcgtggtgtgattcttgatgtactgggcttcatccagcgccatgacattgaaacgttgctcattggcggtgtaatcatcgacatcccggcgcagcaggtcgtatgaggtgatgagcacggtgggttcatccgcccggaacgcgcggccgatggcggtgcggcgctcggctttggtaccggccaccaccacggcgttgaagctcggggcgaacttggcgaattcggcaccccagttgtacaccaaggacgccgggcacacgatcaatgatggatgcggcccgccatcttcggaatcgaaagtaatatgaccggttacggctgattcactattaacagcattaccggcatccatgccttgagcggtcggcatgccactagattcgttgtggtatcgcgacagcaacagggcgataagctgcacggatttgcccaaacccatctcgtcggccaaaatgccgccaaaacccttgtcgcacaacgtgttcagccattggaagccttcgacctgataagggcgcagaatatgcttgagactatccggcacttcatacgacttagggtcgatgatcttgagatcgtcgatgtattcggtgaacgaagcgtccttgactacatcggagccgtcatccggcagctcaccatccagtaggaatgctcgaccgcccggcaactcgatcagcccggagttgagctgctgctcgctcagatcaaggtcgctggccaatcggtccaacgtgctgagattcgcgccgctgagtttgaccagcgtgccgtccttcaaatgatggaatcgttgacgccgacgatacgaagacagcaaggcacccacttcgtccggcggtacttcatcagcgaggggtgatatctccaccaaattgcctttgatggacaatccgactttgacgcttggcggcttgggcgcgatcagccggtcaaaagccggtgtggtgaagacctcccctacttccttcagtgcgggcaatccctcgtcaaaaagacgaacaatctgcgtggtgtcatcgcgatcgatagtggccgcatcagacacgaattgtttggcggtctttcgcgcggccggcgttcggaacccattcaccgtctgatgagtggcggccgcaacgcgcttgcgctggtcaggcatggtaaagaattcacgcactacatcaatcgcaagatgctcagcgtcgaaatcacgcccaatcacgccccgagacaaggggatggaacgctcatccctagcatgcaccgtcgggccatcgggtagcaacgggacaatggcatcgccgtagtgtgccttgacctcgcattgcacaccatgctcatcacgatccagataaaactggaggctgcattccgtaggacttaattcagccagctcgcgaggaatctcactggcctccaacagtccggcaccaaccagctgaggcaatagcgtgcgtgcgaacagggcgatgtcatcaccggcaatgacctgcccctcgccatcgggttcaaacaggtctcccaatagtcctcgcaacggaatcaatcgtttcgggcaacggacgaatcggcatcccgctgcgcttttacgctgagagcccgccatcatggcggataccgcaccggccggattagtggaggcgagcaacagccatacatccttgccaccatcaatcacggtttccaccgccggcactccggcaagcaggtatccggcatccggaccatacgtattgaaatcacgccgcgcaatgcgcataagaaaatctggctcgccaccatcaaccggcaccgatgcaggctgcccggagaaccatgtgttcaacacgagctgtacgcctctgccctcacgtacggacagcaaccgggccacttccggtgctgaaagtgtcaggtgacgatcgatggcgatatgcccgtaataccggtcctgctgctcggccgcacgacgcacggccatcgcgtcgtcaaggaagcccagcagtgggcgcgaatcatcgtcgaacatatccggcgtatgggtaaaggcaagcttctgcccataatccgtatagtcgccgttcgccatggtaagcacaaattgcggaatcgatttcagtacatagctggacccattggaagtcgatccgatcttgaactccacgctccacacgccatcgatgaaactcaatatcggaacaagctgcacctgccccaagcccacagtctcactatcgccctgatacccgccgcctcgggtgccggcacgagagccgtatccgctattcgtacgtcgtccacctgcgccatttcgtctttttgcagtatcgaatcggcgcatgagcgcattgcggcgacgcgctttggcttgagcatcttgcctatcgacgtgctccatatagtcgatcagcgtccgagacggcctcacagccccggcacggtacccttcaaaacgctgcggatcatcgcagaatatgaaggcgagcgcaatcatgtgcttgcacatgccatagccacggccgtaagccgggcatgagcacttgccaccgacggcttctcccgtatcgaggtcgaattgcacgctggtacgatacctactcgatgggctggtggtgccacgtagaataccgtcaagctcggcatacccggttcgatgattttcgctgtataccggattgataaccatggtggccgctttgcgcgcaatgctacgggcacgagcgagcacggtattcgacgatgacgattccacatcgttgcgtaacgcaaggatagggacggcatgggcttcggcacgcttcgcagccccggcgaaatggccttcgtcctcatcgtcgaaccatacggaacgtccttgcctgaaacgatagggcatcaccgcatcggcggcggacaaactgtccgttccgccaaacgttacggctctactgccggcagcgcctgtgcccccaagcattccacctgcctcgccagagataccgcctataccgctgctcttgccggcaaagaggcccctgtcctcattagtgccatctgtgtcatctgcgccatactgatcatcgtcgtaatcggcaccttcgtcgcctccccttttccaaggattgcgacggcgcaacgcatggccccaggaaacgccggaatcatcatcctcataaggcaggaggtcatcgtcatccgcattatcgggaacatggccaaatacaccataccctttgctcatgggcgagcctcctttccagcgaatgcatttcagtccaacacttctatcctagacgaggcgcgcggtagccttaatgtatggatgcagacaagccggcgcaacgcaaatcctatgcagggaacaccaccctcgaaatcttcgaggtgctgtggcgtcacagctactttggacatggcctgaccgtgcggcaaatactcgatgaacttgcccgtaaacaccagctggaagatccaagcgagctgccgaccgagaaaaccatacgaaatcagctcaaaaagcttaccgccacggaatttctcggcagacatatcgggcatctcaccgaaagcgaccttgccggcatcgaatgcaagaatccacaacccggctggtatcttgacgcattcctatccaccgccgaaatgcgactgctactcgacagcctcaccttgtctcgcatcagcctcgacaccatggacgatctcatcggtaaaatccgcgaactcgcaggtgccgctgggcaagcagtaggttaccttgagcacgtggccacctacacgcatatcaacggcgagttcctatccaccatcgaccaactgaatcaggccattgaagaaggccacggcgtaaccttccaataccgtgattacggcccggacggcaccctgataccgcataaaagccgtacgggcgcaggtcgaattacctacaccgccgacccttaccagatggtgtacaagaacggacggtattacctcatctgccatctacatggcgaggataatctccgcattttcgtggtcaaccgaatcgccaacgtcagcgccaaaggcaggaacggcacagttccactggaaaaaccagcgccggctgattttgacgcagtgaacttcatgcgtcaccgcccgtatcccgtagccgatgccccgattcgcatccgcatggccgtacgagacgaatccatgctcaacaatgtgttcgaatggttcgacgaccctcagatcaaacattcgccggacggcacacagttcgaagtcatcgtcgatgctcccgaacgcgccgtgttctggtgggcattgcagtattcctgggatggccgcgtagtgattcttgagcccgattcgctcaagcgcaaactctatgatgccgggcgtcgcatggccacagcctatgctcccgaatgatgcagcatcacatcgcacacctccttgccgagttgttcaccagcgaatttcaccggagaacctatcatcccatcgccaatcacgttcggtaattttttaccgaacaactcgatttcaagccattccacgaactatggcccccgcctagccgtacttgacgctaaggtggaaccatcacatgccgcgatgcacatgcaacgcaaacgcaacgatatgtaaggagcaactatgagcgaagagcgtaccgcatggggatggggtctggccagcgtagacgccgccggcaccaccctagacgtctggtaccccgaactgaatctcggtgaggcaccggtcgaggccgatcgtccaaaccacaatttcggcactctggctcacgatgaagccgacgcccgtggcatccgccgcgtgccggtattcgtcgtcagccagttggacgagccgatcagcaacgccgcggacgcttacctgaaactccatctgatgagcatgcgcatggccaagccgaacacgctgaaccttgacggcatcttcgcccaactcgccaatgtggtgtggaccaactacggtcctttcgccgttgaggacttcacactacgcaaggccgatgtcgaacgcgcctccaccgaagccgctctcgctttcgctgctcaggccggactgcctgccgcagctcctgccaccaccgtcaacgtgttcggtgtggataaattcccgcgcatgatcgattacgtagtgcccaccggcgtgcgtatcggcgacgccgaccgtgtgcgcctcggtgcttacctatcttccggcaccaccgtgatgcacgccggattcgtgaacttcaatgccggcacgctcggcgtctccatggtcgaaggccgcgtttcgcaaggtgtggtcgtgggcgacggttccgatatcggcggcggtgcctccatcatgggcaccctctccggcggcggcaagctgcgcaactccatcggcgagcactcgctgctcggcgccaacgccggtatcggcatctccctcggcgataactgcaccgtcgaagccggtctgtacatcaccgccggcaccaagatcagcatctgggacaaggccaaggccgcagccggcgagccgctcgaagtcgtcaagggtgctgagctctccggcaaagacaacatcctgttcatccgcaactcggtgaatggacgtatcgaagcccgctaccgcaaggtgggaattgagctcaacgccaagctgcacaagaactgaaattgaaataatggagcgttatcttcgttgctcctcggtcgacgtacttccgtacgccttccctcggtgcgcttcgatatcgcacacattatttcaatttcagaactagccctgctcgttcttatgcagccgtcgcagcatagctggtttgcgctgtacatatagaaagcgcctcactggatctccagcgaggcgctttctcaaaccaacaatcaccgctcgtccatcggcacgaaatcgcgctcgaccggaccggtgtagacctggcgcgggcggccgatcttggtgttcgggtcggccagcatctcacggtactgcgcaatccaaccaggaatgcggcccagtgcgaacagcgtggtgaacatggccggatcgaagccgatcgcccgataaatcaagcccgtgtagaaatcgacgttcggatacaggttgcgcgatacgaaatactcgtcgttcaacgcaatatcctcaagctcggtggccacatcgaacaacgcacgctcgtcggacggcagtttctgcgtatcctcgcgctccatgatcttctcaagatacttcttggcaatcgccgcacgcggatcatacgacttgtatacacggtggccaaggccggaaatcttctggccatcctccttggcatcacgcacgaactcggccacagacttaccggaatcacgaatcgccttcaattggcgtagtacggcctcattcgcgccaccgtgcaacggtccggacagggcattgacgccagcggccaccgccgaatacaggttagcgtgggcggaaccggcgatacgcaccaccgaggtcgagcagttctgctcgtgatcggcatgaataatcagcaaacgacccaaagcatgcacatacaacgggtcagattcgaacggctcgtacggcacagcgaagcacatgcgcaggaagtcgtctacatagccgcgcgcgtaatcggggtacagcatcggctcatcgcgacgacggcggaagatgtacgacacaatcgtgcgggccttggccatgatgatcttggcggcctcatcgagctggtcggtgtcggagatatcggtggtgtccggatagaacgtggccagcgcattgatggcggaggcaagcacgctcatcggatgagcggagcgcgggaacgaacccatgaaggtacggaagtcttcgccaaccatcgtcttgtggttgatgtccgcgcagaactgctcatactcagccctgctcggcagctcgccgtggcgcagcagccacgccacttccagaaaatcggagttctcgcacaactgctcgatggggtagccacggtagcgcaggatcgaatgcttgccgtcgatgtaggtgattttcgattcacactgtgcggtggtgaggaatccggggtcgagcgttacccagccgtcattgcgcagcttggaaacgacgatgccatccggccctgcactagccttcaccacgggcaggttgaacttgttcgaatcgacatcaagttgtgccgttgccattcgcgcaccttcctcttcatgaaccacttaccccaaacattaacgttcacgcgttcgcgaacgctagtgttcggtactttatgtcttctgtgttaccgccggcagacaccggtcgatacacgaaagccgaagtgcgctcatgctatcaaagcaaacgcacttcggcttgttacgtctcgaattcacgggaaaaccgcgaacatatagacggttgatgagataccgatcgcccatcacaggccaatcagacacccgccatacgccaaacgccaatcagaggttggtgcgatcggtgaagatgatcgggccgttctcggtgatggcgatggtgtgctcggagtgggcaccgcgcgagccgtcggaggcacgcagggtccagccgtccttcggatcctggaagatctcgtcggtggtcttgaggaaccatggttcgatggcgatgaccaggccttcgcgcagcttgtagccgtggtgggcgcggccgtcgttcggtacgtgcgggtcgccgtgcatgatgtggcccacgccgtgaccgccgaactcgaggttgatcgggtagccgtattcgcgcgcgatgtcgccaatggtgttggagatgtcgccgagacggttgccgggcttggccacgtcgatggcggcggcgagcgcttcctcagtgcacttgatgatgcgcaggtcttcggggtccgggtctttgccgaccacgaagctgacggcggaatcggccacccagccatccacggagatggcgagatcgagggagacgaggtcgccgtccttcaggctgtaatcgtacggcacaccgtgcagcacggcgtcgttgacggaggtgcagatgtagtgggcgaacgggccggtgccgaagtcaggagcgtagtcaacatagcaggattcggcgcccttgcggtccacgatcttcttgtggacgaactcgtcgatttcgagcagattggtgcccaccttggtggtctcctgcagttccttcagaatgccgccgacgaaacggccggccggcttcatctcctcgatttcacgaggggtcttcaattcgatcatgaggttctttctaccttgttgagacttgttctcaactctagcccagcccggggtcaaccgccagagcatcacccgtggtctgcctagggtccgctagtagcctatcaacggccaaggccgagaaaaagcgcccggcagatacataacctgcacgggcgctttggattgattgtccggagattgattgtctggagcgcgagattacttgcgacgcttgccgaaagtgaacgcgcgaatcactgaagcaatccccatcaccaccatggcgtatccgccgaagataatcatgaatacggcggagctcagcgggctcatcagcaccacgaagccggcgataatcgagatgatggcataggcgatggcccagccggagcgcgggatgcgccatgattcgactagagccatcacgccttccataatccaaccgaaaccgaccatcagggtgatgagtaatgccaaggtctgaccggtcataccgtagtttcgtacgactacgacgcctccgaaggtcagcagaatgccgacgaacacgtccagcacacgccaaccgcccggcagacccggctctacaagagcgctgacgatgcgcaccacgccggaaatcacgaaatacacgccgagcaacaatgcggccaaagccagcgtcttgttcggcaccagcaacagcgcagcgcccaaggcgatggcggccacgcccaccacgccgtaaatgatgcgaatcttggtcttggccttttccggcagccattcctcgatcaggcggaatggactgaaattgccgacataccagttggtctgctgccagccaggttgactttgatcgccccatggaccattcggctgcccgtccgcttggctattcgattggccgtccgcctgataccgccgaccgtccgggccccatgccggctggccgttcgggccgtagttcggattgtaggcgtacgggccgtagtacgggttctggttcggtccgccttgtggctggccgttctgcgcctgctgattctgagtgtcttgcgctccctgcgcaccttgcggaggatattggccgccatgattgctgtcatacgcgccatactgcggttggcccggttggcccgccggattcggctggctcggctggctctggttgggctggcccgtctggccattccactgaccctcgtttggattgctcatcgtaactccttaactcaaggtccatattcaggttccacataccatgttaggcaagttacctaatttgaaccatcactacagttaggcaatccgtctagttcactgacagcgcaatacccataacgcaatatctgcatcaccaacgcttctcccccgccgcgattaggcttagggccatgaccaacgaaaccgaaacgctgacgtcgggcatcgacccggcatcgttctcctccgtcatcaagccgaccaatgacctgttccgctacgtgaatggtccatggatcgacacctaccgcctacccgacgatcgttcgcgctacggctccttcgacaagctcgccgaagacgccgaaaaccaagtgcgcgacatcctcgacgccgacgactgcccggccaccaaatcgcaggctctgtatcattcgttcctgaacaccgacgccatcgaggccgccggccttgacccgatccgcgatgagcttgacctcatcgattccgccatcgacaaggccgctctcacgcgcgtgctcggcaccatcaacccagccggcggccccgacctgttcggcttggccgtttacggcgaccccggcgacccggaccgcaatatcgcccaccttgagcaggccggcctttgcctgccggacgaagcctactatcgtgaggaccactacgtccccgtgcgcgaagcatacgtggcgatggtcgccacccagctggtgaacgccgggtacgcgcccgccgccgaatccaacggtggcgatgaactgccggccaacaccggcgatgacgagagcaatgctcccaccacggttcccagcgaagccgcacttgatatggcccgacacttccttgccgtggaaaccaagatcgccgccaatcattgggacaatgtggccacgcgcgattcggtgaagacctacaaccccaccgattacgccgatttggccgccacgctgaagaacttcgatctcggttcctggatcgacgcctggcagaccgcctatgacgccaccgaggccgccaaggctcagccgatcgatttcaagtctgtgttcgcgcgcgtcattgtgcacgagccgagcttcctcactggtcttgatgcgttctgggccgaggccgatctggccgaccttaagctgtgggcccgtgttcacatgattctgggcttcgcctcctccctgtctcgcgacttcgacaccaccaactttgacttctacggcaaggtgctctccggtgccaagaagcagcgcgatcgttggaagcgcgcggtgagcctggtcaacggcgtctgcggtgaagatgtgggccgcgagtatgtgcgcctgcacttccccgaaagctcgaagcgccgcatggaagagctggtcgccaatctgattgacgcctaccgcgtgtccatcaccaattccgattggctgggcgaagacaccaaggccaaggctctggagaagatctccaagttcacgccgaagatcggctacaccaaccactggcgcgattattcggcgctgagtgtctccgcggatgcgctgcccgccgagaacgccaaggccgcgaacctgtacgagaccggctaccagctggccaaggtcggcaaggcggtcgacaaggacgaatggctgatgaatccgcagacggtgaacgcctactacgagccgagcatgaacgtcatcgtgttcccggccgcgattctgcagcccccgttcttcgacccgaaggccgaggatgcggcgaattatggcggcatcggcgcagtgatcggacacgagatcggccatggcttcgacgatcagggttcgcagtacgacggcgacggcaagctcaacaactggtggaccgacgaggatcgcaagaacttcgaggcccgcaccggcgcattgatcgcccagtacaacagctttgtgccgctgcagctggcagagaaatacgctgacgagcctgataaggcgccgcacgtgaacggcgcgctgaccatcggcgagaacatcggcgatttgggcggcgtgaacatcgcgctcaaggcgtatgcattcgcgctcggcaaggcggcaggtaagcccgacgccgaagaagacggctcccccgccgccatcaaggcactgctcgataccgcccccgaaatggacggattcaccggcctgcagcgcttcttcctgagctacgcctccatctggcgcaccaagaaccgcgacgagctggccgaacagtacctgcagatcgacccgcattctccagccgaattccgcaccaacggcatcgccagcaacgtggacctcttctacgatgcctttggcgtgaccgaaggcgacgccatgtggctcgcacccaaggaccgtgtacgcatctggtaatccccgttatgtaagagaaaaccgctgtgcttgcctcgattacaggcgaacacagcggtttttcatgatgtatggttggcactcagaattcggattcgctgggatcggaagattcggcgaaaccgtcgacgtaggtttgttgggctgcggactgtggctgattagcgccagcgtccggttgcgacatgacggcatcggccatggacgcagccgctgactcggttgatggcgacggcgattggccggaatcggaggtgaccccaaattcgacggggccagattccgacgaggtcgcatacgggtccatacccacaccggatgcggcaccgcccgcgccatattgcattggcctaacgtacggcgacgatgctcgttgcccgtttccgccatccatgccttcggcggcaccattggcattgccgttaccgttgccaccattgcctccgttaccattaccggcacgctgtggcttgatcagcgacgtggtgccgaaggtcaggtcatgcccaatgttggtggcttcgagaacggttctgctgcgcggttcgccttgctcattggtccactgctcggtgatgagtgagccgaccacaatgatgcggtcaccgcggcgaaccgaactggcggcgttcacggccaaagcacggaacgctttgacgcccacccatgcggttccgtaatcctcccattgtctggtagtcgggttgagtcgactgcgcgtgctgcccatacggaatgtcagcacgcggaaactctcagttccgcctagtgtcggatcaccggccacaaagccggtgacggtcactgctgcttgttgatttgccatgatcggtcctttcctcggcctgctggcctgttgtttggatgtggaccgccggagcctgtctccggcttcattgccggcttgcacgccccagcggtacctccactgtgaggcatgacgtttgaagtgcacaagggcaactggcaaatgtggatactgtgacgcagttgaaattttaagaatgtggataagtttcggttatccacaacaaagcgccattctgcgactgggcagaatggcgcttgatgcgattaacgccgaggctgagtaagtgggactcagctgagggcggcgaagcgctcggcgagcgcgtcggcggcttcggcggcgggcacggcgaccttgttttcgccgttgcggtcgcgcagttcgatggtgccgtcgttgacgtaatcgcggccgaccacggcgaccagcggcacgccgatcagctcggcatccttgaacttgacgcccggagacaccttcttgcggtcatcgtaaataacctcaaggcccttggcctcaagctcggcgaccagcttctcggcaccttcaaacgccgcagcgtccttgccggtggccaccacgtgcacggcagccggggcaatcacggacggccaagccaagccggcttcgtcgtggtgtgtttcggcgatgcaggccagcacgcgggaaacaccgatgccatagcagcccatccacaccggcacggccttgccgttctggtcgagcaccttcaggtccagtgccttggagtacttgagacccagctggaacacctggccgatttccacaccacgctcgaagctcaacggaccggaaccgtccgggctcatgtcgccgtggcgaacctcaacggcttccaccacgccgtcggccttgaagtcacggccgtacaccaggttgtagtagtcgacctcgttctcatcggcaccagtgaaccaagcggaacccttgaccacgtgcgcgtcgaccaggtagcgaaccgggttcttcacgccagcagcctcggcctgcgggccaagcaccatcggtccgatgtagcctggcaccagttcggggtgctgcttcaggtcttcttcagtggcctcctcaagctcggcgggagcgaactgggcttccagtcgcttcatatccaccgtacggtcgccgggcacgccgacgacaatcacttcacgccacggctcgtcatgctcttcatcctcagggtgcttgacggtaatcaccacgttcttgaggatgtcggaagcctgccattcacggccatcagtacgcgggtggtcggcgttggcacgctcgatcatgttatcgatggtcttggcatccggggtggcttccttggaagcggcgggagtggcggaagcatcgatttccggcagctccggagtgctcagggcctccacattccatgccttgccggaaggtgccagtgcgaaggtatcttcgccgatcggcatcggagccaggaattcctcggatgcggagccgcccatcgggccggacatggcgaacacaggtacgtacttcaggtcgaggcgctggaagatacgctcgtaggcgccgcgctcgtcatagtaggccttgcgcatgccttcttcatcgatggtgaaggagtaggcgtccttcatgatgaattcacgaccacggatcaggccggcacgcggacggaactcgtcgcggtacttggtctggatctggtacagggtgacgggcaggtctttgtaagaggagtacatgtccttgaccagaagggtgaacatctcctcgtgggtgggggccagcaggtaatcggcctcgtggcgatcc

SEQ ID NO: 589 - DNA, 4596 bp, Unknown
  R14_15m  MAG No. k141_365
catcgaaatgccgattcgcaacgtcaaccgtacggtcggcaccatggtcggctacgagatcacccgccgttacggcgaggaaggtctgccggacgacaccatcgacatgaccctgcacggttccggaggccagtccatcggcgcgttcatcccgcgcggcgagaccatgcgcatctacggcgaagtcaacgactacgccggcaagggcctgtccggcggtcgcatgatcgtgcgcccggaagacaacgtcaccttcgacaagcacagtaacgtcatcgccggcaatgtcaccggtttcggcgccacgtccggccagatgttcgtggccggtcgcgccggcgaacgtttcggcgttcgtaacggcggtgccacgttcgtcgtcgaaggcgtgggcgaccacggttgcgagtacatgaccggcggcactgttgtggtgctcggccccaccggacgcaatttcggtgcaggcttctccggtggtaacacttatgtgcttgacctcgatatgaagaaggtcaacccgagtgccatcaagtccggtgcactgctcttcaagtcgcttgatgccgaaacctccaagctggtgtacgcactggtcaagcagcatgccgaagagaccggttcccagttcgccgcggccctgctggaggactggaacgaaaccgtcaagcggttcactcacgtggtgccgaagcagttcgtggccatgacgaaggccatggaagaagccaaggccaacaatgtagatttcaatgcgcccggcacctgggaaaaggtgtacgagcaggttatggaaggagcgcgctgacatgggcgacccgagaggattcctgaaggtccgtacccgccgagagttggctgaacgccccgttgaggagcgtatcaaggactggttcgacgttcacgccgaaaccggcctgcaaccgtggacccaaacgcaggcggcccgctgcatggattgtggcaccccgttctgcatgaccggatgcccgctgggtaacctgattcccgagtggaacgacttggtccgtcagggcaagtgggaagacgcctacaaccgtctgtccatgaccaacaacttccccgaagtcaccggccgcatctgcccggccctgtgcgagcaggcctgcgtgctcggcatccaccagccgccgaccatgatcaagcttgacgagcagaccatcatcgaccaggcatgggatttggactacgtcaagccgctgccgccgcagcgtctgaccgaccagacggtcgccgtcgtcggctccggccctgccggcctcgccgccgcacagcagctcacccgcgccggccacaccgtcgtcgtctacgagaaggacgacgccatcggtggtctgatgcgttacggcatcccgaacttcaagcttgagaagggtctgcttgaccgccgtgtcaagcagatggaggccgaaggcacccgcttccgcaccaacgtggaaatcggcaaggacatcacgtgggatgacctgcgtgaccgttacgacgccgtcgtagtggccatcggctcccgcgtgccgcgcgatatgaagattccgggccgcgagctcgacggcatccacttcgccctagacttcctgcccgacgccacgcgccgtatcttcggcgtcaagccggtgcacgacatcaccgccaaggacaagcacgtcatcgtcatcggcggtggcgacaccggttccgactgcctcggcacctcgatccgtcagggtgcgaaggacgtcaccgtgctacagatcatgccgaaagagccgtcaagccgtccggacaacagcccgtggccgaccttcgcccgcacctaccagaagacctcctccatggaagagggcggcgagtacatctactccaccgactccgtgaacttcgagggcaccgaagaggagaaggccaaggtcaccatcgacaactcgaccaccgccgaaggcttcgtggccgatgagcgtggtcatgtcaccggcttgaaggtcgtctccgtggctcccggcgaaaatggtccgttcactcgccagcctggcactgagcgcgtgctgcccgccgatctggtcctcatctccgtgggcttcctgcatccggacaccgagaccatcctcgaccagctgcccgtcgaactcgacaagcgtggcaacatcgctcgcaatgacaagttcgctacctcccaggatggcgtgttcgtgtgcggcgatgccggccgtggccagagcctcgtggtctgggccatcgccgaaggccgctcctgcgccgcagccgtggacgagtacctctccaaggaaaagagcgagctgccggccccgatcaaggccagccagcgtccgatgatgctgcctcgctgaatactttccaaacagaaacatgaaaatcccttcttcatgaggggatttttgcgtttctgggattaattactgccttgagtcttcagtaatgtttatatttcgagaatattgcatacatggttaacatgaagctcctatggtgtctttcgtcgccaaaaagatgacgccagaatatttgggagagattcatgaacacacgtcatgtcacttcactggtcgcggccggtgcggcaatcgtcatgctgctcagcggctgcggatcgaccggtacctccaattccagcaatgcttcagattccaatatcatttccgtgtacggcagtgagccggcacacccactattccccggcaacaccactgaggccggtggcggcaaggttgtagaccagctgttcgcaggtctggtgacctacgatgcgaagggcggcatccacaacgaggtagcagacagcatcacctccagcgacaacgccacgcattacgtcatcaagctcaagagcggatggaagttcaccgacggcactccggtgaccgcgcactccttcgtaaacgcatggaattacaccgccaacagtgccaacaagcaggccagcgccagcttcttcagcacaatcgaaggctatgatgatctgcaaaagccggacgtggaccccaaggccacgctgagcggcctgaccgtcgttgacgacaacaccatcgatgtcaagctcagccagcccgactcggcattcccggtcaaggccggcagccacgcctacatgccgttgcccgaatccgcgttcaaggacccgaagaagttcggtcagcacccagtgagcaacggcccatacaagttcgtgtcctggcagcacaaccacagcatcgaaatggtgaagaaccctgactacaagggcaatcgtgtcgccaagaacgatggcctgaacttcaagatctatacctcgcctgattcggcatacgccgacctacgcggtggcaacctggacttcacgaacacgattcctgacaccgcacttacctccttccaatccgacaagtcgctgaaggcatacaacgagcccggtggcaatacgctcaccttcaccattcctgaatggctggaacacttcggccagaacgaggaaggcaacctgcgtcgtcaggccatttccatgtccatcgaccgcaagaccgtcgccgagaagatcttccacggcaccgccacgcccgccgtcgacttccttgcagccccaatcagcgcctactccaaggaactcaagggaaatgaagtactgaagtacaacccgtccaaggccaaggaactgtgggccaaggccaacgccatctccccgtggagcggtgagttcggcattgcatacaatgctgatggcactgcgaagaactgggttgaggcaatctgcaactacatcaagaacacgctggatatcgatgccaagagcatcccgatgtccacttccgacgaattcctgtccaatgtggattcaggcaagatgacctccgcataccgcagcggttggggccctgattatccatccgcggacaactatctggtacagctgtacgattccagttcggcagacggcaagggcggcaacagcggcaactacaagaaccccgagttcgatgccatgatggacaaggctctttccgccccgtccaccgaggaagccgacaagtattatcagcaaggtgaggagattctgctgcaggaccttccggctatcccgttgtggaaccagaatgccaccgcagccagcacctccgcagtctccggcgtcgcattcgactacggcggcggcccagtgttcaccgcactgaccaagaagcagtaagcagtaagtaataaacagacagcgctagccccccgctggcgggggctgtcggcaaagccgactgggggtggtctcaaacagcagaccacccctaatcttgttatatgagcgagctcccgtaagcgggagcaatcgagaacatacaggagcacattaactatggaattcaccgtatccggcactaccgtgcgattcgatgaacgaacaatgcagttcgcttttacgcgcgacggtgccgaatggaatacctgcgctgatttcaagccgaccctgcaatgcgcgcaaggcaccttcgcgttcgcgggtgccacttccatcacccatgagcagcgtgaaaccggcacgggaaccggcattcgcagcatcttcaccggctttgggcacagcgcatactcctttgaaacctatgtatgggtggagcg

SEQ ID NO: 590 - DNA, 19644 bp, Unknown
  R14_15m  MAG No. k141_718
gaatgcttccactgcagaccaccatccgcagtcggattcacaaacggcttcaccactttcgccgtattcaacgtgtcatacgtcgcgttggcatacgccaaaaaatgctggccaatattcatggtgtcccacaccgtccgatgggtaccgacagccgcgatattcttcatgtcgtggataccccgaaaatcggtatacccggttcgggcattcataactgtgttgccgatggaccacccatggcctttgctccaatctccgaatctcttgaactgaccatcccagaaatccctcatcaccgtgttgtttgggttaggatgagcggcattcgcggcctgtttcgcatcctgccaaccggaaacgaggcgattccatgccctgccgccgttcttcaacgaatgcccaacattatgcattcccttgcctaaagcatcccaaccctgacgagccaaattagcggcatagtttcctattccatcatgacgtatagcactcaatacgttctctccggattgcattgctttgccgccttcgctaacaagcatcttccggaaaccacctgcagcatccttagatttcaataaccgcttaccccacttagtcggctgccacagtcttgcgcgtaaagcttttttgtaaattgcgttgatcaccaccatgtctcttccgccaactccgcgtcggaaggcatctttcgcaatgagcctagcagcgctcttggcatttgcaatcttgcttacagctttcaagccggccccaacatccaataatgcccagaaaccggataccacaacttcccaccacgacgcatcaccgttcgccttggccaacagcttgtccacgaacagcagcgcggccaccgccgcggaggcaacggcaatccaaccgccgaagaacaacccaataacaccaaggacaatggaggcgacctcaagaatcttcacggtaatctgccaagcatcagaatactgccattgctccgcaaaaccatgcaacttcggcgattcacgcgtggcagcggcaatagccttggcctgctcatcgccagccttcttatagttgtcgacgatcctatgcaccgctgctttggccgcttccaaatctctattggccgtggacagtccttgctcatactggtcgaccatgctctgcgcccgtctgcgtcgatcccgtgcacgctcataatcctcgtcactggcatcagggctgagattggaatacgcactttgcacacgatcgaattcacgccggcttgacgctacattctgttgagcattcgcctgcgctctcttggcattctccacctccacgaaggcactggaagcctgacgctgatagctatcgatgtctgaactccacgtgttcagtgctttcgcgacatccccaaaccctgtggcaaagttgcggaaatccttcggcatggtaccaattttgtcaacgaacttggtcacccattcgccgctcatgccttccttggtctgcaaatgatccaaatcatctgccatcttattgaaagtgccttgcaggttcgagtatcgccccgccaagtcggcagtgaatccaccattcccaggaacctgattccccgaatacccgacaaaaccccaatcctcaccatcgagattcacgatatttcctccccactcgtcgacgcatacgcgctggaattcacaaactcaatactcaccgtatccgtcatcgaagcaaacaaattaaacaaaacatcagcaatatcaatttgcggagtggcaccagttaccacaaacacatgctccccatacgggatgaaagttcgaagcgacgccacatgacgatcggttttatcacccttgtcatcaaccaacgacgttattgattgcgcctgaaccgcagtccccattttcggcaaattcactttctgcaacgacatgaattcaccatcaccaagttcagcctgttcgctggaaagcgtttcaataactgcgtccaattcatcatccaaatcacctaagacactggcctgaggtaattgtgcaatcatgaatgtcgccattacctgcacagcatcatcaggatcaatatccgtcgcaattgcatatcggacaccggacttccacgcatcggcatatgccttcaccaagtaacggcgcaacgcgggataaaccgttcgccatgatggcacaacatagcgcaattgaccaagctgacgttcaatttctatctcgcgatgttttggatccacttcaatctcatgccacccttgtggtggaaccatggagataacatattgctcgtttgtcaatcccatcccccttgaagatacggcctaaagaagctcaatgcctcatgcctgtagaatcaatcatctaccagcagacacgtcagctcccactgccagaagtatgatcaaccttcaacgaagcctgaatctgctcatcgactttatcggaaccggttttgacattctgtagaaaatcaaccaatttctcggttttaatcttgtatttattcttcgtggatgaaacctgagtattgaatttgctcaaggcattaataaccggggcgtatcccacattgcccttgtcaggtttcatatcatcattgccacgtaaattcagtgtctgctgaatgttctcaaagccagtcttcatacggacaatggactcatcaataatgattatcttggactcagccatacactctcccaatacaagtactggaaaacagcacaaaataagcaacggcctgcaatgcctcaaaccccctgcatcgcaggccgctcacttgccaattcaggcagtattactgcagcgcgctggccaactgagaatcgagctcggtcaaagcatcctgcgtcttttgcaggaactgctgcatgccattaagaccattcacagtatcggttgcacccttagtgaactgctggtacgaagtctcaaaagcaccggaagccttatctgtgacgaagccgctcgtcaccaactcgctcacggtcttgttcaactgatcaagtgtatcgacaagactttggcggccactctcaaggctgctcttcacacgctggatgtcatcatacgttacatttacgttggccataggactaacccttcccatacggaaccttacgccaccggtccataccgccgccgacgccgaatggacaaccatgcccatccatgagtaagaatacccccgatatacggtcttgacaatacattgagccagaataagaacagtagaacgatgctcttaaaactagctgacctgcaccaactttgctctcatgccgccgaaacgtaacacatcacccggaaccatgctggtcctggtaagcttaggcagttcaattctggaaccatgagattccaaccatgtaccattggcagaatcacagtccatcacccagacctgccctatagcggtcacaccaaattcgaaatgtctgcgcgaagtctgctggctggaatcatgcagcaccgcaaatgcctcatatccatcttctgccgtagatggcatccgcccggcaccacatctcgatttcacctcaatgcgctgcccatccgaaaactccatcacataccgcggaattttgcgatgcaagggcagattcacttcggcagagaccggttgaccagcacgtactggtggttcgccaaatgaagacccttccaaagcggcacgactccattcatctcggatactggtctgactggttcttggcagcacaggcagttcccgatacacctgcgcggggctcgtaccagcaataatgcctgatgcctttttcttcttgccaaacataatcgtcatctccccgtgcgcggtgctggaggtatcgctggcgtctccgattgcggctcttgtggcataggtggagccggtattgcttcgactgcggtaagcagtgtatcctgaggctcggcttcaggaactccatccataggttcgctggacgccacctgcatagtaacggacaatgctcccatatgtacaaatcctcggccagatggcacatcagccgtcaactgcgcgcggcgaagacgaatattgatgagatcttggtaaatcacctcatccggtttcaacaacacgccttgacgaatcgtcttaaccttggatccccaattgccgaatccagtgggaaattccgccgcatctccagcaacgacgaatcccgcagaattagcatcaagtacaccgatcttcgattgcaaccagttcgaagctggaacatccttcagcagttggcagtcatcgaacacaaataacgttttgggatcatctgcatattgagagagcagttcctcggtaagctcagatggcagtgtgattatccgttctacacccggcttatcgacaaatgcacgcaatgcattgttcttgggggctgcgagaatcacgcgatacccaccggctagcgcgccattgacaatggtgaccagcatagtggtcttgccgctttgcgacgtaccgtaaatcggcaacatgggcgtctcacctggatcgaacaatattggctcgttgtcttcgccaccgatgccgagcggaatgcggtgttttgttccacgttccggaagataatcatcgccatagtcgctgatacgagtgtgcactgcggacaaagtaatctcttcaggcagctgctctacagtgaagggcatgaccgcacgtggcaatccgcggtcacgaccagacttcagtttggttccgctagcacgaatcaattctgattcctcttggccggaaagaccttcgtgaatctttgcaacctggatttcagcgccatcttccgatcggtatccacgcccatcaggaatgttttccggcacatcacgtgacgacatgccgacttccgtgtaatcggatggatcgaccaaacgcagcagtatcttgctgtccgaaagcaccgacatgcgaccggctagtagtagatgatctcctgtgagaataaagtgaacacctgaagatgggccttcgcgcatcagtatctgcagacgctcaatcagggagccaccatcgtagctctggaatactgagttgaaaccatcccatgaatccagcaataccaatatgtgcggtaatgcgccttcacgtgcagctacatcgctcgcattgtattcatcgatgctgctgtaaccatctttagacagcagactcgctcggcgtttagtttccgcttcaagtttgcctatcagacgctcaatcttctgcgtctcactgcgtaacgccaccgcgcctacattcggcaaagcagtcaacggtgaaatcgcgccattgcctgcgtcgatgcagtagatgtgcagttctctcggcgtataagccatgctgcctgaataggcaatagtgcgcaatgccgtagatttaccggaacgcgacgttccgacaatgaacatattgccaaaggaactggcatctatagacactactgtctgttgctggcgttgaggatagtcgcccaaagcgaatgggataatcacatgcccctgactatctttatcggtcgaggcctcaaactctttcagctggttcaaatccacatgttcggacaatgccggtagccaaggctgccgctgctgagggatatgctcacgacgcgcgacttcgttgatgctatccacaagcatcttcaaatcggtcacattcacatcgcccttgtccttcttgctcttcggccgttgtggcaccgcgccgccgagttgagagaacgccattgaacgaataaacggagtctgagtctgctgtgatcccttattctttgacggattgatatatcttccgcccacacgcgccgattggaacgggatcagcgagctggaacccaaacgtaccacagcacggcccggtgtggattttgaaatcagtgcggcatcttttgcatcgatcacatcctggctctctgaggaatcagtcatgcgcaaggcaatgcgcaagttcgtgttcgctcggatttccggggaaaccacaccacccggtcgctgcgtggcaagcaacagatgaatgcccagcgaacggcctcgctgcgcaatgttcaccaaaccggtgacaaagtcaggaagttcacgggcgagcgaggcaaattcatcgatgacgatgagcaatcgcggtatctctggaaggctgggcttggcctcacgcatatcgatataatcttcaagatccttggctccagcccgtgccagtaaatgctcacggtagttgagctcggcacccagcgaagtcagcgcacgggaaacaagatgattatccaaatcggtgaccatgcccacggtgtgaggtagtttcacacaatccttgaatgccgcgccacctttgtaatccacaagcacgaagttcaacgcttgtggcgtattggccacagccagagatgcgaccaaggattgcaataattctgacttaccagaaccggtggtgccgccaatcaatccgtgagggccgtctttggaaatatccaatccgaatggaccatccacggattcgccaatcacacacgctgtagaacgtgggtacattgcccatcgcgcctcgatttgctccggcgtaggcgtcaaatccagcaaatccaacagacgactgtgatcgggaatggcggactgcccttcggcagggctgccatcttcaatgggagccaacgcaccagccacggcaccaagccaatcctgcgataccaaatcaggcatgatgtcaaacacatcgtcggctttgttgctttccacacgaaggtctttcgcggtagcagtaatcacggtctggcattcctcaggtaataatcgctcatccgtgtcgatgcacagtgcgtatataccaagtgccggcccctcctgcaggagtcgtatgatgccaggcatggagcgcagcacgtgcgcatgttccatgatgacaaccaccgctggccccacccagtgtttgatggactgccgcttttgctcactgctgcgttcatccagcatcgtcgtcagctcagaaatacgcagagccaaatcatccgcactaaccgccatggtacgcaccgcattctggccgaaatgcggcgcaaaatgcgggaaccactgcgcaaacgaccaatcaatgccagcaatcgcctgacctcgatccttaaggcgaggagacagcagatacaacgtgagatcacgggtggaatgcaatgccgccatctgcgcggtcatccatgacaccaccggatacaacacgtcggcatttccagtgcagccaacacatccggcatccggcagagataccgctaccggaaaattcttcaactgccacttggtgacccgctcaaactccattttttgggggtcttccaatgtgatgtgcgagtctatggttcccgtgcccacacgcaaacgcagccacgattcatcagtggagcggcggttccacaaccgtgcggtgtgacgagcgcagatatccaatacctgtgtgggatcaggatactcccgtcgtgactgggccacctcagcatcaacagctttttgcgcctcgccgcgaatacgcttcgtgttttccgcaaagcgtttcatctgctgcttgtatcgcttctttccggcacgattaccggaaatatacgagccaatcatcatcgctgggctcatcagaccgaacatgagataggtatagctcttcagaagcacgcacattactgcagccattgccagaggcagcaggctcgtgagcaggggaatcggcgctttctctggcttctgcggttctccgggcagcgtaaactttcgctgtttgaccacctcgcgaatcttcggcggcctagcgaacagccagcgaccttccatttcttcagtatccaccggcacggaagtctcacggccgtgggtcacggtgacaatgcattccggcagcacgatttcggtgctgttattcagtgataccggttctatgacttctttgccatcgatgaaaacaccggaatgaatttcccgcttgcgcttgcggtaccatgcggtgcgcttctgcagcttgccttcacgcacatgcggaatcaggcgtacgtcactgtctgccccgacatccaacatgaaatccgcattcatggagtttcgttcaggattcagcaatgtgcctatcgacatcgtgccgacagacacatcatatacagcgcccgcattctcgccgctgacaaaccgcaattgcacataaccatcattgagaccggtattggcataaggattcaatggtttccgatcacgcttcaacagcgaaatccacgagccctcgtgcaaacccgcctgcgacacggtaatggtcggaggcacagttctaccgtctatggccaaacccatggaatccaaaggcgactgaaatcccacaatattggacagcgaaggaagaatagcggatatcgacgtatcaccggacacatccagataggcagtgaaacgcacatccgcaatgccatcgtggatggtaaccaaacccttcatcagtttctcccctcgcctatcttctgattaatttatatcatcgctctgccccatagattcgcagcaggcatgcacaaatgaaagggactccagcacatcctcgaacacacacaacgtctacgcacgacaagcgatgccgttcaacaccacagccggtgaccagacaacccatacccagccaacaccacatcacgcaatccctcatcaacggtagtgggccagcccagaatcaattggactggcccactatggcatcagcaattactcaccgcaacgccccgcaaacaaccctcgttaacgggaaacgagtgcagtcacctcaccgctcgaacgggttcttgcggtacgcaaactgctttctgcgctggttcaccgcgacaatcgctccggcgatggcggccaagaccaccagtgcaccgaagatcatcgtgttgcgcagccacggggtgtgggtggcgtactgccaccagttggaggccacgtagatgttgtcgtaggtggacgtcgcctcgttgcctgccttgtcgatcgtgtggatcacgatctcgtggctcttggcgtcggcgtcgaacgtcagactcggcgtggacttgagcgtggcatcgcccttccagctgtctttgagctggccgtcgacatacacttcggtggacttgatgccgaggttgtctttggcgtccaccgacgcgggctgtccctgctggctgtagtacacggtgccggacttgatgccgagcagcgaagcagtcggcgcggtcgagtcgacggcgaagttcacttcggcagtgcccttacggtcggcgttcttcttgtccatggtgttctgcgagaggttgcccgcctcgtccatggactgcacctgcacacggtagaagccgtcggagttaaagcgggatgccggcacggtgtacaccgtacggctccagcccttgtcgtcagaggtcgcgaccttgtagtcgttgttggtgagcgtggtcgccttgtcgtccttggcgatcacgatctggcgcttgctcaggtcaagaccggagacgttgatctccgttatctgcacgtcctgcgccttcttcaggtaggtgccgcgcaggttcgtggtgtccgcatcgaacgtgtaggtggagccgaagcggttcacggagaaggtcttcttggtctcgaacgtgttgccagccagatcggtgccgtgcgccttgatggtgtacacgtcatcgaagtcgaccttgcgttcgaagtccgtgaagtccacggtgcggtcgttggccgcatcggtggtgacgttcttgggcatcttgtcgcccttgagttcgccgcgatggtcgccgaccagcgtgtagctcacgttcttcatgtcgatgttgacatcgttgaagtcgatcaacggtgccacggtaccggcgtacgcagtcttgtcttccacgcggtcgatcttgatctgcggcttggtcttgtcaaccacgaactcgggttcgctcacctcttcggccttgttgccggccagatcggtggcggtggccttgatggtgaagtgcgcctcgcccgtgaatgccacggagttcgtccactcggtggattcgcgcgtgccgccggtgcgctgccagcccgccgggccgggggctgcggtgtccgcgccgttatcgtccttggcggtgacggtgatgaccgattcgtcctcggagaagttgcgctcgacttcgcgaatggtagcgttgcgatcggccgcgtagtatttgccgttcttcacgttgttgttgtcgaaggtgagggtcagcttcggagccacggtgtcgaccgtgaactcctcatgaatcgtattcgacgggtgatcgcccggatcggtgtaggcggcgtccacagtccagtcgccgtcgctgtcggcggcgaaggtggccacgtacgtcttcaggtcaccactcgcgttcttgaaggaggagaccggaatggtggccttcttgccgtcgaccgacgtggtgacgaccacacgatcgccctcatacttcttggagaaatcgaagttcgattcggtcagtgtcacggtaccggcacggtgggccttgtagtacttgccgttgcgcacatcgttgttgtcgtaggagactgcgatggtgggcgccacggtgtcgatggccacgccgttcaatcccttcagtgcgttggcggcttggttgccgttcacgccttcgtaggcattcagcttgccggtgtcgaccggattgccggcctcatcgcgaatggtgaggctggtctcgccgaggtagacgcgctggctgtcgccatccatcgtgaagctgatgctgccggcggccgcgtcgcccgcatagacgggagccgggtcgttcttgccggaaacccagttgtcgaagtgcttggtggagaacgcggtggaggccgcagtcacaccggacacattatcgctgatgccgttcagcgtggccgtgaagacatcagtggagaagatccaatcccacttcttcggtgcttcactggaagcggtcaggtcgcccagcttcggagcggtccagtcgagcaccacgtctttggactgggtggatgcctcattggcctttgcctgtagaccggcataggcgaagtgcagcgtgtaattgccttccacttcgttggtcttgccgttgatcaacagcttctggccggagagcgtccacgtgtagccatcgccttcagtccactgtgcatcgctggtatccaacggcttgatgttctgctcgttctggccaccggtcaacggcgtggtgttcgaagtactaccagcgagcaggttcgtcttgccggcgttgagcttggcgtaaatcgggaaccagtggtcggtgatggtgtaggccaccttgaccttgccacggaagtacttgttgttgttatcactggagtcgggcacggagttgtcggacttggtgaccgcgaaggatgccttggtgtcgttgccgttcacatcggcaacgacggcgtcgtaatccttgacattgtcctgaaccggagctttcttgaagctttccttgtccagcgcgttgccgaggttgtcattgacacttaccgtgatcttgctcaggtcgtagaagccttcctgatcaagggtcaactgtcccttgccttcgttgtcgagtgtgacattcaccgtcttgccctcggcaagcgtcttgcccttcagatcagtgccgtcaggaatggtcagcttaacggagtcatccttgatgccggacgtatgggcttcgttcttggcggagtcgttcgaggactggccgttgggcagcaagtccttgatccagaccgtgaacgtctgtgcaccggccttggcgaagaccgtgtagctcttgccttgcacggtggtatcgacgatggtctcgcccttggcaccggccggaccgctgatcttggtcagcactgggcgcttggtgtccaacaggtagttggtagtgccggtgctttgagcgttgaacagcttgacattgttgccgaagttcttctggagcgtcagctggtagtcgccgttgaactgcttgccggtggcatccttgtcggtttcggtccgcttgggcaggtttgcggtgcccagcgtgatgacgctgtccttataggtggcgtcactgatcttgaacgtgaaggacttcgaaccggcgtcgccgtattgcaccgcgccggtcagcaagtctgtattggcataaccagccttgaccacatcccagcggtaggcgaacgcggggtcaccggcgaccttgagggagatgttggtgagatcttccttgtaggtcttctgcgggtcagcatcgttgagctgcagagtcgccttcgcggtctgcttgctcacgcccagcgtatccggcagctgcttggccgcagcggccacggtggtatcagtggacttggccagtgcggccttcaccgtggccaatgtggtttcggcatcgctgacattgggcttcgtggtcgccttatcggtggctctgagggatacgccggccagcgtgtacttgccgtcctggtcgccgagcgtcagttggaccttgttggggtcgttgttcacgcgctgaagttcggtccacttgccggtgaccttatcgccattccacgtggtgtaatcgaccttggcttcgacctttgccagaccagaggtttgtgcatcgtctttgccggcacctgttgccgtggaatcgggcagcagatcgcgcgcgtccaaagtgatggtggcggcagaacgggacacgacactgatggaatcgtccttggtggaggtcagttcatctctgcctgcctggtaggcggcaccggtgaagctcggagcctgcgtatccacgccgaaggtcttggcgttattggtcacgtcacccaacactgccagcaatgtggggttatcggttaccgtaatggcatactggccgtttgtgttcttggcgtcaatcaacggcttggcggcatccgctgcgatgacgatctcgtcaccggcgccgttcaccgtggcaccggccaccgggaatgtgcccccgtacacggtcttgtcaccggcggtcaatgtgctggtgagcaggttcaggcccttggtgccgtcaccttcttgcagacccttcagttcgtccgccagccacgggttgttcttgacggtcagtgtgaccttgggagtgccgttgatgtagtcggtgccgcttaccgataccgtggtcttcggctggacattcttgccgatacgaatcttcgtgtaggtgaacttatcgccggcaattgcgtttaccttttcagccttggactgcgtacctgcattgtccgtggcttggatggtgaagtccgtcaaatcgtaggttccggccttggtgagcgggaatgtgtaggtgccgtcaccgttgttggtcaacgtgaccgtggcctgcttgcccgtctcaggatcgataccgcttgcaatcaccttgcccacaccggcaccatcatccgtaacggtgaaggtcagggcacgttctttacggtcgactgcgaagagtgtctttccgaacggaatatcaatgccgccgttcttggagtagcccttccacgcaacggtaggagcggtggtgtcgatggcgaacgactgcgttacagtcggcgtgcccggcagcgcggagttcaggcttacggtgtggttaccggtcttcaggtccagtccggcatcgccgcagtccatggcaccattcgtaagatcagcggcatcgcacaccgggattgtggcaccggtgccgtcggcagccggaacggtcagcaacttgataccgttcgccttgagcagggcgagttcatcggcgaagtatgcgctcgtgctgctcaccgagaagccgccgaccttgctgtaatacgtggtgccgttgttgacagcacccttatccggggtggtaccggtcagattcagggacagaccagtgccggcattcgggtcaacaataacggtcttcgcgtcgagcaaatcgctcaacggcttcgcatcggaagcgctgccgaaccaattggtgaccgtaaccgtggtcttggtcaggtcggtcttgccgttaggcacggtccatgcttcatctgccttgaccgtatcggtcttggtgccgttgccattcggatacgtcacctcataagacacgacattggctgcctcagccgcaaccggagtaaaggttacggacggcgacgtggtcgtgaaccaggtaccgtcggtcgcgtctttgtctttgcctttcagccaatcagtatcaacaacgtcgccgaacaccgccgtatccacggcggcgggcttggtgctgtcataagacaattgaggagccgtgatggtgctcgtgccgtcgccatccttgaactgattcaggtcaatggcggcatctgccgctgtaggatcagccggcgcggcaaccgtcacatcgagcgtaaccggatcaccgctcagagcgaacgccggaccatcattcggctcaacggtgtaggtgtagccgtcctgcacattgcctgtacggtggaagtcgccatacttgacttccttgacgcccaagatgcccacggtcacggtaaaggcaatcttgtctttatccgcaccttcgtattgtccgttacggtcaaattggcccgcggggaaaccatcaaacccagtaatcgtcacgcccagacgaacattcgaggcattggtgcggccatcggtcagcggctgggcattatcggccaccttgccgtccttatcggcggcataccaagccaaatccatcttcggcgtagtggcggcagccggctgtgccttgacggccttgaaggagcgtgcggacaccacggagccggtggtctgctcgggcttgaggtcggaagtcgaatcggcgctggctaccacggcggtagcacccatggcaagagccgccacagccacggccgcaccgatcaacgacttgcgccagaaactggaattagttacgaagctcattacttgttcttccctccacgaaccaggatggtacgggattcatcgtcgtcggacgatgcttcattcgtcttgcggaattgcatcagcgaggtctcgccctcgtccgccaattcggcggcggaagccatggacaccggaatctcaaccacagattcgagtgcggccttggtacccagacgggtgctttcgtcttcctcgtccaccacggccggagcggcggaagccttttgcttggcaccgggcactgcggacggcttgtcttcgccggggcgagtaatgccacccttggtgctggcggaacccagagagccggaaccggtaccggtcaccgggcggaattcgatgtcgctggtgtcatgcgtaccggtggtggtatcggaaagggcacccttcttgcgcttgcggcgcgagccttcgcccagattctcggcgttggcccacgaaccggcgcgcactccacgcagttcggcgatctcacgctccgcgcgcttgccggtcagggcgtcacgcacggcgggaatgttgaacttgcggaacagcactacggccacgaccgcaagaatcacggccaaagccaggaatacgactgccagagtcctatagatatcggcgttcacttggcgtcccccttgatatcaacgaaagcgttggcgatggcgtccttggtgggcttttcggcctgttgcgcggctttcttgctggcatccagctcatcggtggtggtttcggtcttgtcggcaagcgatgcggcggcatcggccaaatcgctcatctgctgttgcgtgatgccgtccgcgcggaacttgcgcgggtacacgcgcaacgcgtccaaggtcaggttcgcggattcgaggctgatcacaccgttatcttcccgagcggcggacttcaccagttcgttcagcttgctgaagtacggcttgtacttgcctgaatcggatccttcgttgatcagcggcacgatctccgtgttgaagtcggcgatgtcggcgtagatcttggcgagcttgacgttgctgaagctactctcttgtgccgcgttgtgcatccactgcgaagcggcgcggatgcgggcgtatcgctgtggatcggtgttggcggcggacgcgctttggccggccatcttggagccggagtagtagtaccaatacatgcggccggtgtcgaagctcagctcggcccacttggtggagtccttgcgcaacgagtcggcgtgctggttgatcagcgtgttgtagatctgctcttcgtcgtcgctgaaatcactgtcagcggtgtaacgcttgatcagctgctcgtacggttcaatggcattggtcttgatttccactgcgcgcacgtaggcggcttctgcggcggatgcgtcggtggtctgcgccgcctggttcatccagtagtcgtaatcggtgttctgcgcgtggttggctagcaccaggctgccgccggcgagggccaggcagaccacggaggcgatcgccgtgccgaggaagccccaccacttggaattcagcgccttgcggtatgcggcgtcttcctgcttgtagtgtttcagcgcatacgcgaagtcggcgcaggtctggaagcgatcgtccggattcttgctggtggccttggcaatcaccagttccaagccctgcgaaagctccgggttgatctcacgaatcggcacaatgccgttcttgcgcgggtgtgagccagtcagcaggtagaacagggtggcaccgagcgcgtagatatcggtacgtgcgtccacggtgccgttatcggcgaactgttcgggagcgccgaagcccggcgtaccgagctggcggtcgtcaccgaccagcggcttgctgtccgcatccttgccggtctccagtgcaatgccgaagtcgataagcttgattgcgccctcaggggtcagcatcacattcgagggcttcatatcgcggaagatcaccggatgcttgcggcggtgcagatagtcgagcacatcgcacagctggatgccccaatcgaccacgtcttcttcggactgcgggccttccttcttgagcaggctcgccaaggtctggccttcgacgtaatccataacgacgaacaggctgcccttttcttcgatcaggtcgacgatacgtggaatcgccgggtgatcgaagcgcttaatcatattggcttcgacggtcaggctcttaatgaccaagtcgcgctgcaccggatcagaggcactgcgaatttccttgatggcccattgcttgttcagcgaggaatccattgccagatagacggtggacataccacccttgccgatctgggcaaggatcttgtaccgcttgccgaccaatgtgtttaaccccaccataggtggccctccaacacttgtctcttctcttacgacttccgtgcacgtaccgagtcacaaaccactgggagcggtacccacactcctaagttgccacactacccccgtaaatcgacaagaacaatactgctgtctgaaaatgcgagatggcccggaaccagacgagttccgggccatcttatcgggggtgaggagggttactcctcgatgtcaggctgaccgccctgatcggagtagaaatcatccgggttgaagtcgtcgccgagcttcagatcaccgaactcgagattcgagaagttcaggtcggacaggtcggcatcggagaagctcgcgtcgccgagatcaccatcgccgcccagaccgaagttcgggtagatggtgtcgcggatggccttgtcgggctcgaccacggcgttgcggtagcgggcgaggcccgtaccggccgggatgagcttaccgatgatgacgttctccttgaggcccttgaggtcgtcgaccttctcggagagggcggcttcggtgagcacgcgggtggtctcctggaaggatgcggcggacagccaggagtcggtggccagcgacgccttggtgatgcccataagcgccggacgaccgacggccggacggccaccgttcttgacgatgttgcggttgatctcgcggaagcgggcattgtccaccagctcacccggcagcaggtcggtgtcgccggagtcgatgatggtcacgcggcgggtcatctggtgcacgatgacctcgatgtgcttgtcgtggatatccacaccctgggagcggtacacggtgtgcacctcctccacgatgttgacctgggcggcgcgcttgccgaggatggtgaggatcttcttgggatccacggaaccttcgaccagctgggtgccaaccttgatgtggtcgccgtcggcaactttgagcggcacgcgcttggagacctgataggtgatcggcttgatcacgccgtcttccttcggcgcgccggaatcggcgtccggggtcaggatgatctggcgaccgcgatcgttctccacgatcttgatgctgccggcgaactcggtgatcggggcctcacccttcggggtgcgggcctcgaaaagctcggtgacacggggaagaccctgggtgatatcggatgccgcggccacaccaccggagtggaaggaacgcagcgtcagctgggtaccaggctcaccgatggactgggcggcgacgataccgacggtctcgccgacatcgaccagcttgttggtggccagggaccagccatagcacttggcgcacacaccgcgcttggactcgcaggtcagcacggaacggcacttgacttcctcgacaccgtgggccacgaggtcgttgagcacgtccatggacagggcgtcgtcgcgcttgtacagcacggtctgtccgtcggccgggtcgatgacgtcggcggcgagcagacgggagtacgggccaccgtcggcggccttgacgagcaccaggttgccgtcgttgtcgcgctcggcgacacggatgggcagaccggccttggtgccgcagtcctcttcgcgcacgatgacgtcctgggagacgtcgaccagacgacgggtcaggtaaccggattctgcggtacgcagtgcggtatcggccagacccttacgtgcaccgtgctgggagatgaagtactccagcacggacaggccgtcgcggtagttggacttcacaggacgaggaatgatctcacccttcgggttagccacgaggcctcgcatacctgcgatctggttgatctgcatcatgttgcctcgtgcaccagactgcacgatgatggccaggttggaggtcgggtcgaacttctcctcgacttccttggacacctcggcggtgcactcggtccacaggtcgatgagttcctgacggcgagcttcctcggtcaacagacccatctcgtagttggcgttgaccttgtcggccttggcctcgtactcggcgatcttctcgtcgcgctcgggcggctcgttcacgtcggagaacgcgaaggacacaccggaccacggtgcgcgggtgaagccaagatccttcagggcatccagcgtggcggccacctgctgggtggagtaacgcatggcgatgtcgtcgacgatcttggacagacggcccttggccacctgctcgttgacgaacgggtagtcggtcggcagggtctcgttgaacaggatgcggccgtaggaggtggcgaacagcacggtgccgtcgtggaagcgctcttccttgacgacctcgtcctcaccttcgcgcgggtcgagcaccttgacttcgccgggctcccagttcttcggcagtacgaagctctcgggcaggcggatgagcaccttggcctgcatgtcgatctcgtggcggtcgagggccatttcggcctcttccagcgaggagaacacgcggccctggcccttggcgccttccagcacggtgga

SEQ ID NO: 591 - DNA, 25945 bp, Unknown
  R14_15m  MAG No. k141_1141
ctgattcatgcagcgaggccgatgccgccaaatacgagggtatcgaaggcgattccgatggcgatgtggccgcgcacgccctgattgacgcgttgcttgccgccgcccgattgggagacattggttcactgttcggtgtcggtgcggacgcgcatggtgccggaaggcatggcatcgatatgctgcaagaagttgtggcgcatctggcatccaacgggtatacgccggcatcggcctcagtggcgatcatcggcaaccgcccgaaaatcggcacacgccgtgctgaagccgaagccgccctgtctgcggcggttggttgcccggtatcggttaccgccaccaccaccgaccatatgggattcactggccgcggcgaaggcatcgccgccatcgccaatgccttggtggagaagatataacaaagcccccgctatgaatttgccagcgggggcaagaaaaatgaatgagattacttccgcactgtctccacggccttggcgatagcccagaacagggtggaaagcgtcacgataatgaagctcgggggggcggggaacatcgccgacagcacgagtccggcccaaatcgacaccaggcacagcacgctggcgatcaccatcgccttgaatggggagccggccagaatattggcggtggccgcaggcgtgatcaccagcgcgaaaatcagcaaggtgcccactgccggcacggcaatggtgattacaccggccataatcgccataaacgccacgttcatcagcccgatcggcacacccttggcctgtgccacctgctcatccaacgagctgaacagcagcgggcggtagatgatggccaacaatgccagcagcaatacgtcgaacacggcgaagccgatgatctggccggtggtgatggtcaggatcgagccgaagaggatcgactgcatctgctgggaggcggaactcgacaatcgcgcgaagaacagacccaagccggtggcgaaggccagtacggtgccggttgcgatttcacgctcggaaacgcgcttgcccaaagcaccgatcaccagtgcgccgcccagtgcgaacacgcccatgcccagtgatacgggcaggccgagcaacaccgcgccggtcgcgcccggcagaccgatatgggccagcgcatgggccgcgaaggtggaacgacgggcgatggtgaagtatcccatgacaccggcggccagggcaatgcacaggccggcgatgaaggcgttggtcatgaatggagcggacagtgtgtccagccattcgggatcatacgaaaagttgatggtgctcatgtccctgtattttctccatgcctgagctgcagcccgttgacgggctgtggatcggctagcttgatgttatcgattctcggcgctgttggcggcactgccattggtggcgttgccgtgctcgtgatggtgcaattgcgccacttcggctgccgtgtgcatatcctgcggctggtcctggggctcatccggcgtcggggtcacgaacatgtcaccctgcggagtggtgaccacctgcacctgtgtgccgtagaggtgggtgagtaggtcggagtcgagcactttgtgcatatcggcgtagtgcgggtgcccgtcgagcaagtagacggcaccggtcagaatcggcaagagcatattgagatcgtgcgcaaccacctggatggtcatgttcagttcacggttcagcttggccagcacgtgtacggtggcgcgttgactggccagatcgaggttggccaacggctcgtcaagcatcagcagttgtggatcgcacaccaacgcctgggcgatggccacacgctggcgcaaaccgccggatagttcggacagacggtactgcgccttgtcggcgatgccggtgaactccatcgcctcgagcgctttggctttctggaccttggtgatggggtggatgccgaatcgggtgccggtcaggcccagcaacacggattgttcggcggtgagattggaatcgacattcgccacatagctctgcggcacatatccgatgcgtttgttcatctcgcccgcaggcttgcccagtacggtcaggctgccatggcaaagcggcaaaagtcccagctcggccctcatcatcgtggttttgccggtgccgttggtgccgacgatggccgtgaccgaaccggtgggaatggcaaaggtgccatgctgccagatgatatggtcaccacgcttgatggcggcatcgctgaacacgatgcaatcggaagtttcactcataacgcccgattgtggcaaacgatgctgacaatcgttctcaatatcgtgtacggatggtgacaaccaaagaaaagggttgtgcggccatctcgacaatggtcgcacaacccttctcgtgcaaggcgtctatcggcattgcacgaatccgatgccgttgtcctttgcttctaactatttgccggagtcggtctggtcgttgccggaggcatcgccggaatcgccattggaggcatcggcctttgccgaatcctgagacgagtcactggatgtggccgccttgcactgacggatgtacttgggctccgtgctggaaccggtgctggccttggaatcgtgcgcattggcatcatccgtggcggcgccgtcggcgctggaatcatcggaattcgcgttgccgtccgtggcgtcttcgcagccatagctcggatccaccgcgtcgatgatggtgttgatgagctggttgatccaggcgttcagcgtgtcggtatccttgggcatttgttcggagacgtcgactaccggcacatcggcacgaccggcagcgcctgtgatcatattggtcgcgtcactggcttcctgcgtgttgttaaccagcacatccacgcccttgtcttcgatgagtttctggaaagactgcaggtccgcgggggccggttcgccgccggaagcggtcgattgcgtataccccttgggcgtctgattcttgaacccgagatcggccatcagataatagaccacgggttcggtggctgcataggtgaggtcggagtgggatctggtgaactcggacgcccatgtttccagcgatttctcatccgcctgccatgccttgagccgcttctggaaggccttcttcttgctggggagtgcctttacatatgcatcggtgatggccgtggccatgctggatcgagcgtctttggagaaccacagatgcgggttatcgccttccatggcacccatgacggaagcggcggatacgatattcgtggtcttggtcatcgatttggtggcccaggaatcgtagcccgcaccgttggccacgatgatttgtgccttggacagcttggcgacgtccgaggtctttggctcgaaatcgtgggcatccacattggtggagttcacgatggacgtgacttccacatcatcgccgcccagctcggcggccagcgagccccattgattgagggaggcgaccacattgatcggcccggtcggtgcgggaacactggtcttgttgtccggctcggtttcagtgggggaggtggctgcgcatgcggcggtcgcgaacaacaggacggcgctcaggccggctgcggcgagtcgcgtaagtcgtgtgatttgagtccccatggcacgccttcttcgtgagagcgaacgatatataatcctgacttgttccaacgatagcctatcgtttcgatagaatgcaccgaaactacgggggagggcgttgatgtccacaaaaatcgacggtaagcggattgcggccgaaatcaagaccaaccttgccgagcgagtgaacaagctcaaggcgcagggcatccaaccagggctgggcacgctgctggtgggcgaggaccccgggtcgatgaagtacgtggccggcaagcacgccgattgtcaggaagtgggcattacctcagtcaagaaggaactgccggcggacgccagcttcgacgacatcgccgctgccgtacgcgaactcaacgaagatccggcctgcaccgggttcatcgtccagttgccgttgcccaagggcatcaacgagaacgcgatcatcgacatgatcgacccggccaaggatgccgacggcatgcacccgtacaacctcggcgaactggtgctgcatgtgcgcggcgacatttcgacaccgctgccttgcactccgcgcggggtgctcgagctgctcgacgcctatgacattgatctgaacggcaaggaagtgtgcgtgcttggccgcggcatcaccattggccgcacgattggcctgatgctcacgcgcaacgccgtcaacgccaccgtcaccctgtgccacaccggtacccgggatgtggccgaccacatgcgccgcgccgacgtgatcgtcgccgcaatgggttcggccggattcgtgacgcccgacaagatcaaggacggcgccgtgctggtcgacgtgggcgtcagccgcgtctacgacgaagaagccggtcgctaccgcatcaagggcgacgtggacaaggcctgctacgacaaggcctccgcctacacccccaaccccggaggcgtgggccccatgacccgagccatgctcctggccaacgtcgtggaaatggccgaacgacacgcctagagtttcctaggaaatttgggcagagttgcttgtattgtgaatatctgtatgcctgtaagggtgtgcgtataactgaatatcgagaaattatccatccactattagaaaccatatatttacatggcagagaacaacactgaagtcgccaaggttgccatcaacgacatcggcaccgaagaggacttcatcaaggcagtcgattccaccatcaagaacttcgatgatggtgatctggttgagggcaccgtcgtcaagatcgatcacgacgaagtcctcctggacatcggctacaagaccgagggtgtcatcccctcccgcgagctttccatcaagaaggacgttgatcctgacgaagtcgtcgaggtcggcgacgccatcgaggcccttgtcgtcaccaaggaagacaaggaaggccgtctgattctgtccaagaagcgtgcccagtacgagcgcgcctggggcgacatcgaaaagatcaaggaagctgacggcgtcgttgagggcaccgtcatcgaagccgtcaagggcggcctcatcgtcgacatcggtctgcgtggcttcctgcctgcctccctcgtcgagatgcgtcgcgtccgcgacctctccccgtacatcggccagaagatcaaggccaagatccttgagctcgacaagaaccgcaacaacgtggtcctgtcccgccgccagtacctcgaggagacccagtccgaggtccgcgagaccttcctgtcccagctcaagaagggccagatccgtgagggcgtggtgtcctccatcgtcaacttcggcgctttcgtcgatctcggcggtgttgacggcctgatccacgtttccgagctgtcctggaagcacatcgaccacccgtctgaggtcgtcaaggtcggcgacaaggtcaccgtcgaggtgctcgacgtcgatctcgaccgtgagcgtatctccctgtccctgaaggcgactcaggaggatccgtggcagcgcttcgctcgcacccacgttcccggccagatcgtcaagggcaaggtcaccaagatcgtccagttcggtgtcttcatctccgtcgaggacggcatcgagggcctggtgcacatctccgagctcgccaaccgtcacgtcgagaacccggagaccgtggtcaagccgggcgaggccgtgttcgtcaaggtgatcgacgtcgacctcgatcgtcgccgcatctccctgtccctcaagcaggccaacgactccgtcgacccggcttccgaggacttcgatccggccatctacggcatgccggccgagtacgacgagcagggcaactacaagtaccccgaaggcttcgacccgaacaccaacgagtggatcgctggttacgagaagcagcgcgaggagtgggagtcccagtacgccgccgcccacgagctgtgggaggagcacaaggagttcgtggccaaggagctggagaacgctgccgaatccgcagccgccgacggccagggcccgaaggaagagaagccggtcgaggagacctccaactactcttccgctgctccggctaccggtaccctcgccgactccgatcagctcgccgccctgcgcgaccagctgctcggcaagtgagttcgccatcgggcgactgacgcctgacgtatagtcaaaacccggtctcgcttcggcgggccgggttttgccgttgtgtgcatgaacctcgaaacatggccatgatggggggagcatgattcgaataggattgaccggtggtattgcggcgggcaaaagcacggtgtccacaagactgcgggagttcggcgcggcgcttatcgactatgacgagctcgcgcgccgagtggtggaaccgggcggcgtcggtcttcgtcgtatagcggaatgtttcggccccgacgcgctgaccgatcaggggcggctcaaccggcgatggatcgccgagcacgtgttcgccgggcccgactcggaacggttgcggaggaaactggacgatatcgagcatccgttgatctatgatcttgcgctgtctcgggagcggcaggcggtcgcggacaatccggatgccgtggtcgtgcatgatgttccgctgttggcggaagtcctggacgccatgcccatgcgattcgaccatatcgtcaccgtcgaagcgcccgaacaagtacgggtcgacagaatggtgtcgacccgcggcatgacgcgagatgatgcgcttgcgcgcattcgccaccagtccagcccggaacaacgccgtgtcatagccgacgcggtgatcgattccacgcagccgatgggtcgaatgctcgaagccgtcgatgcgctgtacgaacagtggctggcggaatcataatgcgatgatgcggtcggcgagagccgcggtctcctcgttgtgcgtcgtgtagatcacgatcgctccgttgtcggcgaaatcacgcaggtgacgcatgaccatggcgcggttgtcggcatcgagggccgctgttggctcgtccgccagtatgacgcgcagcgattgacggatgagaagcctcgcgattgcgactcgttgttgttcgcctccactgagtgtgtagatcggtctattgccgtagcccgtcagattcacggctcgcaatgcgcgtctgatgagccgacttctatctgccgatggtattccgacgctgcgcagagccagaatcagatttctgttcaccgtccattgctccaccagggcgtaattctggaacatgaatcccatgacgttgcggtgcatgagccgtcggccctttctggaggcaattgtttgcccatcataggtaattgttcctgaacttggctcttccaaaagacctaggacattcaacaaagtggttttgccacatccgctttctccggtcagggcaaccatgtcaccgggactgaatgtcaggttcagtccttcccataaggtgcggtcgtcgattcgatatgtcagattatgcgtgatcaataaggcgctcatgattgatgttccttacgtggtaagcggttgctgatacaggtttgtggatggcgatcagggatgtttgatactgtcggcgcgcagccgcgaatcgtaaagcactgtggttgccagagaaacgacgatgaatagtaaggaaaccgaggtcgtggaaacggcgttgtaacctcctatgagcaactggatcggaagagatgcactgcataacgccgctgctaggaacagtatcgattgaaaacggagatatgacggcgctccatgcatatattccacgaacataatttgacgtcggagtgtgcatagtgtcaaagccaccatgattgcgccgcccagcagacatgttatggatatgcaagctgtgatggaacaatagttcatttcctgagttgttcgtgccaaacgagtttgtatctcgtcgtgccgattgacgaccgaagccaccaaagagtccacgcccttttcccgtaggatttcgagcagctgatggcgggagctgtaatcgaaggtcatgccgccggtggacaccatcgatgtagtggtatcgccagagagcagtgacgggtcaatgacaacaacaggaacagaggaaaggccatcggtgttggaaggggtgtcaaatgccgataagacagcatctcttggtctggattcaatggagatgctcgtgcgattgatggcgggcagactctttccctcttctgccgccaaactttgctcgaatgagtatgcgcgaagcacattgttcgtaatggattcgctgttccattgttcattctcgggcataatcacactgattcgtgcaagtgtcgtgttgtttcgtataagatgatgaagccttgccgtacgggaatccatgaggatgcagggctgtgggtcttgcgagctatccacccacgtgcatcctagccggaatgaggcgaatcgcgtatgttctgattgggaagtttgttcgacgaagtcgttccatgagggcatggaacgagctcggttttgatcgctgctataccacagttgcaattggaatccgtcgttggatgacaattgatgctccaatgttgttttcagtgtttgggattgccgccatttgaagttcgtaacgttcaaactggcagagctgagagcgagaacgatgattgccatgatgcagccggaagccatgagaaaacgtaaagggcgctttccttggattaatttgagtgcgttcggcaccagaacccttactagagcaatcgacaatgacaaggcaaccaatgccatgcacgttgtggcgatgatgatggagaggaatacctgaccggcgaatcctaagggagaagcgaaaggccagaagatcgcaccaatggaaatccaagtcatccatccgatgcagacgcagatgatgaaaaagaacgcatgccgcaggaattgcctcataataatgccggttgttctcatgccatgcaaggcttgtatcgcgcaaacgcgtgaagctgtcgacacggaaagcgcgccggacacaaatactacagcaagtccggcgaatatgacttgggcgatggaattggagaagaattgtttggtgatttgtgtgatgccgatgggggttgctctgttaagttcgaatccttggcgccgtatggatttggctactgaagcggtatcccgtggtgatccatagagaagccctcttcccaatgggtcggtgaatctgtctccgcgttgcacacgtgtgcgcggcccgaacccataatccgggtatggcgaattcgcatgcatgccgttgccgtctaatgcgccgaaaatagaaattacgcgtctgttggtaccgtgaccgtccggctcataggagactctcgcgagtccgacatgatgggtcgctgcgagaccggtcaatgtcgatagagtctgcccgtgcgcgtcggaaattccaatatcgtagctagggccggagggataggtttcttcgttattctgcgcatagaatcctgctgcgagagtgatgagagccacggccaatatactggcgattttataagtccagtgcatgatacaccttattcccggtaacaatgtgtttgtgcggcggacgataggaagttcgctcgccgcacattcaataaatggtgtggatgctgcgaaatgattcaagcatcaaatccatagaaagcttgatccactttgccgcataccgcgtaagtccttgcggaggcctccggtgattttctttgcgatcatgagtgctccttgttgtccttcattgagcggctgttttgccgcatgcaacacggtaagatgccaatgaggagcgaacgaagtctgtgtgacgggaatcgtcacagtgttacgatttcgtttgacggaggcgattcggggagggggtacttatgaagaacgggcgcctgattcggcttgccttggtggacaacgatcgttgctctgcggagatgatggctttgcttattggcaggacgattcccgaggcgcatatgctatgggttacggataatcccagtcttgccttggaacgttgtctgttcgatccgcggaagccggacatccttatttgcgatctcatgatggacgggctgaacggagtgcggctgacggaacgtattcgacagcggaacgtgcaggttggcgtcatcgtagtcacttcgtatgacctggcaacctatggtgaggatatcgcgtgttgcggagcccaagcgttgatttcgaaaagagatttcgcagcgaccatacgcgaggcggtcaaatcggtgtttgacgggggaacataccctcatggttggggtttgcatagccttgaagagacattgcatacggtggatgccgcacagccggaagcggatggtgccaggctcttctccgatcgagagctggcggtgttgcgtctctatgcacatcatgtaccgaccgttgaaattgcgcgccgcttgggaatcggtgtcgaaactgtgtacagctatgtgaaacgagccatgcgcaaggtcggggtgacgaggcgcggcgaactccttgattactgtgagcgataccatgttctgtgacggcagccgttttcttagacgtcgcttccgcgatttcgggaagtcttggcatggcgagaagatcgcggcgctagcctgcgccttgtgcatagccgctgatacggtcatcgaatcgtgtatcaatccggtttgggatgcgtgggccctgtgggtgggtctgttgttcgtcatcctgtcgttgctctgcgtggcattcccgttcggcggcaatatcgcgttggcgatctcatggtgcgtggtgttccccttgccggtggatctgtccatgtcggtgagcgtggtgatagccgagccattaatcgtcctctcctatcaacgcatatggtgcggcgtggtgttggcggtggctgtgaccgtatctcgcgtggcgcagctgatatggcagtatgggttgccgatgggttgggatgccggggcgttggtgtccgttgtgccttggaccgtcatgccggcgttggcgtgcgttggaatcggtctgctgctgaattggcatcatcgtgagggggagagggagtcagaagcgcgtggcagggccgaatcgttggatttggcggcaaggctgcatgatgcgacgaccaatgatctctcatatctcatcatgagcatcgacaggatcatgtcggaacacccttcgcaaggagagtcgatggacttgccactgttgcgcgaagtggctcaacgggcgctcgatcagacgcatgatgtcatagcggttctcgcaaagcacaatgtcggtactgcgcgaatcccgcgatgccatgcgcgtcgctccggagaagccatcgttccgatcggtgcaggtcgattcgaggccgagatcgaacggcaccggcgggaactcgcagcgcttggtttccgaggcgaggtggttgtgtccgatcccttcgatctcctgagtcggtttgacgagaagactatccagttgacgcggtcgttgctggaagagacgtttgccaatatcgccaagcacgcggatcgcgaacaagggtatgtactcgccatacaagtgcggcaagacggactgtacgtatcggtggctgacgttcccgccaagatggcggatggagcattggcggaatctccgagaacattgggcatgggatttggaatgtctcatctgcgtcaatcaattacgcggagcggtggttggctgcgcgtccaagaggaagacgggtattggagttgcctagcgtatattccgatatatcatcgggatacagcgtgaatcggaaggaaacagcgcatgggattcaacatcgaacgtgtggacaagccgtttgtggtcaaatcgccgtaccaaccatccggagaccagccgaaggccatcgaggaactggccacgcgcatcgagaacggcgagaacgacgtggtgctcatgggcgccaccggcaccggcaaaaccgccaccaccgcatggctgatcgaacggctgcagcgtcccacgctcatcatcgagccgaacaagacactcgccgcgcagctgtgcgccgaattccgcgagctcatgcccgacaacgcggtgagctatttcgtttcctactacgactactatcagccggaggcctacataccgcagaccgacacctatatcgagaaagactccaacatcaacgacgatgtggaacgtttgcgccatcaggccacggccaacctgctgaccagacgcgactgcgtggtcgtggccaccgtctcctgcatctacggcctgggcactcctgaggaatacgccgggcgtatgctgtttctcaaggaaggccagcagatcaatcgcgacgacctgctgcgccggttcgtggccatgcagtacaagcgcaacgacatcgccttcacccgcggcaccttccgcgtgcggggcgatacggtcgaaatcatccccgtctacgaggaactggccgtgcgcatcgaattcttcggcgacgagatcgaccgcatctccaccctgcatccgctgaccggcgatgtgatcgcccatgaaccgcaggtccatatcttcccggcttcccactatgtggccgggccggagcgtatggaacgcgcgctcaaaaccatccgcgaggagcttgacggacggttgtccgaactgcgcaaacagggcaaggaacttgaggcgcagcgtctcgacatgcgcaccacctatgacctggagatgctcacccaggtgggcgtgtgctcgggggtcgaaaactattcgcgtcatctcgacggccgcgcggccggcacgccgccgcatacgctgctcgacttctttccggatgatttcctgctggtcatcgatgagtcgcatgttaccgtgccgcagatcggcgcgatgtacgagggagacgcctcccgcaagcgcacgttggtcgaacacgggttccgcctgccctccgcgatggataaccgaccgctcaaatggccggagttcctgcaacgcgtcggccagaccgtgtatctgtccgccacgcccggcgactacgagttgggcttgtccgacggggtggtcgaacagatcatccgtccgaccggcctgctggacccgaagatcgacgtgcgcccggtcaaggggcagatcgacgatctgctcgccgagatcaaggcccgtgtggccaggaacgagcgtgcgctggtgaccaccctgaccaagaagatggccgaggatttgaccgactatctgctggaacgcggcatcaaggtcgaatacctgcattccgatgtggatacgttgcgccgcgtcgaactgctgcgcatgctgcgcgaaggcaagatcgacgtcatcgtcggcatcaacctgctgcgcgaaggcctcgatttgccggaagtgtcgctggtggcgatcctcgacgccgacaaggagggcttcctgcggtcctaccgttcgctcatccagaccatcggccgtgccgcgcgaaacgtgtccggcacggtgatcatgtacgccgacgagaccaccgaagccatgcggcaagccatcgacgagaccgaccgccgccgcgccaagcagatcgcctacaaccgggaacacggcatcgatcccaagcccctgatcaagaagatcagcgacgtcaacgacatgctcgccaaggaggatgtggacacccagaccttgcttgaaggtggctaccgcaacgcgggcaaggccggcaacacacacctgggcgtgccggtactcgatcccaacgaggcagacaaacgccacgaggagatcctgaaggccggcctgcccgcgcaggacctcgccgacctgattcgccagctgagcgaacagatgcacaccgccgccgaacaactccagttcgagcttgcggcccgtctgcgcgacgagatccgtgatctcaagaaggagctccggcagatgaccgaggcggggcaatgacccgtcacatacatgggttagtgtagggaatcatggcagaaaccccactcgcatttgaaatcatcaccttcgtggtgctcgcgctgttcttcatcgtcgacctgttcgtcatcgggcgccgaccgcatgtgccctccaccaaggaatgcgtgcagcatatcgccttcttcgtggttatggcgctgatcttcggcggatgcatctggttcttcgccggctccaagcccgccatcgagttctattccggctggctcaccgaatactcgttgtccatcgacaatctgttcgtgttcgtcattatcatgtcgaaattcgcggtgaccaagcagattcataagaatgtgctgtccgtcggtatcaccatcgctttgatcttccgtggcattttcattctgatcggcgcggccctgatcacccgcttcacgtgggtgttcttcctgttcggcgccttcctgatctacaccgccgtcaaactggtgctcggcggcgatgaagacgaggaatatcacgaaaacggcatcatccgtaatctgcgcaagatcatcaagatcaccgacgactacgacggcgagaagctgcgcaccaccaagaacggcgtgcgttactggaccccgatgctcatcgtgttcctgaccatcggcaccaccgacgtcatgtttgccttcgactcgattcccgcgatcttcggcctgaccaaggatccgttcctggtgttcacctccaacgtgttcgccctgctcggcctgcagcagctgtacttcctgctgggtgctctgctcgacaagctcgtctacctgcctgccggcctgtccgtggtgctgggcttcatcggcgtcaagctcatcatggaggccctgcacggcaataccttgccgttcatcaacggcggcgaaggcatccattgggtgccggaagtgcccacatggctgtcgctggctgtgattgtggtcgcaattggcggcgcatccgtggcttccgtgatcaagatgaagagcatggaaagcgctgaaaaggcctgaaaccgttagagaatacagcccttaaacctagtcaacacaacaatgtgagcgctcacaacacaccgtgaagaaaacttgtcatgagtcggctcgcgctagtagactgggtttcggcaaatggggcaatcgtgcctcgaaccaaattgaacaagaataggcaggcattcatgcgtaaagccaagatcgtagacaccatcggtccttccaccgaggattacgacaacctcctgaagctcgttgaagccggtatggacgttgctcgtctgaaccgctcccacggcacccccgaggatcacctcaaggtctacaacaacgtgcgcaaggccagcgaagccactggtcgcaacgttgccgcgcttgttgatttgcagggcccgaagattcgctgcggttggttcaagaagaacgccgatggcgaagacaaggttcagctgcagctcggccaggaattcgtcatcaccactgatgacgtcgagggcgacgagcacatcacctccaccaccttcaagggcctgccgggcgattgccacccgggcgacccgatcctgatcgatgacggtaaggttcgtctcgaggtcaccaaggtcgagggcaacaacgtgtacaccaaggtcgtcgtggccggccccgtgtcctcccacaagggcatcaacctgccgggcgtcgccgtctccctgccggctctgaccgagaaggatgaggctgacctgcgttgggccatccgcaccggtgccgacatcatcgctatgtccttcgtgcgtttcgccaccgacatcgaccgcgcccacgagatcatggacgaggaaggccgtcgcatcccgatcgttgccaagatcgagaagccgcaggctctggagaacctcgaagagatcgtcaagaccttcgacggtgtcatggccgcccgtggcgacatggccgttgagtgcccgctggaagaggtcccgctggccaccaagcgcatcatcgagctggcccgccagtatgccaagccggtcatcgtggccaccgaagtcctcggctccatggtgaactccccggtcccgacccgtgcagaggcctccgactgcgccaacgccgtcctcgacggctccgacgccaccatgacctccaacgagaccgccgtcggcaagtacccggatgtgaccgtggccaccatgtcgcgcatctccggctacgccaccgaccacggcttcgaccgcatccccgagctcaagaacctcgacatgtcctccaccggcgccgtctcctccgccgccgtggacctggccgacaagctcaacgccaaggccatcgttgcttacacccagaccggcgccaccgtgcaccgcgtctcccgtgagcgtccggccgccccgatctacggcctgaccagcaacgagcacacctaccactggctggctctgtcctggggcaccgaagccttcctgctcaaggaggactaccacgacaagtcccgcaaggatctgatgatctacacggacaaggtcctcaaggatgccggcaaggttgctgacggcgacaagatcgtcatcctgagctctgctcagggcgatcaccagccgggccgcaccgactccatctacgtgcacaccgttggcgcttgcgactgatttcaggccgctggtagctgctgacagctagcacatagcacgcgaaagcccccccatccagaaagtggatgggggggggctttcgttgtccgttatgttgcgattgtgcggtgattgcaatggcacgtagtcaccgcgatgatcgagcgtggtgactagtcgttgagatgatcgagcgtgccgctcttcagacgcagaatggcgaccatggtcttggcatccacaatcgtgccattgaccaccatctcataggcatcgtccaccgacaccatacgcacgtcggaacgcggagtctccgggccgatttcctgacgggaagccggggtaagtccggtggcgaagaagattgcggtgtgctgggtggaatagctcggcgtgttcataaaacgggtgaactgcgtaagcttggaggcatcgaaaccagcctcttcggccagcttgcgcttagccacatcggtcgggcgttcggacgggttgttggcgtggcctgccggaatctccaacgtccaacgatggttggcgatgcgatactgctcgaccagcggaatcatgccgtcatcggtgacggccagcacagccacagtgtcgccattgttctcctgaacaaagtagcgttcaaacgaaccgatctgattcgactcataggagacgtgatcgacattgaaataatgcgtctccacaatctgtctacgggaaatctccttgaccggagaggggcgccagggatcgaactgacggtaagtttcgttgctcataagccctcctaacaaaagcgatacatcgaaactacagcccattgtaagcggtgaaaccacgcagaagaacgggcaacacacgggtacgccgtccacgatatcgacgtgtttcgcctgttttaccgggggggaaatggaggactggcgcgtgtcttgtgtcgcaggagtcgaatcggtatgctactctcttcagagtgcttaggcacgccctcgtatcccaattggtagaggaagcagcctcaaaatctgcgcagtgtgggttcgagtcccaccgagggcactttagctaggagttcgctgaaattattacgaaccccattgttgggtaattcaagaaagaggttggcatggctgcaaggaagaagtccgaagaaccgagtatcaacgtcgatgaggtgctgaccgacgaagaactcaaggccgtagccgatgaaagcgaacctgctgagcgcaaggccgtggccgaggatggtccgcgtaccgtcgtcgtggccgaggatgaagccgtgaaccgcatggatctggtcgccatgctggaagacaacggttatgaggtcgttggtcaggccgccaacggcgaggaagccgtggaactgacccgcaagtatcgccctgatgtggtgtgcatggatgtcaagatgccgcgtatggacggcatcgccgctgccggcattatctgcgatgagaacatcgcccctgtcgtcatgctcaccgcattctcccagaccgatctggtgaagaaggccaccggtgccggcgccatggcatacgtcaccaagccgtacgaggaatccaagttgctgccgaccctcgaggtggccatgggccgtttcgccgagatcaacgatctgctggacaacgtggagcgcagcgaacgcaagctcaaggaaaccaccgaccagctcaaggaaaccgaagagaagctcaagaaggccgaagacacgcttgaggagcgcaagctcgtcgaccgcgccaagggtctgctgatggacaaggctgacttctccgagcagggtgccttccgttggattcagaagacctccatggaccagcgcatccccaagaagcgcctggctcaggccatcatcgccaagtacggcgatccgaagccttctgattcgggcgaacgctgattatcggcatcaccgtgctgagtcgtaaagcaacacaaacacactatgggagaggccagcgtgaccgtacccaccaatgaaacattgctggtggtggacggccactcgctggccttccgtgcatttttcgccctgccggtcgacaacttcagtacttccagcggccaggccaccaacgccgtctggggttttgccaccatgctcgcgcaggtgatcgatgcggagaaccccgaccatctgggcgtcgccttcgatgtgaagggcggcacattccgcaatgagatgcttccgcaatacaaaggcacccgtgaggcggctcccgaagagctgctcacccagctgccattgattcaacgcatgctcacggccctcggcgtcacctacatcgagaagccgggattcgaaggcgacgatgtgatcgccaccctcgccaccatgggagacaaggccggctaccacacactggtattgtccggagaccgagacgccttccagctggtggatgacaacgtcaccgtgttgtacccgggccatcacttcaaagacctgaagcatatgacgccgcagtccatcgtcgacaaatacaaagtcactcccgcacaatatccggatctggcggcgctccgcggcgaaaccgccgacaatattcccggtgtgcccggtgtaggcgatggctttgcggccaagtggatcaaccaattcggttccctcgacggcatttgcgagcacgccgatgaaatcggcggcaaaaaaggcgaatcgctgagggccaatatcgaccaggtcaagctcaatcgcaaagtcaacgcactggtacgagacgtcgatcttggcgtcgatattgaggatctgacattcggcaccgtggacgtggcacaaatcgacgccctgttcaaggagcttgaattcggaccgcgtaccaggagtcgtgtactgaaaaccttcaataccggtgccaaggtttccaacacatacggagccggcgagtctacgaataatgaacaggacgagcaggataacagtctcgatctgaacctgccggaacccacgagcatcacctcttcggagcagttcgacgaatgggtcaaggcccatcgcgccgaggtcaaagttcccggtgaaatcgccgatttcacggtttccgactatggcgatggatcgcagcggcataccgtctgcggcgacgcggtcggccacgcttggaccgtggccgcatggggcgacgaaaggccgggtcgtgccacggcacaagccattgccgttgccacggcaacatcagcggccatagtgccccttccaatcaccgataccctgcgagcacagcttgcgcggttcctgaaaagcgaacactcccgcaccatcgtgcatgggtataaagaattgctgcatcttctgggcgcggtagatcttgacatggacctgccgatgttcgacaccaagcttgccgggtatctgacccaaccggatttccacgccgatagcctcaagcaggcggccgagcacttcctcgacatccacttcaccgaaaccgaacagccttcgcaaggcacgttggacttcgatgacgatcaggtcgaagaagatccgaacgaacatcgtctgcgcgatttggccattatccgcagcctcgccgtcacgctcgggccgattatcgacgagcgcgaacaatgctggctgatgcgcgcgattgaacttcctgtttcccgcgtattgcacggcatggagcacacaggagccaaagtcgatagcgttcgactcgtttccatgcgtgaccagtttgccgccgaggctcgccaggcacaggaaatggcttgggagtatgccggcaccgaaatcaacctgcaaagtcccaagcagttgcagaaggtgctgttcgaagatatgggtttgaaacccaccaaacgcaccaagtccggctcatacaccacgaatgctgccgcattgcaggatctgtatgtcaaatcagtggacaatgagcgggccaacggtttcctcggggcgttgctgcgccatcgagagatcaacaagctcaagcagatcgtccaaacgctgatcgatgccaccaacacatcagatgagcgcatccacaccactttcgagcaaaccgttgccgccaccggtcgattgagctccgtggacccgaacctgcagaacatccccaatcggaacgccgccggtcgtgagattcgcggcgtgttcgtgccgggggagggatacgaggccctgatgagctgcgattactcacaggtcgagctgcgcatcatggctgatctgtccggtgatgaggcgctgatcgaagcgttccgctccggagccgacttccacaaatacgtggcctcgatggtctacaagctgccggtcgaccagatcaccggcgaccagcgcagccacgtaaaagccatgagctacggattggcctatggtctgagcacgtatggtctcgcccagcagctcaagatcgcgccacgtgaagcggaagcgttgaaaaaccggtatttcgataccttcggcaaggtgcacgattaccttgaatcgctggtggccaatgcccgagagaaggggtatacggaaaccattttcggacggcgtcgctacttcccggccctgcattcgaccaatcgtgttgcgcgtgaggccgccgaacgtgcggcactcaacgcaccgattcagggatctgccgccgacatcatgaagatcgcgatgattcgcgccgagcagaccttggcaggggcccacgtcaagagccgtatcattctgcagattcacgatgaactggtagtggaaatcgcgccgggagaaggcgaccaggtcaccgaactggtacgcaacgccatggaacacgccgtcgaccttgccgtgccgctggacgtatcgtgcggcatcggttccgactggcagctcgccgcacactgacaatttctagctcccctcgggtgaggggtgctgagccgttgagcaaacagtccagtggattgtgtgtaggcgaagacgagacgatagtcgagcaatgaagagcacgagcatggcttgtccgcaattgcagaatgagtcccttgccgcaatagcccactacaatgggacatatgccgaatctcaagcaagtcatcgacgttctcgagaccctgtacccattgcgctacgccgaggaatgggatgagccgggtctcatcgtcggcgatctgagccacgacgtgcaccgcatcgtgttcgccgccgacccgacctccgccatcattgacaaggccatcgccaccggcgcggacctgctcatcacccatcacccgttgttcttccgttccgtacacgagacgagcggactcggtttccggggcgacatcgtccgcaggctctaccagcaaggctgcgggctgtgggtagggcacaccaatgccgacgctgcgtatcgcggcgtggggcaggctgcggccgactacttcggactcatcgaccagaaaccactcgtgccgattgacgatgccaacgcctctcatccggtcggcttggggcgtgtgggtcgtttgccgaagcctgttgccctgaaggatttcgctcagcgtgtattcgacgaagtgtccgatcatggcatgaccaccgcgctcggcatccaggtatgcggcgattcggacacttctgttcagtatgtggccattctgcctggctccggtgactccctgttcaacgaggtgcgtgccaccggtgcggacgtgtacgtaaccagcgatttgcgtcaccacccggtgaccgacgccatcgaacaagcccggtatgaagcccgtatgagggcccaaggcatcatgctcggccatggaatggcgggggagagccatgtgcgtccctgcttcatcaacacccctcatgccgccatcgaatccatgtggttcaactacgcgatcgatgacgtgccggccgccatcgaacaagcgaccggagcaaggcctgaagtcgagtggttccacgacacgaccgatccatggacgctgtccattaccgcgcatcgagattaaggcgctatagtgacgtggcgaaaacgttttttccgaggagatgacatgtttgggggaagcaagcaggaacaactggagcatcggctcgaccataagctgaacgcctcctcggacggcatcgacatggacgtgcccgccaaagtgatcagtagcgaaaccgtttataccgggcgcatcttccacgtggacgacatgcgcatcgctctgaccgacaagcagggcaaggaacacgagatcggccgccaggtgctgcgtcacgccccctgtgtggtcatgctcgtgcacgacatgtccaccgaccgttacctcatcgaacgcgaataccgtgccggatcggacatgttcgcctacgggcttcccgccggtctcatggacgagggcgaggacatcatggacgcggccctgagggaactggccgaggaaaccggcgtggtgccggaccgtgacaccatgggtgttgacttcgtgggcgatttctactcgtccgaaggcatgaccgacgaactggcccacatcatggtgttgcatttgggcccgttcagacgggagcagcgccatttcgacgcggacgagcacgtggaatccgcgtggattccgtggagcgaccttgccgccacgcgcatcacctcatccaattcgatgatcgccatccagcatgaggcgttacgcagactcatcgccaggaactccgacaaagacaagccgtcgctgttctcctgacgttcaactccccggcacatcagtgacacaagaaagtgggatactgaaaactatgcagatcagacctggatcaatgtatccgctgggcgccagctatgacggcgccggtgtgaacttcgcgctgtactcacaggttgcgcagaaagtcgagctatgcctgttcgacgagcacgatgcggaaacgcgcatcgaaatgaccgaacagaactcatacgtatggcataactacatccccggcctccagcccggccaacgctacggctaccgcgtctacggtccctatgacccgatgcacggcctcagatgcaaccccaacaaactgctgctcgacccgtatgccaaggccatcgaaggcaacatcgacggcgacgaaagcctgttctcctactggttcaaaagcccggacgacacctcggcgatgaacgaccttgactcggccgcccacaccatgaagtcggccgtcatcaatccgtatttcgactggggcaacgaccagcacccctacatctcgtaccacgattcggtgatctacgaggcgcatgtgcgcggcatgaccaacctcaacatggacgtgccgccggacatccgcggcacctacgccggcctggcctatccgagcgtcatcgaatacctgaagaagctcggcgtcaccgccatcgaactcatgccgatccaccagttcgtcaacgactccttcctgcaggagaagggcctgtcgaactactggggctacaacaccatcggcttcttcgcgccgcacaacgcctactcctcctccggagagcgcggcgagcaggtcaacgaattcaagtccatggtcaaggcctaccatcacgccggcatggaggtcatcctcgacgtggtgtacaaccacaccgccgaaggcaaccatatgggccccaccctgagcttcaagggcatcgacaacgcctcctactaccgactggtggaaggcgaccagcagcactacttcgacaccaccggtaccggcaactcgctgcttatgcgctcgccgcacgcgctgcagttgattaccgattcgctgcgctactgggttaccgaaatgcacgtcgacggcttccgcttcgatctggccgccacgctggcacgccagttccaggaggtcgacaagctgtccgcgttcttcgacatcgtggagcaggacccgatcatctcgcgcgtgaagctgattgccgaaccgtgggatctgggctccggcggctatcaggtgggcggcttcccgtccagctggtccgaatggaatggccgctaccgcgacaccgtgcgcgacttctggcgctcgcagccctccacgctgcccgaattcgcctcgcgcctgatgggcagttccgatctgtatcaggtcaacggccgtcgaccggtggcgtccgtgaacttcatcaccgcgcatgacggtttcacgatgaacgacctggtcagctacaacgaaaagcacaacgaagccaatggcgagggcaatcgcgacggcgagagcaacaatcgctcttggaattgcggcgttgaaggcccgaccaatattccggacgtcaacgacttgcgtcagcgtcagatgcgcaacatgttcgccacgttgctgttcagccagggtatcccgatgatttgcggtggcgacgaagtggcccgcacccagcagggcaacaacaacgcctactgtcaggacaacgagatctcctggaccaactggcatcttgacaagggacgcaaggaactgctcgccttcgtttccaaactcattcatctgcgtttggatcatccggtgttgcaccgccgtcgcttcttcacaggccgtgagcccggcgacgattcgaacatgattccgcaggtcgaatggttcgaccacaccggttcgatcatggatatggacgactggcagaacacgcatgcgttctccatgatgatctatctgaacggttcggatattccggaggtcgactggtacggcaaccggatggtcgacaatgacttcatcctgatcttcaacgcgcattacgagccgattatgttcaccctgccggatgagcgatacggccgcaaatggcagctggtcgtggatacgcacaacccggatgggccggaactgagctatgaggcgggcttcatgatcaccgcccagtcccgcagcttcctcatgctcatgagcgacaaaaagcccaagaagcccatgggcctataaccagaccgaatttaagctccctctgacgagggagctcccagtatagccgggtgagggagagaccgcagcaaagccgcgaacccctactcgcgccccttacgctcctccacgagccgagcatccccgaacgcaagtagatgctcgccggcaagcgggcgcggctggtcgagcagctcgcggaaatccaggattccatcgacttcatcgacgccaaacagcgcttctacgacgacgtcctgtctggcgcaaccccatacgtaagcgtgctcatcccatccgcggcgctcgcaaaggagtcagaggaaccgggagcattgaagggtgcggagaggaaataggttcgaccgagccgtttcttcctccgggatgcaagtgcgaacaacggtttgttgtacccgcgcttggcgaacgggacatgcccttagactggaatcagcaagcgcacagcgagacgcgcgaatcgttttccgatgtcgggaggtagtcatgtcgatcggtcaggttatcaaagtcgtgcgcgaggagcgaggtcttacgcagtcgcagttcgcgcacgagctgttcgtcacccaaca

SEQ ID NO: 592 - DNA, 14818 bp, Unknown
  R14_15m  MAG No. k141_1155
cacctacggctcccccatcgtgctgcgtccggtgagctcggaggacgccatgaccgccgactggtctcgcgtgccctacgatgtgctcgccacgatctccacgcgcatcaccaacgagtgccgccagatcaaccgcgtcgtcctcgactgcacgtccaagccgccggccacaattgaatgggagtaattgctctctgtgacgaatgggattctccatcggggaatcccatttttgttgccgacgatgcccggtataattttttcgcttacgacgtcgtccggaaagggatgccgacctctttgcgccagggattcgacaacgaaaaatacatcgaactgcaagccgccaacatctcaacagcgtgaaccgacgcttgcactcggatgaaacgctgattgcattgtcaatcaccagcgccaccagtcctgtggccgctcgcgtcatcgacgggctcaaacagttgcagggctgcgacgcctttttctccgttatcatctcatccacggacgaggcgttgtatcgcaaactcggcatcaacgtgtgctgcgaaccgaagtacgaacgggtgagtctgtatcaccggtaaacgccaccgataagcgcggtatgccgcgaatcgtcaagccggtaatcatgcagcatgcggcctgacgattcgctgctgtcgcattgtctctcccctcgaccatgctgggcttgttttccgtttgttggagagaacgggggatgccattagcactacggtgagagaaggattatccgtgaatcggttcgtgggtctagacggtattaaaggactggcgctgatagccattgtgctgtaccactgcatgcagcaactgctgccaggcggattctacggagtcgacgtgttcttcaccgtctctggattcctgattgccgtcagtttgattcgttctctggcgaaaaccggatcgctgaatctcgtgcgatatatccccaagcgtgcagtacgtctctatccggcgctgtttctgctgattccggtcaccgtctccgtcggctggctgctcgatcacgacattctagtttccatccgcgaccaagtcatcaccgtgctgctgggctgctacaactggtacgccattgccggaggccaaagctatttcgaccaaatgaacccgcaggtgtttcgccatctgtggttcattggcgtgctcatgcagttctacgtcatcgtgccgttcatcgtctggctgatgtggaagctccgccagacgaaactgccctcactcatcccactgggactcgcggtgttcagcagtatcgccatgtgggcgatgtatgtgcccaagggcgaccccacccgcgtctacttcggcaccgatacccacagcatgggcctgatgctgggtgtggctctcgcctggtgggtcaccgctcctcagttgggccacgctcgtcagggagctgtgccgatgccccgcaccattagatcgagcgcttcggccgccacgtaccgggctccgttacctcagattcctgtaaagcatcgcatctggaatgcgacggcaccggtattggcattcctcagcctgattgccttggtcaccatgacggttatcggcaaacaggatgcattcgccttccgcggcggcatcatattgtccagcctgttgtccgtgctgctgattgccggtaccatctccgacgattcctggatgcaaagcctcatggtgttcaagccattggccgccctcggcaagtattcgtacggcatttacctgtggcactggccgttgtggattctttccagcgcccttgccccgaagatcttcaaggcagcagggccttggcctctcatcatgaccgcgttgctcaccgccattgcggtgatgatttcctggctgatggtggagaaaccggcggcaatgcactcggtgatatccgtcgtggtgccccttcgcacgaacaagaagaatcatgcggcccgggttattgccgttgacgttatcctggcgctgtcgttggtcggctgcgcgcagggcattactcatgcacctgcgaaaaccgccatgcagatccagctggagcaacaggccgcacaactggaacgcatacagaaaaccgaacacgtgctgctgcgccatgccgtgccggcaccgcccaagcccaagcatgagatgcccaccggcgatcagattaccgccataggcgattcggtgatgctggcctcatcacagggcctttcggaagtcttccccggcattcagaccgacgcgagcgtttcccgctccatcatggtcgcccccgaactcatcggcaatgatctgtccgccggcagtctgcggcaatgggtgctgatcggccttggcaccaattcggcaatcacccctgatcagctggaccagattcgtaatatgatcggccccgaccgcgtgctggtactggtcaatgcccacggagaccgtacgtggattccacctaccaatcaggtgcttgccgactatgcggccgcacatccggacaatgtggtgctggtggattggaatgccacagccaacgcgaacgcgcaggtgctcggctccgacggcatccacccgagcatggatagcgatatctatgcaaaggcggtcaaacaggccatcgaacaatggatcgcaagcggcaggtgaacggcaggcaacgctgagttgtccaaccggtcgtgaagaacggctatgctgaagactgcatcaacgagaccacacgttgggagacatggtgagcgcaatccttgaagggaagcccgataagaatcttattctcgttacgggaaggattcatccgaaattggctgaggatgtcgccgagcagctcggcatcgacgtccttgaaaccaccgcatacgatttcgctaacggcgagatgtacgtgcgctacaccgaatcggtgcgtggcgccgatgtgttcgtgctgcaaagccactacaaacccatcaacaaggcgatcatggagcagctcatcatgatcgacgcattgaagcgcgcctcggcccgttccattactgcggtctgcccgttgctcggctactcccgtcaggacaagaagcaccgcggccgcgagcccatctcctgccgtctggtgttcgacctgctgaagaccgccggtgccgaccgcatcatgtcggtcgatctgcatgccgcgcagtcccaaggcttcttcgacggcccggtcgatcatctggtggccatgccggtgctggtcgactacatccgtgatcgtttccaaggccatctcgacaacgtcgccgtcgtctcccccgacgccggccgcattcgcgtggccgagcagtgggcgcagcgtctcggcggcggtccgctcgctttcgtgcacaagactcgcgacatcacccgcccgaaccaggcggtcgccaaccgtgtggtcggcgacgtcgccggcaaggactgcgtgcttgtcgatgacctgatcgacaccgccggtaccatcgcgggcgcatgccacgtgctgcaggacgcgggagccaagtcggtgaccgtggtcgccacgcatggcgtgctctccggcccggccatcgagcggctcaagaactgcggtgcgcgcgaggtcgtgctgaccgacaccgtgccgattcccgaggaaaagcgctgggatggcttgaccgtcctgtcgatcgccccgctgctggccagcgccatccgcgccgtattcgaggacggctcggtcgccgaactgttcgacacctaccccgagcaccacggtcaaggcttcctgttcgcctgatcacgtgcgtgtttgttcaaggaaagcacatgatgcgagacgcgacatggcgtagtctttcggtaaataccgacagtatggtataaatgaacacttgtgggccgaaagcccacgactcccccatggtgtaatggcagcacacgggtctttggaaccctttgtcttggttcgagtccaggtgggggaacggctgacggccgctcgacatccgggcggccgtctattgttttgaggtgtttccaccctcaatagacattccgatcgaagggaatacgtcagttatggcattatccgcagccatcgtcctcgccgccggcgagggtacccgcatgcgttccaacaagccgaaggtgctgcatacttttgcaggcaagaccttcctgaacagggtcatggattcggtgaccgccctgaaccccgacacgctggccgtggtcgtgcacttccaggccgagcgcgtcgccgaagccgcccgctcctatgacgagcaggtcaccatcgtgaaccaggacgacattcccggtaccggtcgcgccgtgcagtgcgcaatggcacagctcaccgaggctggcaaggtcgatggcccggtgctgatcgccgcctccgacatgccgctgctcgacagcgagacgctgcaccgcctggtcgaattccacaccgcctccggcaacggcgccaccgtgctcaccaccatcctcgatgacccgaccggctacggccgcatcatccgcgatcgcgaaggcaacgtgctgcgcatcgtcgagcagaaggacgccaaccgcagcgaactcgccgtgcaggaagtgaacacctcggtctacgtgttcgaggcttccgtgcttaccgaggcaatcgccggactgaagtcgaacaacgcgcagggtgagttctatctgaccgacgcgctggaaaccgccaaggccgctggcaaggtcggcgcgttcgccgctccggatccgctcaccgtcgaaggcgtgaacgaccgcgtgcagctggccgcgctgtccaagacctacaaccgccgcgtctgcgagcgctggatgcgcgacggcgtgaccattcttgacccggaaaccacttggatcgaggacgatgtccagatcggccgcgacgccaccatcctgcccggttccttcctgcaaggccacacggtggtcggcgaggacaccatcgtcggcccgtacaccaccctcattgacgcaaccgtggacgaaggtgccgtggtcgagcgttcccgcgtgcaggaatcgcacatcggcgcacgcacgaacatcggcccgtggacctacctgcgcccgggcaacgagttcggcgaggatgccaaggccggcgcgttcgtcgaaatgaagaaggcgcacatcggcaacggcaccaaggtgccgcacctgagctacgtgggcgacgcccagctcggcgaccacaccaacatcggcggcggcaccatcaccgccaactatgacggtgtgcacaagaatcgcaccaccatcggctccggctgccatgtgggcgccggcaacctgttcgtggccccggtcgaggtcggcgacaacgtgaccaccggtgccggctccgtggtgcgccacgccgtgccgagcgacacgatggtctactccgagaacacgcagcacaacgtcgagggctggaagcccgcctgggagcgctgaaccatgcccgcacttcaggattccatcaacgccgtccgcgtggccgccgaggccgcagaccgtatcaaggccaccgacatcgtggccttcgacgtagccgacctgctcggcatcaccgacatcatgatgatcgccggcgcctccaacgagcgtcaggtactggccgtggccgaggaaatcgaaaaggacctgttccttaagtgctccggccgtcagccgcgctctcgcgagggcctgaccgagggccagtgggtgctgcttgactacggtgatttcgtgattcatgtcatgcacgaggaatcgcgcgaattctacgggctcgaacgactctggcgcgactgcccggccatcgatcttgaactcgcacacccggaaacggcggagcatgcggacgctgctgccgtcaccaccgcgtaacgtgcgaatcacataacgctgatattcgctgatactcgctgatattcgtgtgtcgggctgcctgttgccgaacgtcattgacggcaccaggcagccctcccttttccctgtttcctcactggaatcgaaaggatcgtcactatggccaatcatgttcgttccattttccttatccgtcatggacgcacttcctataacgccgctcacaagctccaaggccaggtcgacattccgctggacgccgtgggtgaatggcaggtcaagcagaccgccgcggccttgaaaagcctgtacgtcgatcgtcggccggaaatcaaccaccggttcattgtctgctccgatttgaagcgtgcgcacgccaccgcgcaggctttcgccgacgtattgggtggaatcgagcccgtcgatgatcatcgcgtccgtgaacgcagcttcggcgactgggatggccatgccgtggctgaactggccgaacgctaccctgaggacttccgttcctggatggagtctcggggcggtgaactgaagtatggtgccgaacccaaggaagccgtaggcaaacgcggtgtggaggctcttgaggactggtccacgcgtgccggagacgacacggacctgttcgtgttctcgcacggcgcatggatcgcgcagacattgcagaccctgttgggcatttccgcgatcgatccgaccttctccacggtggtctcattgcgcaatgcgcactgggtgcgcttggtgccgatggacaatcccgatggcactgtgcgctggcgtctgctggactacaatcacggtccggccatcgccgacaccgacgaatgggaacgcgaacgctgatcatgttcccgactcccctgctaatccaataggtccggtgcattcggaaccgttcaagcaataactgaatggctcaatgcctgaataatggcggaaacaagccaaaaagtgtcgccaaatcacacttttgtcatttggcgacacgccggcttttgccagaatcgacatctcgtcgtaatgtatacgaggtccgaacaacgggccaacaattgaaaacggggctatagcgcagctggtagcgcatctccatggcatggagagggtcgggggttcgaatccccctagctccacgacgaagccatcaaatcggtgatatggtggtttctccgctggttcgtggcgggtcttgtgactcccatgaatcagatagcttcactcggggctatagcgcagctggtagcgcatctccatggcatggagagggtcgggggttcgaatccccctagctccacaatcaaagccggtgcttcacacaccggcctttttcgttttctatcctatcgggcgacttttgcgcaacattcccgggaatgcgtcgcaaaacagggactggaatgcatgcagtgcgatactttccccggaaagtatcgccaaggggacgctcttccgattggcgcgacaccggcgtgagcgataacagtaatcgccactacaatgaggtgtggtccctatcgtgttgatcatcaaaggagacaaaaacatcgtgaccgtcacccgtgtatatatcgccagccctgaaggcgccaatggccgcaacgtcgtcgcttacggcgtgctcaacgcattgacttccaagtacaagaccatggtgttccggccggccgtgtcgaaccatgacgaattcacccccatcctgctcgccgcttccaatgccggactcggcgtgtccctgtccaccggcctcgacgtgcataaggtgcgcgccgacaaggacaccgcccgcggagacatcgtcggcgagttcaactacgccatggaggtctcccgcgcgaacgccgccctgatcgtcggcaccgacaaatcccacgtcaacgacccgaccacctacgagttcaacgcggacgtcgccgccgatctgaaggccggggtgttcctggccgtgtgcaccatggaccgatggccgcacgagctcgacgagaccgtcaagctgtccatcgagggcatgcgagccgcgggcaatacggtgctcggcatcttcgtgaccggctgcgagccgcgccacgccttctccgtcaaggagaccctcgccaaatacggcctgccggtctggaccctgccgcaggtgcccttcaccgacgaatccaccaaggatctggcccttgagaccttccgcaagcacgctcccatcgacgaggtgctcgccgcgctcgacgtggacgtcaccgcgccggtcacgccgtacgccttccaattcgacctgctcggcaaggccaagagcaacaagaagaccatcgtgctgcccgaaggcgaggaggaccgcatcatcaaggcggccgattacctgcttgagcgcgagatcgtgaacctcatcatcgtgggcgacaaggacgccatcctggcccgcggcagggaactggggctgaacagtctggggcgcgcccgattccaggccatggacgacgagaacgtgttgaagcccatggtcgccaagctgtgcgagttgcgtgccaagaagggcatgaccgaggagcaggcccgcaagcaactgaccgacgccagctacttcggcaccatgctggtggtgctcggctatgccgacggcctggtttcgggttccgtgcattccaccgccaacaccgtgcgccccgccctgcaggtcatcaagaccaagccgggccagaaactggtctcgggcgcgttcctcatgtgcttcaaggaccatgtggccgtgttcgccgactgcgccatcaacctcaacccggacgccgagcagctttccgagatcgcgctgcagtccgccgagaccgcccgcgccttcggcatcgacccgaaggtcggtatgctctcctactccaccctcggctccggcaagggcccggacgtggacgtggtcgaggaagccaccaagctgctcaaggagaaggctccggatctgccggtggtcggttccatccagttcgacgccgcctggtcccccaccgtggccgccaccaaggccaagggcaacgatgtggccggacacgtcaacgtgttcgtcttcccggacctgtgcgccggcaacatcggctacaaagccgtgcagcgctcctccggcgccttggccatcggcccggtgctgcagggtctcaacaggccggtaaacgacctgtcccgtggtgcgatggtgcaggacatcatcaacaccatcgccctcaccgccatcgaagcgcagtgagcccggcttagctcccgccagcgggagccactgtaatgcttattttgtagcaagcaacgagtaatctaatcaacggtaacccgtgtctcacgggaacattcaatcacaatggaggatgcccacaatggcgaaaaccgtccttgtcatcaattccggctccagctcgatcaagtaccagctggttgatctcgaatccggcgaaggcctcgcttccggcctcgtcgagaagatcggtgagccggtcgacggccactacaagcacgagtacaacggcgaaaagcacgagcttgaagagccgattcacgaccacgagcagggtctgaagcgcgtgctcggcttcttcgaggagtacggcccgaacctgtctgaggctggcattgtcgccgtcggccaccgtgtggtgcagggcggctccatcttcccgaagccggccctcgtgaccaacaagaccatcaaccaggtcaaggatctggctgtgctcgccccgctgcacaacggcccggaggccaagggtgccgaagtcatgcgctccctgctgccggacgttccgcagatcttcgtcttcgattcctccttcttcttccagctgccgaaggccgccagcacctacgcgctgaacaaggaaatcgccgatcagtaccacatccgccgctacggcgcccacggcacctcccacgagtacatctcctccgtggtgccggacgtcatcggcaagccggctgaaggcctgaagcagatcgttctgcacatcggcaacggcgcttccgcttccgctgaggtctccggcaagccggttgagacctccatgggtctgaccccgcttgagggcctgatgatgggtggccgtaccggtgacatcgacccggctgtggtcttccacctgatccgcaacgcccacatgaacgtggacgagctcgatgccctgttcaacaagcgttccggcatgatgggcatgaccggctacggcgatctgcgtgaggttcaccgtctggtgtccgaaggcaacgaggacgccaagctggctctggatgtctacgtgcaccgcatcgtcagctacatcggcaactacacctaccagatgggtggctgcgacgtgatcaccttcaccgctggtgtgggcgagaacgacgacgtggtccgcaagatggtgtgcgacaagctcgctccgttcggtgtcaagctggacgaggagaagaacgccacccgctccaaggaaccgcgcatcatctccactccggactcctccgtgatcatcgccgtgatcccgacgaacgaagaactggccatcgcccgcaagtccgccgcaatcgccgaggctggcaccgatacctacggcaacaccttcgccaagtaagtaaccgccgttaggcatctcactaatctctagttgcaacactatgggggctgattccgattggaatcagcccccattcgtatatggtcatgagaccactacccctgcgtcatactcccctcagtcgcctccggcggacagatccactcagagaggggatccaggccctataacttggctcccttctctgaggggagctgtccgcgtagcggactgaggggagttccaccagaacacaggaccccttactgcctcagcatgccactccacataccgacgaaatcaggcaaggtcttgcgcgtggtggccacgttgatgacctcgatatcgggaatacgcagccccagcatcgcggcgaacgtggccatacggtgatcagcataggtttccatcacggcaccgtgcaacgtctccgccggcaccggttcgatacgcaatccatcaggcaattcctcagccgctcccccaacacgacgaatctcgttgaccaatgcctccagacgattcgtttcgtggccgcgcaggtgaccaataccaaccatgtctgtcgacttatcagcaaacaccagaatcgccgccaacgagggcgcaatctccccggccgccgtcaaatcgaacgtacccagcccacgcacggtgccgtcaccggtcacctcgcaatagcgcacgccgccgatggtcgggaacgatacttcggcacccatctgctccagatatccgggcaacaggccgcccggctgggtggtggtttcaggccaatgaggcacccggaccgtgccgccggcgatcaatgccgcgccgaggaatggcgccgcgttcgacagatcgggctcaacggtcaccttgctcggcagttgcattgcgcgcggttcaaccgtccatgtgcgggcggattcgtcggcctcaaccgcaccgccggcaccggtcacatcggccacggtcatgcgaatgtgcggcaggctcggggtcttctcccccgtgtgcgcgaggtgcagaccgccaggcagtttggaactaatcagcaacaggccggagatgaactgggaagaaccggacgaatcgatgctgacctgcgcctgggcagccggcaaggttgcaggcggcgtaatagtgaacggcagacggccaacctcgccgtggtaatcaaccgttgcacccagctgttccaaaccgtcaagcaccggctccatcggacgtgcataagcctgttcgtcgccatcaaaattcactgggccatctgcaaacagggcaaggccgggcacgaaacgcatcaccgtgccggccaggccgcagaacacattgacgttgccatggaatcggccggatacaggaggagtaaccgttacggtggtgtcggttgcggaatccacgtcgcagcggacaccgagggcttcgagtgcgcccatcataaggtccgtgtcgcgcgaacgcagcaggccaatcagagtaacgggcttgctgccgagggcggcgagaatcaggtagcggttggatagggacttgctgcccggcaccgttaccgtagcgttcaacggctgtgcggcgagcggggcaggccagagattcgtgagtcgttcagtcataaggccaaatctatcaaacaaattattcaccggtcggcagcgatgcgggattcgatctgctgatcaggtgcggaagacggctgctcaaaaccgccttcgatggcctgcgcgtgcaacaactgagcggccgcgcgatcggcctcgatggcggcgatctggcgcgagaacacgatgaaccagccgaggaacgccagaccagccaacgcctccacattggtgagggtgttgtgacccatcatcatattgacccagaatgcagcgcatacgagcgcggtcaggtcggaggccaccatcactgctttggacaggcgtggcgcaagccacggcaggagcacgaacagcagcagcatgacgaacggcaggcctttggcgcatatattgtgcaagagattgtgtggcgtgtaccgaaacacgccgatgccgatgaatgccaggccggccaccatcagcaggaaggacagaatggagatgcgcagcatgaaatgtgggatttcgtagccgcgattcggatctctgttggtgcggtcgtgccagaggcgctgtagccgttcggtggtcaccagttcggagatggcgaagtagctgacgatgatgatgcatgtgccggcaagaatcagcgtggagttgaacatacgggccgcaaacgtggttctgtcgccgagctgcgaaaagttgttgtgataccagtatgggtcgtcggtggtcatgccggcggtgaccacgccggagatgacgaagaacggcaacagactggcaatagttttggcgttcatcatctccgcctgtacaaaggtcatgtaccccaccacgccggcgaaggcggcgcagacgctggagatatagccggagaagatggcattgcccatcatgtcgttggccgcaccgatgagtgcaaaagacgacaggaaaatggtcgaggcatacaccaccgaaagggcgacgatttcgaaaatgcgacgaatcggtgcaaaccaaccatgtttgaggttcaatgaacgtgatttgcgcgcatagccaataatgaaggaaatgacgccgcatgccgccacgatgcccgaacataccatgaatcggcgttgcgtcagctgccagatggccggcgcgtattccatgtacaggttcatcgataccgcgccaacgatggcgcaaatcaagaaggagatgagtccggaggtttctgcacgctgatgacgtcccatgccgggcctcccctatctattcgatgccgcgttatctttcaacaacaaacaaaactccccccgaggacaacgctttactagcaagccagcgggatttggctgtcgccattctactgaaaatctgaaacactacaaaaaaacgattatgtacgggcttcttagcctttgcgactatcgttaccgccttgccgagtaccgttgttcatgcagaaagaaagcagtattgaacacaatcgaatgagcgtgtcggtatcgttgaaaaagtaatgaatgacggttctatcggttcaacctttaagggacgaaccagccgcggcaccatggcgctgatgcatgactatgccgagctcatcaatgaattacgtccgacagcagagcaattcaccgagatcgagcaatactgggtcaaacgaattcaggcgttcttcaccagcaaaccattcaagctggagtccgacaactcgctttccgttgatgcggccgtggaacatctgctgcggcaggcagcgcggcggcgaagggagaatccgggcaccatgtacgtcggcaccgtcctgcagcatctcgtcgcggcaaagctcaccatcgttgctccggaagtggaaatcaacggcgcgtccgttgctgatgatccgagtccgcggcttccaacggtgaggccgcggaccgtctcacaaaaccgtccgcggctccgccctcctgtttcgtcgcaactgactacaccgacgggttcgggcgcttcgtcacgaaaacgccattgcgatgcaccgtatacgcgccgccgtcactgccccgttccgcccggaacaggacgatcggctcccctgcgatgtcacgcagttcgacatccgatctgccacgtgtcagatagaagtcgaatatggcgtcgtcggattgacgcacggtgtgcagaacgtcagaggtcacgccgctggcgggcgaccgcaggttggcttccggctgccggccatcctgcggctgcgcggcaagccagcctcccacgaatcgcgtcagatcgctcatgcccagatcgcagccgaggaaatacgcctccccttcaccgtacgtgttgcgggtgatcgcggccatgccgtcaagctcccactcatccgcttcttcgccggcatacgaggcaagcacctgcacatgcggtccggcgacggtcacgtcaccgagcttgtcgatgacgcgatcgagccagtcgaaatcccaatggtcttcgatgggctggaggcgatctcagctgaagatggcaagggccacggtgttgacgccggcctggcccatcaggcggatgtcgtcatcccagatttcctccggccattggtcgggactatagtcgccaccgaaagcgatgccgcgtccgtccgcggtcagcagttttggccatgcgaagtcacgtcatgcacgcacggttatctcctttggcaggcggcgcagggccacggcccatatcggataccagctgatactagctgatagacactcctggccgatagtcgacacgccgccggttccggccccactgccggaaccgacatgggtatgttcatgaccgccgaccgcaggaacgaacaggcccgtccgccacggaccgcatcttgcggttcaggcggacgggccttatgggagggatgggaac

SEQ ID NO: 593 - DNA, 4036 bp, Unknown
  R14_15m  MAG No. k141_1280
ccccaccgatgcggccaagcgcgtggtgccggatgtgcgtgagcagtcgcagctcatcgaaggtgccatcgaccgtatgcgactgcgggtccgttcgcgcgtggagaacgagattcgacttatcgagggatatgcgaaccgcccgagcctgacccaaccgcataccatgctcgaaccgcatcagcggctgatcgacgattccctgcagcggcttgacatcggcctgcggcgtatcgtggatgatgcccagctcaccgtcgaacgcgcccatgcctcactgaccgcactcagcccccaatccacgctgaaccgaggctatgcggtggtgcagtccgccgatggccatgtgctggatgacgcttcgcgggtcagtaccggggatgacatcaccgtcaccctgaaaaagggcgtcattaccgccaccgccacatccgcaaccgcaaccgcgtaatgcaccatatgcattcacgcatatataccgtatatataaggagaacaaaatgaccgagaacaccacacccaccgacaagaacacccccgcctcgtccctgacggacaaggaacgcgagctcatcgcccagatgccatatgaggaggcgcgcgacaagctgattcaggctgtccaggcactggaaaccggcggcctcaatcttgaccagtcgatgcgtcaatgggaaatcggcgaggccttggccaagcgcgcccagggcctgctcaacgacgtacgagccaagctcgaccaggcacaagccgagcaagccgccaacgaagccaccgcaggcacgcagtccaacctcgactgagttgcctcccggcgcggcatcatcgtgcaagcttgcggatgatgccgatgcgctcctgcatggcggagcagatggcgtcaatcacatcagcggacagccggcggttggtggcgagctgtgcccgtatcagttcaggcacctcgtcgagcatccccaaatcataacggtcccaatcgtcgataagtcccaactgccagtaggcgttgtccgcatcgccgtagtcgtcgacccagaacggcttcgccgggtagtcttcgttggtgatggcttcggggtccatgccgttccacaggctggcgccgctgtcaaaaatcggggccgggcgaatctcgaatgattcgacgtcacggatgagaccgaagttgttgtaatgccggtcggtgttgcgcagaagaaaatcaaggaacagaaaatcgttggtcgccgcatttgccgtatcatgacttacgccgagttgctgacatgcgtccagccatatcatcttgcgttcggtgttgtcgccgcgtcggaagatgcgcataacctgccctgcgggaatcagctcttgcgtgtcttcgagcatttcatcgcagacggagacccggatgcccttggcgcggccgatgcggtattcgacatggtcgatgccgaacagtcgtgccgtatgccaggcgatgcgctcgttgtccggctcctgaccggtgcgccctcccttgatcaggctgcggacgccatcgggaccgataatccaacgtttcggcaggtcaccggcactggtgacatccggggtgttcacgttgccgatgcgcgacgaattaccgaagaataaggcctgcccaagtcgttcgtcaaaatcgttgtggaaaaagttcagtttttcccacgtcagatcgggccggtcgagaggccgcacccaatactggtccgacaggctgagtcccaaggaacggtccagcagatcgttcgtcgaagcgatacccgaaccggcaaatacggaacgcataccgtcacgggtcatgggaatgccgcgagaacgccaccacccggtaatcgactcaccggtgggctcaggtttgccgtccacatacatgccgatcgggattcgggactcgtcgtagatctcccctgccctcagggcgtatccgccgcgttcgaaatactcgaactccattaccggatgggtacggcacatcagcatgcggttcatggtcatgtgcgcctcccgttattcagtccaccgacgatatccgcgtcatatcccatcctatccgctttaggactcgtatatgcggcccactgaagcttcagcgccaaatcatcagtcagcatcctttcccgcgtcaattactcatccgcggcatcccgcggctcgcacctgaatccggactggactgagttccgcttcccggcatacgatagtggtgattaggccacattggtagcagttatagaagggaaatcccatgtcaacgctgattcttgtattccatccgcacctgaaggacggctcgcgagtgaacgcccgtctgcttgccgaactcgccgcacaaggcgaggacgacatcatcgtgcgcgacgaatacgccgaatacccgaacttctccgtcaacgccgacacggagcacgagctactggaggccgccgaccgcgtaatccttcagttcccgttctactggtactcctcccccgcgctactcaaggaatgggaagacgaggtcatcaccgcaggctgggcctacggtggaggccacgcactcaagggcaaggagctcaagctggtggtcaccactggttccgacgcctccaagtaccgcaaggatggcgagtacaaccacaccatggaggagctgctaagcccattcgcagtcgtggcctacaaggtaggcatgaactatgccgaaccattcctggtgcagggcaccgccaccatcagcgatgcggagctggatcaggccgccgccgattatgtttcggcgattttggactgaataagctgaggccgggtgcaagtcgcacccggccttgttgtttcgcgggctagccgcggtctctcccagtcagcctgcggctgacagctccctcgtcagagagagcttattttttggatcagagggagttgatagctacttcttcaacggcacgtagatcacgtcgtcaatgagctcgcgatagtgctcaacgatttgcgcgcgacgggtcttcaggctcggggtcagcatgccgttggcctcggtgaattcgtctggcagaatctcgaacttacgaatcgactcggcgcgggaaacgccctcgttggcggcgttcaccgcacgctctacctcggcatgaacgatggcgttcttggccagcgaggccagatcgggttccggtttggcgccttgggattccaaccagttgttggcatccgccagatccagcgtgaccagagcggccacgaacggcttcttatcgccaataaccaagcactggttgaccacgggcgaggtcatcacggaagcctcaagcagacccggcgacacgttcttgccgccggcggtgatgatgaggtccttcttacggccagtgatggaaatgaatccgtcttcggagatatcgcccaaatcaccggtgtgcagccagccatcggtgatctgctgggtggtgacctcagggttgttgtggtaccccttgcacaccagcggtcccttgatcaccagctcgccatcctcggcgatgccggcggtgatgccgcacatcggcatgccgatggtgccgatgcgattgtcttccggcaagctcacgcacaccggaccacaggtttccgtcatgccgtagccttccagcaccggcatgccgatgccgttgaagaagtgggagagctcggaatccatcggggctccaccggtgacggcaaagtcggcgttcgggccaaagatggtacgaatcttcttgtacaccacctgctcgtagaaagcgtgagcaatacgaccgggaagcggcagcttctcgcccttctgctcggccttggaccattcgcgcgcgttttcggcggcacgcatgaacatcttgcccgcaaaaccgctgccggcacgctgggaggcggcgttgtagaccttttcgtacacacgcggcacggcaagcagcagcgtggggccgaaggtctcgaagtccttgaccatggtcttcatattggagctcagggccagagaaatggtgccgccaaaactgaagaattccaggaatcgggcgaacacatggctcaggggcaggaacag

SEQ ID NO: 594 - DNA, 5793 bp, Unknown
  R14_15m  MAG No. k141_1290
cccaaccatgcaccggcgcggccggttctgtccatgacgatgcggcatccagcggcattgggcggcatccagcggcatgtcgtcagaagacctggatatcgtcggcctcccattcgggcaggtgcatgtatccccaataggccatcgtcatggcctccaacgcgctcacgtcgccggccgaacggttccacagccatgcgtcgccgctcttgcgtttcgtggccctgcacacctgctcgtcggccagcctgtccgaggcgtgcgtgagattatgttgctccaacgcgcttacgaacgattgcggggccgtcaccgcatctgccgccctcatgtccgacagccggtagacgcgctcgaacgtgtgcgggtcatgggcattggcgagcacatcggccaaggcggcggaggggccgcgcgggtcgatgcataccggtgccctgtagtcgttttggagggccagcagtctcgcgggcgattcgccggtgcccggcaggtcgtcaacgatctgcacgagcggcggccgtcccccgccaacgccgatgcaggcggctatcaccgtgtgggtcgcgtccaggggcacgcccacgccgaagcacacgcgcatcccatgctccggcgtgaccggctcgtccatggtgccggcccacagcagggagtcgatggccctgtctgtgctgccggcgtcgcggatgttgccgaacgccctcgcccaaccctccgcgtcgtcgtcgaactgacggcggaacccggccaattggtcgaaatcgaacagataaccggcccccgggtgatatcgccatatggtttcgaggtcctccgggtcggcatcgaacggtatgccgaaatcaaagaacgcggtacggtcggggatatcgccggccctcagcctgtccaggcggtcgttgaaatactcgctgctggcgttgccctccgtgctcgtccaccatatctgcggtctcacgccggtgagcttcaggcgcgtggtggtcgtggggatgaaaccgtccttgaggttcttcgcctgttgttttgacaggctccatacctcgtccacgttgatcaggtcgccctgcacgccgtggccggccgcctcggtcgcgccgcccggcctcagctggctgccgttcttgaactccaaggccatgctgccgttgctcaggcggggtggtttggcgagtttccgcagtctcgatttgcgccatgatttgacgaaatcacgaaactggtcgttggcgtccttgccggtctgggcgagataccaggtcttgcggtccggcccccacaacgagttgcgcacgtcgtagcttttggtgatggtagtcttgcccgcctgccgttggacggtgagcacgagttcgtcgtaccagtaggtgccggtggacgggtcgatctcgctgatgacatcgatgacctggcgttgccacgggatgagtggcttacccagcagttcgctgaacctggccacgagagcgccgtcggtggcgcgttcctggttacgcgcggtcgcgtgacgcggttgcaaggatggcggctggtcgtggttcatcgcgccgccttgcccagcagttcggtgatttcggggtcttcgtccatcgtgtcgtacatgccctcgagctgttggatatagcacagaagactggtcatgttgcggcttatctcgcggccgcgcgcgttctgcacgtcgatgttgcgggcgatgctcagcatcgatgaatagatgaagtcggccatcgcgttctcggccttgccgtcccggtactccttgatgaactcccgtgtcgccttttcctgcggtccttcgatcagtcccgcgttctccaagccctcgaaacctgccatgagaaattgctccaatcacagtaatggtgtatattccctgtttgaagcattttcatagcctgattttggggtgtcgtccctattttcgggctttttttattgttttgtggggaaccaaaaacggtgggcgcggggtgttcctttgcttcgcttctcaaaaaaacgacggtcaccatgccggccgcgccggttgcgagccgatcgggccggcatcgggtccgttggcgagcccgagggccgcgagccttgacctgcgagccttgagcctcgcatcgatgccggtctgagtgatgccctgccggtaccactggagcacgccggcctgcaaccgtttgccaacgtccatgcctcgcgccctgagtctgtccatcacctcctgcttgccggggtcgcagaccgtgatgtcatagtccagggctatccactcgtccagcagccgagggcttcgcggcgtggaaggcagtgttttcaccagccacagctccaccggttccgtgacgcgcaccatgtgccggtaggccccgtaccatgcccccgatgccatacgcctcacccattccacggtgacgtgcccggcgtccgagcccggcatcatggccttggccagtgcgtcgaagtccagcaccacggcccccggttgccggtgcatgtcaacgtacgttgacttaccgccagccggagggccgatgaccgcgtggataagcgcgccatacccgttaagcgtccggtcgccccgaagcgagttgcagtgcttgcacgcgcggcgaaggttcgccggcacggtgggcccgcccgcgatatgcggcacgatgtggtccgtggtgtcgctgtgcttcgtgcagccgggcatccccagccagcagtcgttgccccaccgctcgatgacctcggccgagacgactggcggcacacgttgcctatcccttctgcccggcatgacgccacctttccacctcggcgctctcgtaccggaccagcctcgtgcccggccagcgcgtccaacgcggccccttgcccacttcctgccgccacttgcgcaccgtatccggcttcacgttcaacagttcggccacctcgaccgtcgtcaaataccccatcatccctcctagatcaaactcatgcgagactgcatctgcacggtcggctgagccgcctcggccctgcgcctgaatacgcttatctgcccctgcgcccacaggtcgaactggcgtgcgtccagcgtccacgcgccgccgacgcgccgcactcccattgccggccagtcgcctcccaacgcggccagttcggtgcccttgcgcagacgcagggcgttcagtacgcgcatcgaatccggcaacccggtgtgctgttccttggccaacgcaacgatggagagccggaagccctccaacaggtcggccgcgtcatgcggagcgctccacgggctcaacgcctcggcaaggctcggtttcgtgcgtgccatcagtccatcacccaggcccacgagccggtccacttcgccaaagcctgcaaagcctcgcgcgcatcccagcagcgcatcccgtacttgcgggtcttcgagacggggcattgcgccaactgcatcatatggaacgcctggttgtcgtcgatgcgcccgttacgcctggtcaatccggcccaacgcgcgatctgctcgatggtcaccagaaacgattccgtggtcttcctcgactggatgaactcgttgagcttcggaagcaaccggatacccgcgtccttcagattcatctcgaacgttgctctgctcataatccgtaatccccttacgttggtttctcatgtcccttttgggagggagtgctggagaggtcaagacccgaagattctcggccgagacgcgcaacgcgaaatctcggccgagaatcctcaaatgggtctcgctttcggtcggtcggccgtcgattgcaagagcaggcgaacgcctgccgggaatggtccccaaatccagccccacacacaatcgcgtggtagtgctgcccgattccgcctttaccagcggctggatagggtcggtggcaacctcttagtctcgcaagtaccgcagttgcaatgcggccggcctccacgccaccacagcgggcataggtagggctaggcgtagccatacgcgccatcacagccattccattctcagtgacccgatagcgtcgggcacgcatacgaacgcctagaggcgtctaaagatacctagaactactcgggaccgtccggcaatacggccagacagccgataagcccgcgaacctcctcgggcgtaaacacatagaccttcgacctgaaatccctgcgccgcgtatggggcgtgatgcacaccatcagacaaccattggccgtcgtggccgactgaaacctgtagcccatatcactcatggccaaacctcccgccgatgcgctccggcacatccgccagcaccatgcccgcgcacaggcaggcgacgccgaccaatgcccacaggcccatgacggccagaatcaaaccagcgaacaccgcgcagaacgtgagaacgcccttataaagcccgtgcatgcttcgcctccctgataaccctggcgaactcgcggttgatgcgcaccatgtcacccatcgacaggccgtccacagcgaaataatcaccatccacactgaaacgaataccgaactcatacgggctccccgcatcaccggtcagcttgaactccgcactgaaacggttcccgctgcactcagggtcgaacaccgacatcagcgcacctccgccatgctcggcggaaccttcggcccctcgactgcgaaaacgcaatccgggcacatcttcgagtgcggcctcatacgccacccacgagccgacatggccagatccgggtcctgattcaacggcacaaacgcctcggccccgcacacgtcacaacgaaccacatacgcaatcatctgcaaaacctccatcggtcgaatggttgaaaagggttccttcccccgccgtaggcttgaaaaggaagaaccaagccaaggaagaacaaacgaaggaaggaagaatcaatgggcgtagacctcgcgcaaataacgtttctcggcctcaccgtgcaaacttggataaccgttgtcatagccgccttcgggctcatggtgtcgctgttgacattcgcgcgcggctggagatggagggccgaagccgcgccgctcttcgccatgctcgaaggcgacaaactcctgcgcccggacttcagcaaggccggcatcgaccctccgatcgtcggatacctcgtgaactgcggagacggcagagctttcaacgtcaaagcgataggcgtgaactgcgatgccggactatgggactgccggcaaatcggcgaaacggttctgggcaagcaaagcgagtgggtcatgaacgactgcggaagactgccggagctgacaggcgagaccatgcgattcttcatcacgatcgcgccaccgcagaatcctcgcccggaccagtcgagcgatctgacgaagctagagcttggagtgcattgggtatcatctccaacccgtctccaccggtgtcgatatacgcaattcccgatctggggcatagaaccaatgaagtgcggaccctttgaacgcctgcgcagatggcatagggacaggctgggtcatcgcaggttccatgctctcgacagaaaacgggcttcagaacagagaagactcctgagttaggaacaatccgatacgtcccgtccgaaaaaacctcaaaagcgtcgtcggaatcagccacgccgtcggaatccttacgacgagtccaatcatccttgatttgcggagcaaagccgaactgtgttcttaactcccaatcgtgaacgatcttgtggtcgtagggaagccccacatgcttgcgcgaggactccaaagcgtaacgactacgctccacggccccagcggcctcgattcgtgccatgcgggaccagtaaagcgcg

SEQ ID NO: 595 - DNA, 3432 bp, Unknown
  R14_15m  MAG No. k141_1740
gacggcgttctcggtaggattgatttcggtttgaaggacacaatcctcgcaacacaggacttatctgcacaccgtagataccccggcgcccagcggcgccacaccccactactgaaaaggagtgccaataatggcagcacagatctggtatgagaacgacggtgatctttctgttctcgaaggcaagaaggtcgcaatcatcggctacggctcccagggccacgcccacgcgctgaacctgcgcgattccggtgtcgacgtggtcgtcggcctgcgtccgacctccaagtcggtcgacttcgccaaggagcagggcctcgaggtcaagtccgtggccgaggcttccgccgaggccgacgtgatcatgatcctggcccccgaccagtaccagcgcaccatctgggccaacgacatcgagcccaacatcaagccgggtgctgctgttgcgttcgctcatggcttcaacattcactacggctacatcaagccgtctgaggatcacccggtgttcatggttgccccgaagggcccgggccacatcgttcgtcgtgagtacgccgctggccgtggcgtgccggtcgtcgtggccgtcgagcaggatccgcgtggcgatggttgggctctgaccctggcctacgccaaagccctcggtgctctgcgcgccggtgccatcaagaccaccttcaaggaagagaccgagaccgatctcttcggcgagcagaacgtgctcatgggtggcgtgaacaagctcgtcgagatgggcttcgaagtcctgaccgacgccggctaccagccggagatcgcctacttcgaggtctgccacgagctcaagatgctcgtcgatctgatgaacgagggcggcctgaacaaggctcgttggtcctgctccgacaccgcccagtacggcgactacgtcaacaccgtcatcaacgaggactgccgcaagcgcatggaataccacctgcagcgcatccaggacggctccttcgccaaggagttcatcgacgatcaggatgccggcgccccgcacttcaaggaactgcaggagaagtactccaacgagcgcatcgagaccgtcggcccgaagctgcgcgccatgttctcctggaacaaggatggcgtcaaggatgccgacgaggccaactccttcaccggcaagatcgcccgcgcccaggttcagtgagcccctgtagctcccgctggcgcataagcgcctgaggagagtacccagcacgtaccaaaaggccgccgctccgattcattcggagcggcggcctttcgcatggtcccaccatatagtcaaacctccaccacgtagtaaaatccccacgacgtagcaaactacccaccacgtggtgacgcaaaacggctttattccgcggaatacaaaattacgctgacatcgtggtagaagattcatcgcgtggtgggcagttcatcgcgtggtgggatagacagttgatatacgccggctatcaaatcaatgatgtcttgctgtgttccccgtatgccgagctgcttcatcggaagcgtttcatgggatatttccccaagaaaatcagcgagatcatggtaggcctcatcgttgagagacacgcgatcctctggagcaagtagttgagccaaacggaatacatcatatttatgcttcttgagatcttttccgtctacgtgctcgccatgttgttctcgggcgttgagatccaaccatgctttcgccttgaaaggaatgagatatttctcgttaagcacgctgatgccttgtattgattcgcggccttgctgcagtagccgatagtagctgtcgttcagcatgatggctgacaggctggaaacgtcgtttgcaatatgcaatggcgtcaggaacgagttcggcacaatagggaagtcagggtgacgtgaaaatagctcgatcatagtgggatacccgtacgtactggggtgcatgaaacggtacaggtgaggctgtgcggagttcttcgtgatagaggtgtatccgccatcgcgaatgaaagaccacaatcgttgtgcaaactcgcgaagatgtccctcggcaatcagcaccatgtcaatatctttggtggctcggaagtccaggtcgttgtcggtcatgatgatgtcacaagcggtgccgccgatgattacgtaagaatcttcgtagccggcaaaggccgttctgatgagctgcaggccttgtgtcatattgtcgctcctgagaaagtattgcggatggattcttgtatggcgtcttccaaacgttcgtcggcaatctcgccaagagtcagggccgtggaaatggggtcggcaaggtagtcttcctgcgtatattgagcaagtaggcggggatcgtacctccacagctccagaatatatgcattatctggcaccttttccaaagcggggtcgataatgcatagttccttgttgtgctgcttgagccaatgacgttcaacggcatagattcgcagttttggggtggccagttgcgtcctgcgcgaaagagcaaattcgccggccggaatcagctcgtcggcaatcatctggcgattgcgattcgtgacggtatatttgctgaatattggtgacttcaggagatgccaagatgatttcagtaaatcaagtcggctggtctgccttgaagtcagtagttcgacgctattgctgcggccttgcttggtgcggtgcacgaatgccagctgttctaacagcgtcacggcaacgctgacctgagcttcggtaaactgaagcgctcgggcaatatctgattggactttgctctcgttggagtagagcaaatacagccagaccagctgtgttgcgggggagaagggccgcacctcgatatcctgtgcgttctccagcggccgtgaggagatgcgctgggtgaacaccatgcccagtgaagggatatacagttgggtaccgggcacgatgaaaggaacgtgattctgaatcaaggcttttcgctggtatgcagaaagccggggaaactgaaagacaatgggcagatccgtccgctgctcaagcctgctggcgtcggcggtgacgcgtgtgatgctgaatgggtgagcctctccgctcgcgattagcatgctcgtgttgtcgatggtgagtttgctgaatgtccgtccgttggtcagaaatagcggcagtgaggcagtgccatcccaagaagtgatttggcagggcagaccaagtgtctcgcgaatgtaatgctcggcatccatgtcgacctcaatccttaacgaaaatctgtaagattcacatctcttgttaagtatatagaatattattaagtatttcggggttggcatgtcgcgaatggaaagaaagggcagtcatccccgaaatggagacagcttagccgggaaaaaggacgacgccagcatccggagaagatggatgactggcgtcgggtaagctcgcaaaagc

SEQ ID NO: 596 - DNA, 14622 bp, Unknown
  R14_15m  MAG No. k141_2101
cagcgagcggaatgcggcggcggaaatatccgccacatccggatagccgagagccacgatacggtcgagctgtttttgggcctctactgatgcgatagacatggctaccagtgtagaacatcaccttcgcttcatcgggcagtcaccatctgggaagaccgctactgttgttccgcgcgtttcgtacaatgtcattgttttacggtcacccgtatgacggccgtccgaacgtaagtaacccatcgaaacccagaggtcatagaggtcatcatgtccgaaaaattgaaggtcggcatccttggtgccaccggtatggtcggtcagcgttttatcacgctgcttgagaatcacccgtggttcgaggtggtcacccttgccgcttccgcgcacagcgccggcaagacgtatgccgaggcggtcggagaccgttggaagatggaaaccccgatgcccgaatacgtcaagaacatggtggtcgtcgatggcgacgatgccgagtccgtggcctctggcgttgatttcatgttctctgcggtaaacatgccgaaggaccagattcgcgccattgaagagcgttatgccaagaccgagaccccggtggtctccaacaacagcgctcaccgttggaccccggacgtgccgatggtggtgccggagatcaacccggagcacttcgaggtgatcgagcaccagcgcaagcgcctgggcaccactcgtggtttcatcgccgtcaagccgaactgctcgattcaggcctacacgccggcactggccgcatggaaggaattcgagccgcgtgaggtggttgtgagcacctatcaggcgatttccggcgcaggcaagaccttcaaggattggcctgagatggtgggcaacatcatcccgttcatctctggtgaagaagcgaagtccgagaaggaaccgctcaaggtgttcggccatgtggacgccgaaaagggcgagatcgtgccgttcgacggcgacctcaagatcacttcgcaatgcatccgcgtgcccgtgctcaacggtcacaccgccaccgtgttcctgaacttcggcaagaaggccaccaaggaagagcttatcgaccgtctggtgaactacacgtccaaggcttccgagctggagctgccgcacgcgccgaagcacttcatccagtacctcaccgaggatgaccgcccgcaggtcaagctcgacgtggactacgagggtggcatgggcgtttccatcggccgtctgcgtgaggattccatcttcgattggaagttcgtgggtctggcccacaacaccctgcgtggtgcagccggcggcgcccttgaatgcgccgaaatgctcaaggctctaggctacatcactaagaagtagttgaatctcgttaaaatcgcaaaagccctccgcaaggagggctttcatcgtattaggcgcggaattcgcggctcagcggccagtaccgccgtacaccacggcttcgatctgatcggcatcgagaccgtatgcagtgtgcagcgccttgacggcgtcgttgagctgatcgagcggcacgagtgcggcgatacggatctcggaagtggagatcatcagcacgttgatgccctcatcgctcagggcctggaagaacttggcagccagaccggcgtgggtcttcatgccaacacccaccacggctaccttgccgacgttggtgttcacatcaaaggagtggtaacccagcacttcctgcttgtcgagcagcgtgttctgcacctgcttgacggccgattcgggcacggtgaaggagatgtctgcagtgccaacggatgcgccggcctgcacgatcatgtccacgttcacgtcggcggtggccagctcggtgaacaccttggctgccatacccggctcgttcggcacgccacgcacggtggccagcgcctcggaacgatcgtgggcaatgccggaaatcaccggtgcctcggggcccaggtcagggaacaggtcgcccatggatttcgcttcttcttcagtcatgtcttgccttgtcttggttgaaattacttacgattattgttcgctgtagccgcgctcagtcgaggttcggcagcgtgcgcgggtcaatgccgtcaggcacaaccagcgtgccggggcgacgggagaacgaagagcgcacatgcagcggcatgttgaaacgctgagcgtactctacgcagcgcagtgccagcaccttggagccgcaggaggccatttccagaatggcttcgtagccgatggaaggaatacggcgggcggaaggcacgatgcgcggatcggcggtaaagatgccgtccacgtcggtgtaaatctcgcagatgtcggcaccaagggccacagcgagtgccacggcggacgtgtccgaaccaccgcggccgagcgtggtggcgtcacccttggcgttgatgccctggaagccggcaacgatggcgatgtctcccaatgagagcgcgttcttcacgcggtccggtctcacggccttgatgtgggccgcgccgtaacgggtgtcggtgaagaagccggcctgctgaccggtgaaggagtgggcgcggctgccttcggcgtgaatggccatggccagcaggctcatggaaattcgctcgcctgcagtcatcagcatatccatctcgcgctcgggcgggttggagtcgatgctcagcgcctgatcgataaggtcatcggtggtatcgcccatggcggagaccaccacggccaccttattgcccttcttctccgtctccacaacgcgcttggccacacgtttgatcgaatcggtatcggcgaccgacgagccgccgtacttctgcacgatgagagccactgctgtcctttgttcttctcttagggatttgtttggtcgatattctacgcaaacgcaacgattataagggctgtcgcgttcaccccgcgaccccgcgccggcatgcggacacgggtatggcctacgttgttcagcaaatattcaagttttcaccggtggttctttgagacagccgcatccatcctttgagattcgagcggttaactatcaattaccggcaaacgaaagcaaaccggcgaggtttccgcagaaccccataactgaataccttgtcatgggcgaaactttgggctacaaagtggaccgcatttcggtgattttgccggatgacacgtcgaagctcaagattgtgccgggtgaggaccgtgtcaccttgatgacctgtacgccatacggcgtgaacacgcatcgactgcttatctccgggcaccgcgtggcaattccgatgccggcccccgagccgaatgacgtgcttgacgcgcgcaatatcgcccttggtgttggcctaggcatactggcggcaggactgttcattatctggttggcacgacggcacaaggccgcgcgcatcatccgccacggcgcattctggccgtggatgcgtcgcaagggcgaaagcgccaatgatacgctggcctaggcctcacgccgaccggccagcgccctgcccagcgtgatttcgtcggcgtactccaagtcggagcccaccggcaggccgctggcaagtcgggtgaccttgacacctacgggtcgcaatagctgggtcaagtagctggtggtggcctcgccttcaatattcgggtcgagcgccataatgacttccttgacctcatcgccttctaagcgtttgagcagactgggaatacgcaggtcggcagggccaacgttggccattgggttgattgcgccgccgagcacatggtataggccgcggtattcgcgcgtgcgctcgatgctcatcacgtccttgggctcttcaaccacgcagatcaccgaacggtcgcgtctcgggtcggcgcataccgggcaggggctggattcgcacacgttgccgcaaatatcacagaagcggatcttggccttgacctcctcgatggcctcggccaaatcgcgcgcttcatcttcgggcgcggacagcatgtagaaggcgatacgctgcgcgcccttcggcccgatgccgggcagccgcccgaaagcgtcgatcagtcgctgtattgcgccgtcataagcaagtgccatgggtattcctcgttattcgtcctcattattcatccgagtgcttcttggcaggctggatgttcttggggttcttcggatcatctgccgcgaattgctcgacttttttgacctcgaatagctttttcagatcgtcaagattcatggccgtcgcctcgccgagcgactggtcgttcatcgagtattcgtcgtcctcggccgcgacttgcggttgcggctgcggctggctattccacgggtcggcattcggcgtcggctgtgcgggctgcggttgattccacgggtcatcgccggcagccggctgcggaaccgattggggctggttccacgggtcatcgcccgacatattgcccgacactgtctgaggaaccgaagaagccggagtctgggactgcggctgattccacgggtcgtctcctggctgcggagccgcctgagcatggttcccctgcggctgattccacggatcatcgtgaggagactgctgatatggctggttccacgggtcggcttcgaccggttgcagtgccagcgaggccgtagcctgagattgcggctgattccatggatcatcgcttgcgccggcaactgccgtagcgggagctgcggtggctggctgccccgtggactgtccagtgggtccagcggacgcaacggacgcagcgggtgcaacaggagcagccggagcggcccacggatcaacaccatcactgatgtccggaaccgcaacatgcttcttgtgatgctcttcgggcgcaggcacagcagcgggctcgttaggtgcgaacccgtctgcagattgcggtgaagcgttgcttacggccggcttggcccaagggtcatcgtcactccagctcttcgccgccgtggatgcactggattggccggctcgatggctgtcgtccgtatcctcggcttggcctgttgcagtcggcttcggagctttcggctcgctccccatatgaatgcccagacccgcgcccaaactcgacgcggccaatccggccttggccatggcaatctgctgcttgaccttggccaattgctccgggctcatacgtttgacggattcgactcgctcgccattcgccgcgaccgcagaaggtgcaataaccgcattggcaccgaactcgttgcgcacggcatccaacaccacggacgccgccttcttaccgctgttgtccacggccaaggcgaaagcgtgctggctcagcgacttgtcgaacgtcatcgacaggcaaggcagactcttacggttgggaccgaattttacggtcggcaccttgtctcgtgacacatattcacgaatggtttccggcaaagcggcgacggctgcatcccacttctcgtcgatggaccgattatccgatgccgcaggcgaggtcaccggttgggccgggacggccggcgacgtggcgggagcaccccaggcattggcagcagcagctgctgcggcaggttgcgcagacggagagcccgcgggccggtcgctgactgggctgctgacagggccattgtctcccacagcggattcatgggaagcggtgctctgaggcgcggctgcttgctggttgcgtgcagcaccggagaatccaccatgtgaggctccggcaaacccgcctcgcgatgcgccggcaaaaccactggcacccgtaccggaagcggctgacgtagtcgaagtcgaagaagcagccgcaggcggcatgccagaagaagctggcgcgggagcggctgttgcaaagcctgattcactgccggccaacaatcgtgcggccagcagttccaagcgcatacgcggagaaatggctccggtcatggcacccaacgtagtgttgatgatgtctgccatggcggtcagtgcgcccagtcccagcgccttggcttggcggtgcagatcgtccatatcctcggcctcagccgtgtcggacagcacggattccgcacggtccccggccaacgtaagcaccagcagatcacgcacacgagccagcaggtcttcgacgaatcgtctcggatcgaatccgccgaccacgactttctggataacgccgtacagggcttcgccgttgtgattgattaccgcatccactgcctcaccgatcagcgcctccggtgtgaagccgagcagggctacagcggcatcatgggtgataacgccttcgaccgaaccaaccatcagctggtcaagcacagacagggtatctcgcatggagccgccaccggcgcgcatcgccagtttcagcacaccgggctcgggcttgatgccttccttgtcgcagatcgtctccaggtagggacccatgacttcctgcggcaccagacggaacggatagtggtgggtgcgcgaacggatggtgccgatcaccttgtctggttcggtggtggcgaagatgaacatcacatgttcaggcggctcttcaacgattttaagcagcgcattgaagccctgctgcgtgaccatatgggcctcatcgagaatgaaaatcttatagcggtcgcgcgcaggggcgaaaccagcgcgttctcgcaattctcgagcatcatccacaccgttgtgcgaggccgcatcgatttcgaccacgtcgatggaacccggaccgccggtggccaggtccttgcagctttcgcattcgccgcaggggtgggaagtcggccctttggcacagttgacgcaacgggccaggatacgcgcggagctggttttaccgcatcctcgcggccctgagaacagataggcatgcgtaagcttgccttcgtccaaggcgcgcatcagcgggaccgtgacttggtcctggccgatgaccccttcgaaggtgtccggacgatagcgacgatacagtgcaagtgccatagctactaacctacctttgccctcagaattaaccgataaaaagtcaagataaaccgggctcatagctgccgaatcgggaaaactctttatattccaacgacattcatctgacaacggttaccgcatttttattgttattaaccgctttctttgtattaacatagtgtcaataacggttgtagtcaggaggtgcccatgagcgatatcctcgacgagaaacgccccacccgtggcgatgcccggcgcgacgccatcgtgcaagccgcgcgcaaggtgtgtctggaaaaaggcttctccaaaatcaccgtttccgacatcgcaagcgaagtcggtatgacgcgttcgctgttctaccactacttcgaagacaaggaagccgtagccgacgcagtactcgatgacgtcatcgacgaaatcctcaccacgttgaagcagtggaaccaagcgcgcgaaacaggcaacgtgaacaaggcattagacgacatcgtgcatgtgctccgttccctaatcgccgacgagagccccttctcaaaccgtatgatccaagatggcaacgccgaactgtatatcaagttcattgaccgcgcggcggaccgtattgccgactacattgcccagaccaccgtacgtgatttcgagcagatgcatggtctgccaatcaccaacgtccatgagacattcttcacgctaatcgtggggcttatctcgctggttcgctcgcatccgaacatcagcgaccgaaccatcaaagaggtcatggcgcagacgctgcatatcgaaagctatgtcgtctgaggtctgacggccattggctctggtaccgctctcccgcactcccctcagtccgcttcgcggccagctcgtccgcaatcgcggacagcctacggctgactttctcctggttcgactatcgtcgaaccctcgcctacaaacatcccactgggctgtttgctttacggctcagcctaatgaggggagccaatataatcaggtcaggcgaactggccggttacggggtcgcgaccgtctcgggcgatggcgtcgagcacttcctgtcgggagtccacctcacgggcggctacggccggcggtaccagtacgcgtagcgcgcagtcctcggccactaccctgaatggcagatgcccgatgtattcgccgtccgccatcagcaccggtggctcgtcgccttctgcggctcgcgtgacttcgatctcgcgtatgcgcttccacccgaacacctttgaggcgagcagcttgccgttataggcgttcgagatggccaccgcacattcgccgaagttcggcacatgattcatccacaccaggtccaacagcccgtcggagaagcaggagtacggtgagacctcgatgccgccaccgatatgacgcgaattcgcaatcgtcagcaacggcgtgatgatgtctcgttcatccgtggtaccgtccgccagcgtggccttgacgtggtacccataacgcttcatatgcgtcagctccaccagcaccgccgcaaagtagcgcatggtgccggtcggcagatgcgaatgattcgcacggtcgttgatacttgcgtcaagaccacaagacagcatgcccgcatagtaccggtcaatcgggtgctcggcagacttgttctcccggtactcgtattccccgccggtggatgggttcacggcatagccaccatccaaagaggtcacgcgtcccatgtccacatcaatgtgtgatccgcgcacgatagcgccgacgataccttccactgcggtttcgatgcgattgaccggcagcttaagtccccgagcgaaatcgttgcccgagcccatggccacgatgcccagcggcttaccgccgcaacccacggcattggcaccgagtgcgatcatgccgtcgccgccgaccaccaccagatagtcgtactcgtgcgcgcgttcacgcgcctggttcagggaatcgtcgaaacttacgccggtgatgtcgatgacgtcgaagttatgggcacggccggcgtcctccagcagtcccaatactcgcgcatccaccttggcaccacggcccttatcggaagtgggattgcccaccatggccaccacgcgacggcgttctgtgcgttcactctcgctcatgctctcaccttaaccaaaggtccagaagcccgccagagcatcagtgcttacggtccattattgtgataattgtctccttccgtacaattcaccggtccggcccgagccatccgctccacggatgatgccaccggaaccatggtttccaccttgatggttaccaacacgtcttcatcccgcacggagcaggagcccagcgtgacgccattcgcttcagccatgtttgcagcaagcgcgcatggatcaccgatatccacatgccacagcgcatacgcggcgtcaaaggcgatgagatcggcgagggaacgcgctcgattctggcagatcatgaggttgcccacacttgccgccaccgcgagcgcaatgcccaccgccataaccagcatggctccggccatcgtgcccgatccctcctcataacgcattccctgcaccgcagttcctttctattgcggccgcccagccagcagccgaccagttattggcttatcgccgtagcgttgccggtgacccgcgttggagtgacatccagtgggccgggcagtaccgaacattcgaccatcacgctcgtcgattggccgttgtgggcaatgctgacgcggggatctccccctgcaacgtccgcagctatgctgcgcgcggatgattcgtcaccggtaaccacaaactcgcgtgcagccgccgtcgcggcaccttggcagtccatggaaacgatgaccacacgtcccattgccagtatcagcccggcgatggcgataacgctgggcaatacgatcgcgaattcggcggtggccgatcccgtgcataggtctggcggcagtctggcgagcctccaccggcatctcatggtcttcatggctgtcacccgactttcagagcctgtttgatgatgttggtcagcaacgtcttgatggcatccgacttcaggatggcgaccagcaccgccgcaaagcctgtagccgcaacgagtacgactgcgtattccgcagtggctgcgccttcttcgggctcagccatgagggcgcggatgcgtgcgtccatgaggcatagccgttctttcgccttggcgttcagcgtggccacacgagccttgctgtgcgcaaagatgccggcctgcccgtcgacgatgacggggataggggtattcattggcgttcctttcggtaaggaggggaagctgcgcagtggcttcgcaccttccccatgcgtatgtgagtggttggcccccgcgccgggttgacgcggggtgcataccactgtggactatcaacgcttcatgcaccaggaaaaacggggtatgtggttctagcttgccgagttatccacacctcgacgtgtcgtccaccacaaatgtggataaccaaacgcagccaagtacaataccgagcaatacaacaagattcagcctaagcgcactcagttcacgcctatattcacatcatgaaggacgcaatcgccggaatgactcctaccagcacgaatgccggcagaaaacatagccctgtaggcatcagtagctttaccgacagcttcgcggcattccgttcgatagcagcacgctcgtcacggtccagctgttcaatggcggattcgaggcgcacaccaggcatatcgccatgcgtccatgacgattccaaagccgattgcagcaggccaagatctcgttgcgtggtattcgtatttcccttggatggactatcagctggcgcaccctcatgctgaacagccatagcggcatgccacgcatcagcccagggaacccctctggtcagggagttcccgacctcgctcatgcgagcgccgcagtctccgccgacggctttgcccaccatgtcaagcgcccggggaatcgaggagccctgacgcaaggacacctgcaacatacgcaatatgagtatggtccatgacgacccgcaatcatgcgctacggccggctcctcgcccggcaagcggctgtcatgacgagacagagccttatacagccaaccagcaatcgccgcacagcctgccgcggcgtgtacccacaccgtactcataatccgctgcctttcaacaatgcccgcatccatgccaagccggcagcataacaacatcctcccaatgtcaagcagaccacaccgcgtggcgatccaagcaagaacgccaatggtctagctcccagaagctcgcccaatgccacagtgacggccggaagcgcgctcagcagccccacagtggctttaggaacggcacatgcttgcgatcgcaagttctgcatcagcctcatctgccggtaagcagtcaataccgcttccagacatggcaccgcttggcaaccgagctcatcgctcaaaaccgctgcggcggcgaccccgcgtgcagcttcaagtacctgcgctggtgattcgtcgggcagacgccgctgttcgaacaccgttatgagccgttccacagtaatgcgatgagtggcgaagcgtctgctggattgttcctcgaatgcttcaaccaatgtgccgccacctcgcaatcgcgcgatggcggacgtaatcacctgcgcaacgcccacgcgaggtgagtcggcatatcgaggttcgtttatggctgcggaatcgaccgcgcgcccgcggtaagccagccggtacagcctcccggacttgttccccggccatatcagcacggcgagcgccaccagaacagcacaccacatcatcacccaccaccactcggcctgggaacgatgccccatcgttcaatgaagtgcccccattcggcggcataccgaggaggatggcagccattccataccgccagcggtgttcctgccagttcaccatgtgctacgcgcagttcgccgatctgcgtgatacgccgctgtccgttcactcgctccaaatgcaccaccgcgtcgaaagcgcctgccgccagcatggtcaacgcctgcggactgactccggcgagtaatccaagcgaaatcagcctggacggtactcggttcacgccgtccgcatgcacggtggtcatgccaccgtgatgaccagaattgaacgcgcgcaataggtcgacgatttccgcgccacggcattcgcccagcaccacgcggtcggggcgcattcgcaacgtcgctttgaccaagtccgccaggcttatggctccgacgccctccacattcgcctcgcgtgttaccaacgagacatgatcgtcgcgtcccagttcccccagttcacgaacttcctctacggtgacgatgcgctcgttcacgtcgcattgcgccagcagcgccttgagcaaggtggtcttgcccacgcctgttccgccggtaatcagcactgtggcatgtttgcgcaccaatcccacgaacgtcggcagccaagcagccgggaatacgcctaatttgctcaggtgctgtagcgatgccatggttcggtcagggaatcgtatggaaatcgcggcaccttgtggcaccaatggggcaatcaccgcatgcacgcggatgccatccggactggcggcatccgctatcgggcaggcatcatccagtctgcgcccgagctgcgcgcacagttggacggcgtattctcgaactacttgcggcgagcggaacggcacatgcaatactgtttcgcgcatgccattgccgcggtccgcccaaacgcggccatcacaggtcaccgccaaatcggtaacctgcgggtcagatgccacgtcatccagcagaccgaagaatatggttctgagcgctgtgccagcctcattggctcgcgtgctgacggcagccatagcatcactggtccttgtgagaagctcccgaaaccgggcgaatggcctgttctacgagatcggcaagcaagttcatggctttgcgactgcctttggtcaccgatctgatgccgaggccttccagtacgtctccgcacagattgacacttggcttgatgggccccaataccgtggcagtcaaatagtcctgcgcctcgccaatacccacgtggcctctcccacgtggagcgccacgtggttccacacctacgatatgtggcgcttcacagccccatgaatccaatctggaccggtgcgacttggctctggccagccccattaccgacaattccgcggcaatcacctgcaggccactgcgcagatcgggtacggtctcaatgagtccaccctgaccggcatctacgatgacaacgtcgttcgtttccgccaaagcccgaatggccgcttgaacttcccaccagtcaggctggcgcgcgctccaagggtcatagggaagtactcgcacaccctcccacatcatcagctcatggttcatcgcctcaccctcgatacggccgaggggcgcgtcgacttggctgaaccgcaagcccggctctcgttctacaccaagcagcaggtcaaggcatccggccacgaaatcagcgtctatgagaacgcagctgtgttcacgtctcgccaatgtccatgcaagcatggaagccatgacgctcaaccccacgcctccatgacctgacgtcatcgttacaatgttatggaagctggtgtctgtagttagggcgagtgccggagcctcgcccgatctctgccgttcgcatgaggccaacggcctgggcggcggagtgtagtagcgatacgctggaattggcgcatcgtccgtgggcagcggaatgcccgaaggtgctaccgctggcgaggtgatcctacgcgccacgcggggtgtggtgttgctattcataagccgattgaaacgtgtccgagttcaatgctcaacacgaatcgaccattgtggttctagcttgctgagttatccacaccccggcatgtcgtccacgacaaatgtggataaccacgctgctgtttcacgcccatctcatgcagaaaaggccctgacctcacatgcacagtcagggccttcattttcacgacgattccttatgcggtaatctacatttcttgcttacttatcgaggttcttaatgccgtcttccatagcatccaactgagcatcggtcaccttggccggcttcttcttgccgaacttggccttgagcagaccgatgatggtcggggcgagcgagaccagcagaatcagcacgatcaccagctcgaagtggtcctgtactgccggaatgttaccgaagaagtagcccagcagcgtgaacaacgtggaccagcacaggccgccgagcactgagaacggcgtgaaacggctccaacgcataccggaaataccggagatgaacggcatgaacgtacgaatgaacgggaagaaacggcccaggaacacggccagcgggccccacttctcaatcatgtgctcggttttggccaaacgctccggggtcaaggccttcaccttgccggactggatgatgcgacggccgaagaaatgaccaatgaagtaattgcactggtcgccgataatcggggcgcaccagaccaccggcagcagccagaacagcggcagcgcggccttgccggtcgcggcatcgggagcggcgaacacaccggcggcgaacagcagggagtcgcccggcaggaatgggaagaacaccacacccgtttcgataaatacgatgaggaagatgaagccgagggtcggcgccacgccc

SEQ ID NO: 597 - DNA, 34479 bp, Unknown
  R14_15m  MAG No. k141_2138
ccgtaccctgctgtacttcgctgagatctccgagtgaaccactgcggtctaggccgctacggttcgtttgagaactaagctgtgagacccccgccttgtgcgggggtctcttcgtagtagaacggtaatcatggcaaagaaaagcaagcatgataagggcgcgggttctaccccggcgacagtccaactggagaaggcgggcgtggaattccacgtatacgaatacgagcactccaacgaccatatggatgacggctacggcgtggaggcggccaccaagctcggcttcgacgagcatcaggtgttcaagacgttgatggcggacaccggttcggagcgtgtggtgggcgtggtaccggtcagcggacatatggatttgaaggccctggctgcggctgtaggtgccaagaaggcctctatggccgatcccaaggtggcaatgcgtgaatccggctatgtggtaggtggcatctcgccgttgggccagaagacacgtcataagactgtgttggatgaaagcgccctgcaattcgaccagattctggtctccggcggcaaacgcggcctgtctgtgggcgtgaatccacaggacctgctcaaggtcttgaacgccgttgccgcaccaatcggcacgtggtgaccgttcttggcttccctcggtgaggggagccaaggatgactacttcttcctgcgcaactccgacggcagcacgaagtgcatgttttccttgatggtttcgacggacttcataccggtgaagcccaagttttgcagagcgtcaatcacaccggacaccagttcgtccggcacggaggcacctgaggagatacctacggattccagaccctcgaaccatgccggatcaagctcgctggcatcatccacgcgatacgctttgccgcgctctcccaagccctcctgcgccacctccatcagtcgcacggaattcgaggagttggccgatccgacaatcaccacgcaatcggactgctgggccaccagtttgaccgcagcctgacgattcgatgtggcatagcagatatccgaactcggcggctcttgaatccacgggaacttggccttcagcgcggcaatggtgccggcggtctcatccacgctcaacgtggtctgcgagagcagcaccagcttggtgtcgggcgcaaaatccaacgaatcgacatccgattcatgctcgatcaagtgcacatgttcggggttctcccccaccacgccgaccgcttcatcgtggcccttgtgcccgatatagacgatttcatacccctcgcgcacgaaacgcagcacctcacggtgcaccttacccaccagagggcaggtggcatccaccacatgcatgccacgacgttcggcttccgccttcactaccggagatacgccatgggcggaaaacaccaccggaatacccgcttgggcagcagcatccggaatctccgccaattcctggacgaacaccgcgccttgcccggccaagtcctcgaccacatgcttgttgtgcacgatctgccggcgcacatataccgggggcagcccatcctcgcgcgttcgctttccggaagcctccgcggctttgagaatggtctgtacggtaagaatcgcacggtccacacccgcgcagaagcctcgcggatcagcgagcacaacgcttttggtcatcggaacctcctgaacgtcaatagtgtttttccagtgtaaggcagggattacaggaatctgccgtcacaacttttccgcgtctcccacgaatcaccggtttccaaggaatccacgtgcttctcgcatgatggtgtgagattcgtcactccacgtattgctaccgtgtctgtacgaattgtttattatatgccggctatcgccaatccccgcctcgatagaggagacgcgctagactggggccagcgatagcaggagctaccggcccaccaacctcactacgggagtgattccatgacgagtaaaacaccacgcaccggaaatcagtattcgattcactatggcgattattccgccgtcatctgcgaactcggcgccaagattcgccgattcgattatcaaggcaaggaaattttctgcccgttcggagtcaacgacctgacccccacctgtaacggctatgtgctggccccgtggccaaaccgcatcgaaaacggcgaatacgatttcaatggcaagcattactgcgcgccggtcaacgaatatcatcccgcaccgcgcaacaatgcgaaccacggatacgcctaccactacatgtggaatcttgaatcgttgaccgatagcgccgtgacgctttcactgcgcttccccaacctggacggatacccgttcgatgtgaccgtgaccgtcacatacgaactcggcaacaacggcatgaccgtgaccgtcaatgcccgcaatgatggcgacgagccggcaccgtgggctctcggcctgcatccgtggctggccaatggcaagcagggcgcgacttccgccgagcgtgacgccgactccgccgcctgccacctgcagatcaaggccgccagtcatgtgacggtgaacgaggcgctgattcccaccggcaccgaaccggttaccggcatctacgacctgaacgatggcccgacgctcgaaggccgcgcctttgatgatgcctgggtcgacgtggagcgtgccgccgatggtacgaccaccaccacattcacccgcccggacggtattgaagtgaagctcattggcgatgagacgatcaatgcttggcagtgctacaccgccactggcgcaccgttcgccgagcatccgtatggcatcgccgtcgagccgatgaccgccccggccaatgccttccgcactggtgaccacttggtgacgctcgcccccaatggcgactacaccactgtggtccgctacgaagtagtccagaagtagttccgttacgctggctcccctccagaggggagccaattttttatccttatgtgccgccgcgtcttgggacttgtgcgatacgattgtgagcggtaacaatctgtttcacaaaggagtgtgcactatggctttgaagcctcgcactggtaaccaatatgtcatctcgtccggcgaatggagtgccgtcgtcaccgaactgggtgccagcctgcgcgagctgaagtggcgcggcgaagacctcatcgtccccttcgacccgaacaaggtcatcccctgctgcaacggctgggtgctggcaccgtacccgaaccgcgtgaccaatggtcagtattctttcgatggcgaagactaccagatgccgatcgacgagttcgaccgccaatcctccctgcacggctacgcctaccgctacatgtgggagctcgttgatttgcaggaatcacatgtgacgctctcctggcgttcccccgacatcgccggctacccgtttgatatcaccatcaccgccacttatgcacttgacgagaacggtctcacggaaaccttcaccgtgcacaacaacgacagcgtgaaggccccatgggcatttggcatccacccgtggctggcaaacggcaagcacgccaccggtcaggccattaccgccgacaacgagtcctgccgtcttgagctgcactgcgatacccacgtgaccgtagacgaacacctgctgcccaccggtgaagagccggtttccggcatcttcgacctgcgcgataaccccacgctggagggacgtggcttcgacgatgcctggaccgatatcaccaaccgcggcgaagatggcagcacttccgccgtgttcacccgccccgacggcatcaaggtcacgctgaccggcgacaagaccatcaactcctggcaggtgtgcaccggcaacgaaatcggcgggaaggctcgtcaggccggcgtggccgtcgaaccgatgaccgcctacgccgacgccttccgcaccggcaaggatctggttgtgctcgagccgggcgatgactacaccaccgtggtcaccttccacgccgaacaaatctgaaaaaccgaataaccaagcctgacgatcatcgccacatggacacccgtgttgcatcacgtcgtacttatgtggcataattccgaaggcttatttttttactgcagcaaaggagtccatcatgggcatgcgcggacgtaagcgcaaggatcgtcgtaagaaggccgccaaccacggcaagcgtcctaacgcctgattcttcgcgtttcttatagaacgctcaaggcccgtctgatgatacatcagacgggccttgttgtatatggtcgttacttatcttcgccgcagcagtgatcaagcgtggccttgagccgggccatcagacattcgggcgccacatccgggcgcaagtaggcacgcaacgcggcaatcaacgcctgttcacgctcgtcgcagcaggtacgggggtcaaaacagtcgccctccgtaacgatatgcacgtctgtctggaccgacgcagcggccgagccggtatctactgaacgatgatgcaccgccgtgatatgcacttcggtctggcttaccgtaccatcggccgccgtacgggttatggagatatggcgagtacgctctaccggctgatcgttcatcagatctcctttcccgaaagcttgcttgactgttgtggcgtgtgggcgtgagtcgcatgactatgtctcactacggcttgcgtgtcgccattgctgccaacagtttgttcactactttcattatggccggaatcggcgattcgaccaacgttttcgctcaacttcgcggatggtgaaccagccgacgaaccagtcgcgtacccgcgctctttcgcatacgaggcgagctcacgcttgagttgcgtgcgggcgcgattcaggcggctcattaccgtgccgattttcacgccctgctcatcggccacctgctggtaggacttgccgtcgatggcggcgtcgatgaacacctgccggcgttccggcgagagtttggcgagcgcggccatgatttcctcgggcgcgaaggcgtccaaatattcctcttcagcggacttgagcccgtccgacgtatgttcggcggcatcgtaaatgtcccaatcgtcgtattcgccagtggagtcgttggcacgctgcgggcgccgcttggccttggcatactggttgaagtaggcattgcgctcgatggtggtcatccacgcctcgaagttggagcccggctggaatgagtcgaaggccttgaacccgcgttcgaaggtgtcctggaccagatcctgcgcgtcatcgggattgttggtcagcctcatcgcctgccggtacagtgcattgacggcgggcatggcgagctgctcgaatctggcgcgcttggctgccatggactcgcccgatccggctgactgcccggattgcgtagttgcttcgcttgtcgtcacggttcaccattctaatcaaatcatgtgcccatatcgtggtcgatgacgtgtgagccacaacacgctgcaccccacctgtagaatggcgtatcggctagataatagggagaaacaattatggctttgactttggcttcggccgctgacctgctcaaggaacaccatctgctgcgtgaaatcatccaaggggatgtctggaccgacgacccggcccgtatcgcttcggcggatgaaccgttcgccggcatcacctacgacacccgcaaggtcacgccgggcaccctgctgtgctgcaagggccgattcaaggccgagtatctgaacggcatcgacgaagccggcctggccgcatacgtggccgaaaccgagtactcagccgcaaccgccgcccccggcctgatcgtcaacgacgcacgcaaggcgatgagcctgctgtccgccgcgttctacggatatccgcagaacgagctcacggtcatcggcgtcaccggcaccaagggcaagacgaccacctcgtacttcacgcaggcgcttatcaacgccgtctccggtggcaaggccgcattgttctcctcggtcgataattgccttgacggccacacctacgtcgaatccgatctgaccacgcccgaatcgatggacgccttccgcatgatgcgcgaggcggccgataacggcatgaagtatctggtgatggaggtctcctcccaggcgtacaaggtggaccgcgtctacggactgactttcgatgtggccgcgttcctgaacatctcccccgaccacatcagcccgatcgaacaccccacgttcgaggattacctgtattgcaagcgccagatcatcgccaacgcgaagtcgctggtactcggcgcggacagtctgcacgccgatctgttgcgggaggacgcggaggcagccggcatcggcgtgaccaccttcgccctgcatgacgcggataatgccggcaccagtgcggacgtcgtcgcctggcccgccgacccggagcacgcctccttccacatcgccgacggagatcagacccttggcgactaccatctgtccatcgatggcgacttcaactacctcaatgcggcggcggccatcgccatcgcccatgcggctggcgtatcgctcgatgacgccggcgcactgcacgccatcgaatccgtacgtatcgctggccgtatggaacagttccgcgatccgcagtcgaacacgctcgccatcgtcgattatgcgcacaactacgcatccgtcaccgcgctgcttgacttcgtctacgagcgttggggcgaggaaaacccgcgtatcacgctggtgaccggatcggccggcaacaaggcctacgatcgtcgtaaggaaatcgtcgaggctgccgagaaccgcatcgcgaacttcattttcaccgccgaagatacggacaccgagccgttcatcgacatctgcatggaaatgcaaggctacatcacgaacaaggatgtggcctccacggtgatttccgaccgtccgacggccatcaccaacgccatttacgatgcccgtgcgcacgccgaccgattcaacatcctgctgatcatcggcaagggcaacgagcgttggatcaaggaccatcacaagcatgtgccgttcgacggcgacgatcacgtggtcgaacgcatgtttggcttgtgacgggattccggccaatcagatcctgatcggattccgattggcccacatcagatcacgcgcaatacgaccaaaccagaaacacgacatacggatacgaacgaaaaaggatagctgaatcgtaatgatcacgttggagaaagttgacggagccacactggaagccgaagccgagaaggccggcatcacgttgcctatcgaacagaccaaggtttggtctggttttcaggcggatatcgacggacgcacgccatggggcgattatctgatcaagcgtgatggtgaattggtcgccgtgatctcctttatcgattttgagacgcacggttatcattatctgcgctcgatgcatgggccggcgtgggctgccaagcccaccgaagctgaggagcgcgaggtcgtcgacgccatcgtggacaccgtcaagaaggccgacaagaacatcgcgttcctgcgtatcgacacctggttcgccgatggtacggagaaggtgctgtccacagtgccgtacgaccagaccgtggtcatcgacgtcactggtggcgatgatgagattctggctcggatgaagcgtcgtggacgccgtgacgtgcgcaagtctctgcgcgagtgcccggccgaggttgccgatgagacggataaggcgctggccgatttctccgaatattacgatgtgatggtcgagaccggccagcgcgatggattcacgcctgctccgatgagcgactattccgatatgatcggcgcgttgggtgccgatcattgccgtgtgttcgccgcacgtattgaagaccgtgtggtggcatggtcgattgtcaccgtgaacggcacgcatgcggtgcgctactatgccggcatgcgcaacgaggttatgcgtctgcatgtgaccgacaagctgctgtattccgaatgctgcatcctgggctcgcagggtattactgaatacgatctcatgggcattggctccgatttcgcgccgtctctcaagggccttaacgagttcaagtgcaagttcaccgaggaaatcaccccggtggcccccgcccgcgacgtacccatcaagaaggtcttctacaagacgctgcaaaccatccaaggcgtgcgcaaggcattgcgctaatacctccccgctcccgctggtgggagctgtcgaacgaagcgagactgagggcggtctttcgatatggaccgccctctgtcacctgtggtaccagttcctgtcagcgggaaccattcgtttatcgttcgagtttttgactcaccacggctgttacgccatcggctctcatggttacgccgtaaagcgcgtcggcaatcgacatggtgcgttgctggtgcgtaatgatgatgagctgcgcatgggcgcgtagctcattgaacgcattaatcaaacgggtcaggttcacgtcgtccaacgcggcctcgacctcgtccatcacatagaacgggctggggcgggcggtgaaaatcgcgaacagcagcgccagcgcggtcagcgaacgttcgccgccggacaggaggctcagctgtttgacgcgcttgccggccgggctggcctcgaccagtacgccggtggtgagcatgtcttccgggttttccaggcgcagtcgtccggtgccgcctgggaacagcgtggcgaacatctgctcgaatgcctcggcggtatcgtcgaacgcggatttgaacacctggaccatcgtggaatcgagatccttgatgagctgcatcaaatcgtcacgtgatttgaccacatcgttgcgctgatcattgagatacttgttccgctcctcaagcgcttcgaattcctcggtggccaaagggttgatcttaccgagtgcggccagatcgcggcgagccttatcgagacgcttcttctgctcctgacggttatacggcacggtcttaaagagggcggaatcgccgttggtgccggtctctcccccggtttctccctcttcggtcccagcctcagcttccgtctcatccaacggcacagggttgccctcatcatccagcacgggcaccggctgttcggggccgtaaccactaaccaattcctccaaagtgagaccgagttcgtcggacactttttgcatgagctgcccggattcggcggccaaccgttcgcggtttacatccaaggcatgttcgcgcccggtcagatcggtgaccttgggctcgatctggttgcgctgcgcgcgcagggccttgagttcctcgtcatggctggaggcggcggcctgcagctcgtctcgtttggcggccacgtcatgcagcgtatgttccaccatggcggccactgctcgcgcgtcatcggccacgccttgcaggtgtgcggcctgctcgcgtctgcgatcgttcaacgcctcgatgcgggcgcggcgttcggcggcttctctggcgttgtcccgcagcagcccggcctgtcggctcagtgactcccctttgcggcttgcttcggtccacgcgattttcgcggcgacctcatgctcgcgagtcaggttcagtccgcgctccagcgtgcgttcacgttcatcaagttcgtcgaaatcggcatgttccgctgtggattgccgggccgatgccaaagcgcgattgagatcgtcgagcttgcgctgatgctcgttgcgattctcttgggtctcggtgattttcctatccagctgctcaagctgacgggtgaacgatgcgatgcgatccgtggcggatttcagagatttctccgcctgttgggctttgagccgggcttcggtgcgtttggcggattcctggtcgacgagtcgggccgcttcatcgcgtttggctttggcctcggccacttgctcagccattccgccgtcttgggcggccaactgtttgacctgtgccaatgctttgtctcgacgggcggccagagacaggtccgattgagagatggaagagccgccgaccgccgccacgccgtgtgtgaaggtctcgccgttcttggtgacggcccgcatggcttcgccggatgccacgatgtgctgtgcttcgtcggcggtgccggccatggctacatcagccagcaggagacgcacggtgtgcacgacagcttcggcctgtgccgggttctttgcatccgggttcgcggtgacgagtgctgccagcgcgttgcccgattgcggggcggccgccgtgttctcggcgctactctcctccgactccgtgcctggctctgtggcgggatcgccggcaatgctcgcggtcagcaccacggctttgccgagcttatcttcccgagcgcgttcgagggcgtgcaacatgttgcctgcctcgggtaccacgatggcgctggcatactggtcgagcgcgtgggccacggcttcttcccagccttcggccacatggatgaagtcggtgagtcggccaagcgaggccacgtccgtgtcgcgttccaatgatccggaggcattgcggctgcctagcgtgtcggcaagcgcatcggccttggatttgagcgagatgatcttggactgtatctcgcgctgcttatcggcgagttcgttcagtcgttcgcggcattcggcgagcgttgcacgcgcggcgtccaatgcggcaccatcatcgtcggcaatggagtctgcttcgctgcgcaatgcgtccagctgttgctgggcatcgtcgcgctgggaagtcagcaagtcgcgttgggaggcataatccttggcgcggctggtcgccagttgcacggcggattcctcgcgggcgatgagttcgcgcagtcgggcgatctgcgcatcgcgctcctgtgcggttttgcgcagttcagtcaatgtctggcggactgaggcaagcttcttctcgtcgtcggcgcgttcctcggtggccttgtcgagtgcgatgcgtgcatcggccacggccttggtttgtgccgcggcctgagactccagttcctcggctcgtttgacgagcatgccgggatcctcaccgaagttggtgacgatctggccggtgagtgaccggctgcgctcttcggccaactgggcgagcgcgttcagtcgttcacgggtctgtgaaaattcatgccagtattggttggccttggcgatggccggactggattcagagctcaacgcctcgacctgttcgatgcgtactttgacttgggcgagttcacgctgggcgacggccagctggttgcgcacatcgccaagctcttgacgtaccgtgtcgcggcggttcatcgagcgttgggcgtcttcggcatacaggcgtgcttgggcgtcgcgtacggatatctgaatcgcgtcggcgcgccgggagatgcgtgcctggcgtccgagggggccgagctggcggtgaatctcccccagcaaatcgtcaagtcgactcaggttcgtttcggtattggccaacttgcgcaacgcgcgttccttgcgcttgcggtgcttcaggatgccggcggcctcttcgatgaacgcacggtgaccggacgggtcggccttcagaatcgcatccaatcgtccctgacccacaatcacgtgcatctgctggccaagaccggtatcggagaggagttcctgaatgtcgagcagacggcattgcgagccgttgatcgcgtattcggagcctccgttgcggaagatggtgcgggatatggtgacttccgtgtaatcgatatcgagcgtgtgatcggaattatcgatggtcaggctcacctgtgcacggcccaatggcgggcgggaggacgtgcctgcgaaaatcacgtcctccatcgaagtgccgcgaaggtttttggcaccttgctcacccatcacccaggtcagggcgtcgacgatgttcgacttgcccgaaccgttggggccgacgaccgccgtgatgccgggctcgaagcgcagcgtggtggcggaggcgaaggatttgaatccgcggagggtgagttccttgagatacatggcgtgagactgttttccgtatgtcgggcgtccgggtatccgatgtgccttggatgcgggttaccggacgtcggcggaatcgtcggtgacggcgcctgtgtcggcgctggccgtgccggtgccggcgttaccggcgtcactggcctgttccttgccgaggccgaggacgtcgaacacgtcgaagtcgtccgggctcaccgaatcctcgaggttgtcggcggcctcatcctcggccttgtctgccggccgatccgaatcgtccaggtcgaccgccggctgatggacggccatggcctgcctcatcgtggggctggcatgctcctcaagcatcaggcgtgcgtcgccggcggtgacgaagctgccgcagataagcacgccgtggccgtagcccacgcccaactcgtcttcggcatcgaccatgttgacggcagcctgaatcgcgtcgggcaggttcgcttccttgatcacacggtcacggccgaacacgtccacggcaatcttctcgagctcatcggccggcatcacacgctcgcgccacgagttctcggtgaccaccacggagctcaggatcggctccagaacacccagatattcctcgacctgcttgtcgcgcatcatggcgaccacgccgaccagctgcttgaagtcgtagctttcctctatggccttgcgtagggcttcggcggcattcacgttgtgtccgccatccagaatgatggtcggtgaggtgcggatctgttcgatgcgtccgggaatcttgaccgagctcaacgcctcgcccaccaagtcgccgtccagcgggccattgaccggaatcaccacttcagaggcggcaagcgcggcaagcgcgttgtgggcctgatgctcgccgaacttggcgatcggcacgccctcgtaagtgccgttgggcgtggtcagggtggcgacctggccgccgactgcggccatacggtcggacacggtcatttcgtagccgtcgcgcacgagcatggcgtggttgcgttcggcggcttcggtgagaatcggcatgacggcttcctcatgcggctgaggcccgatgatggcggtgcagttcggcttgatgatgccggccttctcggtggcgatctgttcgacggtgtcgcccagccactgcatgtggtccatgtccaccgggccgatgatggccgcatccgcgttgagcacgttggtggcgtcccacaggcctcccatgccgacctcgacgatggccacgtccacgggcgtgtcggcgaacttccagatggccatggcggtgagcacctcgaagaagctcatcttcggcttgccttgctcctccatcttggcgtccaccagggccacgagatccttggtctggtcccagatgtcgatgaaatcgtcgtcggacagctgctggccgtcgatggcgatacgctcgttgatcttctccagatgcggcgaagtgtacaggccggtgcgcataccgtaggcgcggcagatggcctcggccatgcgtgcggtggagcctttgccgttggtgccggtgatatgaatcacgcggaacgactgctccgggtggcccaggatgtcgagcatcaggttcatccggtcgagatccagattggtggtgttatgctccggcgggcggctcatgatgtccagttcgacgtcccgcatgctctcgttgttccgattcggatgctcgaatgacatatcctcttctgacctctgctcgtgttgctgttgaaccgttcggagtgcgtatgccacttacgtgttcgtgccattctcgtcatgtctacgcatgcccgcgtatattccgcttccgcatgcgcaggaagctcccctcgcacaggtttgccctgcatggttcgggattcttgccttcacgcgtggagccgcactccctcaattccctctatcctagccgccggggtggtttatcgtgcgcgcacagtgaaaccgtctcatatgtcgccgccgcgcgggcggccttttcctgcagcgcgcacagtgaagccatctcatatagttgcaatgcggctcttgccgtcggcttcccattcttagtcggctgcaatccaaaacttgtatgtccggcgacgctgatgctattcagcgtcggtacagtgccagcttctggcggtacaccgacgctatgatgctcttgcgagtcggtagctggccaaaacctggattaatcccgactccatcgcctctcagtgtcgcctcctcgccaaggcatgccattctgccgtcgctgagaaatttcaacatcgtcaatcgaccatgtcttgccccggaaacgactctcacaaacgtcctctacatcatcttttgaactcgcagaggctcattcactgttatgactgctctcaccgtcggcagccgtccaagccctggatctatgccgccaataaattgcagcaaatcgtcggccacgatacaaccattggactcacgccgacgctagattccacactcagacagaagccagccaatatctgaaccagcaccgacggcgtacaaagcataagcaccgttaaccgtcaattcgccgccctctaccagctacatccgtcttcgccgatgatatcttgttcgaatccccaaagcacgttgttcgaatgacattactgatggtggataagttttgtatgttatccactattccgaattagcggcctaataccttgaaattatcgggaatatctcactccaagacagccaagctccgaggctagaaccacaatggctgaaattcatacttacgctgcttcgttccggctacgctcgacgtcatgaagacacacaaagcagtggcctcgctcatatcagccgcgcagaatgagctgagatgcgtctattcaagaaatgaagcggaacagaccgctctacgccgccgtgcccagagtggcgagttgttgaaagtgtatgacggcattcccagtctttatgcaaataccgcatactgggatggtttgacgccgccggagcgaacgttgcatatggcccgcgctcttgcgcaagagcatcctcagtgggtttttggcggcttggtggcagtaagtgcttatggattcgaacatcaatggcatttgcatgatggctgcataaccatcgtgacttccgatcatggatctcgtcaatgccatcagcgcttacgacatgtctatatgcccgatatgaacaatccgaagacacattacgaggcctccggcctatccctgatatcaccggctagaaccttggtcgaggccgctatagaccttgattttcggtttgcgttgccgatctttgactcggcccttgccaagggaataaccaaggaagagatagccgccgactgcgttcaatggagaatcgattatgcccgagtattccgcctgctgcgctatgcaaacgaaaggagcgagaatggtggagaatccctcgcgcgaggcaccatcatcgaggatcgcttcctcacgccgcgtattcaggtaacggtgaccgacccgcagacgaataccgagcaccgcgttgatttcgtatggaagctcgatgacgggcgcgtgatagtggccgaatacgacggcacacaaaaatacgtggacccagccatgaccgataaccgcagcattcaggaggtggtggccaaggaacgagcacgcgacgagggactgaaacgagccggtgccaccgaaatcgtccatttcacatacgccgacgtcatcgaacgcactccgctgcgggtaaaactgctcaaagccagagtgccccagatggaggcatccgcagagcagcgggtcccgtgatgcgatgaaccttcatcgcatgggttcacatggattcagcccgcaaaatatgccaatatcaatcggcaagctccagcccatgcccctccttccctaccgagaacaataaacgggcccgcattccagcccgatgcactcgccatatgggcatgtccggaagaccgtccaaattccgtacttggttttaccgtcagccgtcaatcgtggcacatcgcataaagccgactagtatgaggtgggaatcgatgattcgacaacaactacatacaggagagtggcaatgggtgaagtgatcaccgccaaggacaaggaatatgaggccgaggagcgcgctacggcgccgggcgcgaaccagtcgatgagcgaccgtgtgaacaaccgctcgctgcgcccgcagtcggctgcattcaaggagtttatgaagtccggctgggccgacgatgatccggagatcaagcctctcgaatcctccaagttcacgccagcccgccttgaggcgctgggcaaagccttcccgggcgagcgtctggtcattccggccggccagccgaaggtgcgcaacaatgattgcgattacatgttccgcccggacaccacgttcgcctactacaccggtctgggttccgattacgaggccggcgccgtgctggtcctgaacccggtcgaccccgactcccccgaagccgccgccggcaagacgcacactccggaactgttcgtggcacctcgcgccgacaactccaccgaggacttcttcatgtccgcccactacggcgaatactgggttggcccgcgtgctggcctcaaggagatgcaggcgatgaccggcatcgagacccacgacatcgcccagctggccgacgccctgtccaaggacgtgggtgccgaggccggcgccgtgcgtgtgcgcgtggtcagcgagaccgatcccgaaatcacctcgatggtcgagtccatccgcgaggccaacggtttcgccgatccggacaagaactccgcatccgacgacaagctgcacgagttcgccgccgaggcacgcatggtcaaagacggctacgaaatcaacgagatgcgcaaggccgtggacgccaccaagcacggcttcgaccgtctgctctccgcactgccggccgcgctcgacaagccgcgttccgagcgtatcctcgaaggcgcgttcaacgccgtgtcccgtgagctgggcaacgccatcggttacgactccatcgtggcctccggcccccacgccccgattctgcactggatgcgcaataccggtgtggtgaagaccggcgacatgctgctggtggatgccggcgttgaggtcgattccctgtacacggccgacatcacccgcaccttcccgaccaacggcaagttcaccgacttccagaagcgtctgtaccaggccgtgctggactcgcagcaggccggtttcgaagccgccaagccgggtgccacctattccgacatccaccacgcctgcatgcgtgtgatcgccgagcgtctgcacgattggggtctgctgccggtgagcgtcgaggagtcactgtccccgcaaggccagcagcaccgccgttggctcgcctgcggcgtggcccaccacctaggtcttgatgtgcatgattgcgcgcaggcccgctatgagtcctatcagggcgcgaagatcacgcccggcatgatcttcaccatcgagcccggtctgtacttccgcgaggatgatctgctgattccgccggaataccgcggcatcggcatccgtatcgaggacgacgtgctcatgaccgagaacggccccgaatggatttccgccggcatcccgaagcagatcgacgacgtcgaagcgtggatgcggagccgtaaagcaatcagtccggtggactgattgtaggcgacgccgaacgctgacaagcgcgaggaaaatgaaatcatgcgcgaagcgcaccatattaagcaggctgcccaagccaagtaacccttaagctccctcatcagagggagctcctttttttctactaaggaggcaatgtgcctactccggaatttgtgttggaattgcgtaagaagatcggccatgatctgctatggctcaatggcgtgaccggttgtgtactgaacgaacatggtcaactgctgttgggccgtcgttcggacacgggcgaatgggcgatggtctacggcatcaacgagccgggcgaacagccggcggacacggtggtgcgcgaaatcaaggaggagacgggcatcgatgccatcgtcaccgatttggtggccgtcacctcgtcaaacaaggtgctgacctacgccaatggcgacaacaccatgtacatggatcattcgttcctgtgcgccctgaagcccggcggcaatgccgagccgttcgtgggcgacgaggaaagcctcagcgtcggctggttcgatctggatgatctgcccactcccctggcggccagcacgagcgagcggctggagctgttccatacttacatcgagaacaaaaagcacggcgacgcccacgccctgttccagttcgatgggcagcagtactagcggatataaagttagctccctctgacgagggagctccaatgctatgcgattacgcctcttgggctaggagctcgtggaggtgggcgcggtgctgctgctgttcgcgcgggtcgggcacgggcagggaggccagcagcttcttggtgtacgggttctccgggtgctgcataatctggtcggcatcgccgtgctccacgatctggcccttatgcatcaccatgatgcggtcggcgagcatatcgaccaccgccaaatcatgggtgatgaacaggcacgcgaagccgatttccgcctgcagtcgcttgaacagctccaacaccttggcctgcaccgacacgtccaatgcagaagtcggctcatcggcgatcagcagcgacggcttcaacgccaaaccacgcgccaaagacgccctctggcgctggccgccggacagctcatgcgggaaacggttcatgtaggcgcgcggcagctggaccatctccagcaggtcgcccacatagttcttggcctcggccacggaaccgtacttgtggtgcacgagcagcggctcggccacattctccgcgatggtcatcagcgggttgaacgaggagcccggatcctggaacacgaaaccaatgtccgcgcgcttgggcttgaagtcacgctccttgacgccgttcatctcgatgccaagcacgttcagggagccgccggacaccttctgcaggccggcgatggcacggccggtggtggacttgccggaaccggactcgcccaccaggcccagcacttcggagcggtggatggtgaagttcgcgccgtccacggccttgaagtcggactgcatgagatggcccgggtacgtgatggtcaggttcttggcctcaacggcgatcggctgttcgcgccaatcggccttgcgctcgatcggcttgccctcgcggtcgcgcacgaccagcttctgaccgatgcgcggcacggcacccagcagtcgcttggtgtagtcgtccttcggatggtagaagatctgctccacgtcgccctgctcgaccacgtggccgcggtacatgacgaccacctggtcggcgatgtccgcgatcacgcccatgttgtgggtgatgatgagcacggaggcgtcgaactcgtcacgggcgaggcgcagcaggtcgagaatttcggcctgcacggtcacgtcgagggcggtggtgggctcgtcggccagaatcaggccggggttcagcaccaacgccatggcgatgacgatgcgctgcttctggccgccggagaactggtgcgggtagtagtccacgcgggtttcggcatccgggatgccgaccttcttcaggatgtcgatggccttggcgcgcagttccttcttgtccttcatgccgtgggcgcgcaggccctcttcaatctgccagccgatggtgtacaccgggttcagcaccgaattgggctcctggaacaccatcgcggcctcggaaccacgcacttcgcgcagctgttcgccgctcagggagagcacgtccagcgaatcggagccatcacgcttggacaggtagacggcaccggaggtggtggccgtctccggaagcagcttgatgatggagcgcgcggtcacggacttgccggaaccggattcgccgaccacgccgaccacggtcttgcgcggaatggtgaagttcacgtcctcgacggccttgatggaaccggcgtcggtcatgaaggagacggacaggtccttgatatcggcgagattcttgttgtcttcgctcatctctcactccttgccttccggcttgccttcgccggtccattcggaggcgacgatggtcgggtcatggtcggtgacggtggccggcgggtcgacgttcgcgtcgagttcggcgatcacctcgttgcgtgcggacggcttctcgtttgggtcgacggacgtgtcttcgatcgatccgaccacttcgccggcggacttgcgggcgcgcagacgcgggtcggccagatcgttgagcgattcgcccacgagcgtgatgccgagcacgataagcacgatggcgatgcccgggaacacggcggtccaccagatgccggcggtcacgtcggaaaccgaacggttcaggtcgtagccccattcggcggcggcggtcggctcgatgccgaagccgaggaagcccaggccggcgagggtcaggatggcttcggacgagttcagcgtcaggatcaccggcagcgtgcgggtggagttcttgaacaggtgcttggtcatgatgcgccaggtggaggcgccgaccacgcgcgcggactcgacatacgcggattccttgatgcggatcacttcggcgcgaattgtgcggaaatactgcgggatgtacaccacggtgatggagatgccggaggccaggatgccgctccacaggccggactggccgtgggagatcatgatggccatcagaatggcgagcagcagcgaggggaaggagtagacggcgtcggcgatcatcaccaggatgcggtccacccagccaccgtagtagccggacaccaaaccaagcagcacgccggcgaagatggagagcagcacggccacgacgatggcgatgacggcggtgcgggcaccccacaccacacgggagaacacatcgaatccggcggcggtggtgccccagatgtgttcggcggagggcgcggcctgcgccgggaaggacgtgccgtcggcggccttgatctgggcgtggccgtagggggcgatcagcggggcgaagagggccacgagcaggaagaacgcggtgatcgcgagaccggtgatcagcatgcccttctgccagccgaccgccacgcgcagttccttgatgattggaatcttggtccagaacggcgtcttggtgctgacgttgagcttggtgaggcggtcgtcaccggggacggtgatcttgtcggaggatgcggtggtcatctcagtacctcactctcgggtcgataagcgcggcgatgacgtcgacgaggaagttgacgacggccacgatgatggcgataaggatcacgatgccctgcacggccacgaagtcacgggccttcaggtactgggacagcatgaagcccaggcccttccattcgaaggtggtttcggtcaggaccgcaccggcgagcatcagggcgatctgcatgcccatgacggtgatgatcgggatcagggccggccgccaggcgtgcttgttgagcaggcgcttttcggagacgccgcgcgagcgggcggcctcgacgtagccggaattgtaggtggagatgacgttggtgcgcaccagacggatgaacacgccggcggtcagcaggcctagggcgacggccggcagcacggcgtggcgcagcacgtcgacgagcacgttcatgtcgccgagctggatggcgtcgatgatgtagaagccggtcggcgataccagacgggtgaactgcatttcggagttcaggtcggagcggccggaggctggcaggatgttgagccagacggcgaagatgagcttcagcacgaggccgaggaagaacaccggggtggcgtagcacaggatggcgaagatgcggatgccggcgtcggcggcacggtcgcgtttgcgggcggcgagtcggcccaggccgatgccgacgatcagcgccacgatcagggcgaggaaggccagttcgaatgtggcggcgccgtagtgcgtaaggatgctgatcaccggctggttatcggtcagcgtcgtgccgaggtcgccgtgcagcaggccgccaagatagtcgacgtattgcacgatcagcgggcggtcatagccggccgcgtggatgcgctgctggagttcggcgggtgtcaggcggccgcccagggcggcggaaatcgggtcgccggtggcgcgcatcacgaagaacacgatggtgaccagaatgaaaacggtggggataatgaggaggaacctcgtcagcacgaagcggaagaaactacctgacagtcggttcttcttcgtcttggctttcgccggagtggtgctggaggtcgctgtggcgctgtctgacacgcgatgctccttggtgttggtaatcggtatataaagcaataaaggctcccctctccgaggggagctggcggcgaagccgactgaggggagtcatacgagttgggctcccctcagtctgccgtcgccagacagctcccccccctcaaagaggggagctcatgctggatcagcccttggtgacggaggcgtagcggaagcggaaggaagcgtcgagggtgacacccttcacggaggtgccggtgacggcgacctgggcaccctgcagcagcgggatggtggagaggtcttcggtctcgagtttctggacctgcttgaggatgtcctcacgggcggaggcatccttctcgccggcctgcttgacgatcaggtcgttgacttccttgttggagtagccgttgttcacgaagttgccgtcgcggaagaacggggacaggtagttgtccgggtcggagtagtccgggaaccagccgagctggtagaccgggtacacaccgtcggaatcgtcggtgaccacgcggtccttggagtactgggtccattcggtggactgcaggtcgaccttgaacaggccgccttcctcaagctgggacttcaaggccgcgtactcgtcggcggaggcggagccatagtggtcgctgttgtactggagcttgaggtcgaccggggtggtgacgccggcatcggcgaggaccttcttggccttctcggtgctcggcttgccgttgccgtcgccgtaggcggacttcagcgtgtcatcgtgaccggccaggccgtccgggatgaaggagtacatcggggtgtaggtgcccttgtagaccttggtggagagctcttcgcggtcgatgaggttggcgacggcctggcgcacggccttggccttgttagcgtcggcgtcgggctgggattcaccgtagggctgaatcttgaagttgaaggcgatgaagcgctcctcaccgcccgggcccttgacgaccttgaccttggagtccttggagaggtcctcgatgtcggtcgggctcagggagcggtaggccacgtcgacctggccctgctggacggccatcttcaggttggaggcgtcggcgaagtacttgacctgcacggcggagttcttggccggggtcaggcccttgtaggagtcgttcttagcgtaggcggcggactcgttgatcttgaaggcggtcagcgtgtacgggccggcgaaggccttcttggagacgatggtgtcggcgtcggtgagcttgtcggcgtcgaaggtatcctcatcgacgatcgggccggcggggctggacatgacctgcttcaaagtcacgtcgaaaggcacggaatccttgaacaccacggtggtgtcgtccttagcggtcacggattcgacgttggcgagcagggagctcgggccgttcgggtcgttgatcttcttgatgcggtcgtaggagaacttgacgtcggaagcggtcaggtcgttgccgttggcaaacttcaggccgtccttgagcttgacggtgaattcggtgccgtcatcgttccaggtaccatcatcggcggcgatgtccgggctcagctcggaggtgttgtagtcctgggcatacaggaacgggaacacctggatctgcacggcgtaggagccgttgtcgtaggagccggcggggtccaggctggtgatcttatcggtggtgccgatggtgatggcgttgccggaatcggcgcctgcggtggtgtcatccttcacaccgccgcaggcggtcagggatgcgatggcggccacggagacggcggcggccagaatcttcttggaattcaacaggaatcctctctcataacttgtttccacgccatcactgcgggcgtggattaccgcctgactatggtgaggatgtgttactcctgcgtttccacagccatcgacttatgtttcgcttgtggcgaccatggccggttttatgcggtatcgagcagtattgcggattcttgtattacgacgtgaataacgttcaaatggtgagatgaacatactatcatgtcaccatttgaacatgcttgtagacgaatgctttccattcgtcaaccggtcggcctactgctacttgagcttgcggcccgcgcaccacacctgttcgaccgtccaatcggtcggatcggcaaggttgaaatcggcggcgaagccgggggcgatgaggccgataggcaccccggtgaccgggttcggccggtcgaagccgaacgccttggccggcgtcaatgtggcggcctcgaccgcgtccaccgggctcaagcccagttcgcacaccgcacggcgcacggcgacctccagcagcagagtggagccggcgatggcgccgttggaaaccaaacgcgcatgcccgtcgaccacgttcacgtccagtgcacccaacttgtaggcaccgtccgggcagtcggtcgcggccattgcatcggttacgaaggccgtacgatgaggcgcgaaccggaaggagaggctcaccatcggatcctgcacgtgaaatccgtcgttgatgagctcgatggtgacgcgcggatcctccaccgcggccggaatcggaccgggctcgcggtggtgcaggccgttcatcgcgttgaacatgtgggtcatgatgcccgcgcccgcgtcgaagccggctttggcggtctcgtagtcggcgtcgcagtggcccacggccggcaccacgccggcagcggcgaactggcggatggcggagatgccgtggggtagttcgggggcgatggtgatctggcggatgcagccaatcttgccgttcgccgcgcctgaagcctcaagcatgtcgtcgacgatgtcgggtaccggatccttgagacattccgggtcatgtgcgcccttgcgggccagagccaggaacggaccttccagatgacagcctaggatgtcggggcggccggactccatcttggcgcggacggtgcggatgttccggcagatcacgtccacgggattggtgatcagcgagagcacctggcgcgtggtgccgtgcacggcgtggccggcccgcgccacatcgatgccatccgacccgtcgtcgaagctcttcacccatgcgccgtgcgcgtggatgtccacgtagccgggggtcagaatacggccttcggcgtcgatgaccgcgttgcgatcggccgggtcgagccccaccgtgcggcagtagtgctcgaaggcctcctcccccgtgccggccgccacgatgacgccggcggcatcggagacgacccaatatccacgccgttcgccgcacgcatccaccttgcgcgcgttgcgaatcgccaccggagccggcttgccctccagtgccgcggtcacgcgcgagactatctcgttcctatcagacatgttgttctccttaccgctcatgcgctcccgccaacgggagctggctcgcgaaacgagactgagggtggtccaatcgggaagcaatacacatatgccgccgccgataaccaccctcagtctcattacattcgacagctcccctcacacaaagagggaagccagcacacgataactcagatgccctgccaggccggcttgtgggtgtaggcgtagcgatagtagtccttgtggcgcagacgagaggcggcctcctcatccacgataatcgtggcgtgcgggtgcatctgcagcgcggaagccgggcagaacgcggacaagccgccttccaccgtctcctcgatggcttcggccttgccggcaccgaacgccagcagcacgaggtgacgggccttcatgatcgtgccaataccctgcgtgatgcagtgggtgggcacttggttgatgtcgttgtcgaagaagcgcgcgttgtcgatgcgggtctgttcggccaaggtcttgacgcgagtgccggaggccaacgaggaaccgggctcgttgaagccgacgtggccgtcggtgccgatgccgaggatctgcacgtcgatgccgccagcggcttcgatggcacgatcataggccgggccggccagcgcgactttgtcgccgtcttcgagcggagtgccgttgagtacgtcgccgggcacatggaccttggccgggtccaggccaagcggttcgaccacggtgcgatggatggtcgcatgataggactcgggatgggtcagcggcagcccgatgtattcgtcaagcgcgaaaccacgcacgcccgaaacgtcaatggcctcgtccttgacgatcttggcgagcgcctgataggcggccagcgggctggagccagtggccaggcccagcacggcgtccggctttgctttgatcaggtccgccacgcaacggccgtagatctcgccggcctcggcttcgttcttgacaatgatgatttccggcatcggtttcctccagttccgtgcggcccgcccgatgcgagtcgctgtaccgccgcccgtcttgcggataatggcaacatccttgtcacgtccgggtgccgcgcggcgttccaaccaccgttcggcgtagcgccgattggtgattcgctatttgttaatgatagtaacaattttggacctcatgaacactcacggtgtttcctgacgcttcacacaggtacactggaatttattagtgaagtttcataacagtttcaacgacgaaattgcgcttcaccgtctaagctgtgtatggaacaacaatcgccgtccactcgctcaccatcaggtaggaggaaacatgtcatatctcggtctcaacacaacgaccgacgaccatgcggccaaggcttcccccgccgatgtgcgccgcaagaaccgccaacttatcttcaggttgttgttccccaccaaccagtattcgcgcgccgagctcggccgacgcaccggattgagccgcgtggccgtttccgatgtggtcggtcggatgctggaggaaggattgctgcgcgagaccggtcaggcacccagcggcggcaaaggcaaacgaggcacactgctgagcatcgatatcgatcgactgcgcatcatcagcatcgacctgacgcaggagcacctgctgcacggcgcagtcaccaatctgctcggccagccgctgcgtcacgccgaagtcaccctgaacaccggctcattcgtttccgtggatgtgatcatcgagctcattgagaagatgctgggcatgtccgatggcgaggtcatcggcatcggagtcgcctcccccggcgtggtagacaacggcgtggtccgctcctccacgatgcgcggctggaacaatctcgacctgtccacgccaatcgccgaacatttcggacttgaagtaaacgtcagcaacgacgccaccgcagccatgctcaccgaacgtttctttggccaaggcgggccgaatatgcttttcgtgcgcatcgaaagaggcatcggttcggcgattctgctctcggacacgccggtaatcggcgaactgcacgcggctggcgagctcggccatatttccatcgatcttgacgggccgctgtgcccttgcggcaagcacggttgcttggagacgatgatttccggaaccgcattgaagaagcaactcagcgcggcagacatggagcagcatcagggtatccttgctcgggcgggccgctatcttggccaagccctggccatgcctgtgggccttttggatatggcagacgtatgcgtctatggccagccgaacatcatcaacgcgacgttcatcggcgcggcccagcaatatctggatgccgccacatcctcgtccttccacaaacacacggtgattcggcgctgcgaatgcggacctgacatcaccgtacagggcgaggccatcgccgtggtcttccaacacttggccaaataaaagccggtcaccccggcaacgaaacgcgcaagaccaagcgcggcgcagcacgacataaagcgatataggactgcgtgggagatggggcctcggagacaaatctgaggcctcatctcccatgccccggcactatgccaggctacgccgccatggcggcaccgatggctccgactggttggccgacaggtgccagacgcagccgggccggcaggtccagcgtttcgaggaatcggcattgcgattcgcgccggcgcagctcagccgtgatcacctcgaccaatggttcgccggttttggccatgccaccgcccaagatgatgagtcgcggatcaacggactgagccaggatttgtatggtgtcgccgatggcgcgcactaccatgtccagcacatcgacggccttggcctcccgctttttcgcgcgacgaatcaggtcgggcatcggcgggtcggcgttgggccacagacgccccacggatgcgcccgagcagactgtttccaagcatccgtattgcccgcaagggcacttgaggcgatgaggttcgactgggatatggccgatttcgccggccgcgccgctatagccatgcatcagcacgccgttttcgacgatgcccgcagccagtccggtgccgaagttcaggaacgcaatggtaccggccatgccgtccgcaccgcccaatacggtggccgcgccgacggcggcggcattgacgtcgttttccacatgggccggcacgcccgaacgctgcgagaccaacggccccatatccagcgagaccacgtcgagattcacgatattgcccacatgcccgctggccgaatccaccgtgcccggggtaccgacaccgatggccctcacctcgtcaaaacgctcacccgctgcctgatgtgctacagcgacgatgtcttcgatcacggcatcgttgccatgcctggcgggaatacgggcggaacccaataccgtgcccattgcgtcaaccagcacagcttcgatttttgttccgcccacgtcaacaccgattttgagattgttcatagtgttttcagacatcagtcctcccctgttcttcatcgaacgtttcgcttgatatcagtgtgcatccgactattgacaaccatcttaacaaattcccccaagacgacactcacatgcacgacacaccgaatgacatattgattgcgtcaatcaattaacagcgttaatatcttaatcaagttcagattcaaagacgagcggaacaactcgcagcggtgcagacaaggaggacttaagaccgatggcaacaaacaccacccatgccacttcccaagccagtgtctccgaatccaaccgctcccgcatcgtcaagcacctgtatcacaacggcatcagctcccgcgcgcaaatcgccaaggcactggaactcacccccgcggccatcaccaaaatcaccgcacgccttatcgaggccggcatgattgaagagaccggcgatttggaaggttccaagaaccgccgttccatcggtctcaaactcgacaccacgcggttccgcatcatcggcatcaaattcgcccgctcgctggtgcagatcggcgtgttcgacctgtgtggcaacaccctgagctttgaaaacctgcccacggtgtacggcaacaccatcaacggcaccatcgtcaccatccaccagcgcgtcgaacaactgcttgacaacgacccgtccattgtggccatcggcatggcggtgcccggcccctacctgcgtaacgtaggccgcaccgccgtggtgtccagcatgcagggctggcgcaaaatcaacttcatcgacgaattcgccaccgctttccgcgtgcctgtgttcatcgaacaggacgcccgcgccggagccctcgcacattatctcttcgacccgtcggtgcacgccgacggcaacctcgcctattatctggtcggcgaaggcgtgggcctcggcgtcatcgacaacggtcgtctcatcaacggcttcctcggtgccgccaccgaaatcggacacatctccatcgacgtcaacggccgcccctgcgattgcggcaacgtcggctgccttgaacgctactgctccacccccgccattcacgacatgctcatcgccgatggcaccgtggttcccggcgcggccgatatgacccacaccgaagccgcccgcgccctgttcgccaaagccggcgacggcgacgaagcgtcaatcgccattgtccgcgaagtcgcccgatacgtcggctacggatgcgtcaccatcttcaatggatacaatcctgagcacatcatcatcggcgacatcgtgtccgaagccggcccgatactgctcgatgaggtgcgcgccacggtggccgaacgggccatccccgaaatcaatgcctccacttccatcagcctatccaccctgtccgccgacgcggcggtctccggtgccgcagcagtggcggtgacccaattcctcgaacacccctcggtgttcttcgacgtctcctaaaccaagcgccgacatcacaagatgttccatacgaaacacccggtaaaagaaacaaaggaaaggaaaccaaccatgactaccccgatcgttctgagcctcggtgaactgctgtgggatatgctgccgagcggcaagcgagccggcggcgcccccgtcaacttcgcctaccacgcgatgaagaacggcaccgaaggctgggctatcagcgcggtcggcgaggatgagctcggcgacgaactgattgccaaggccaacgaggccggcatcaacaccgtcatccagcgcaacgcctggccgacctccaccgtcgaggtcgcgctgaagaacggcatcccggagtacaccatcgtcaagggcgtggcttgggaccacatcctgtacacccgccagctcatcgacgtggtctccaaggctgacgccgtctgcttcggcaccctggccctgcgctcccccgaatcgcacgccaccatcacggagctgctcaagcacaccaagccgggcgcgatgaagttcttcgacatcaacctgcgtggcgaccactactccaaggacctcatcgaggaactcctcaaggcggccaccgtcttcaagatcaacgacgaggaactcctgctgctgcgcgacatgttcgacatccgcggcacctccggcgaagacgcctcccgctggttcatcgaggaattcggccttgactacgtgattctgaccgccggctccgcctactccaccatcatctcccgcaagggcgaggtctccacgctggacactccgcacgtcgaggtgaacgacaccgtgggtgcgggtgactccttctccggcaccttcaccgcccgcatcctgctgggcgacacgctggcagaagcccaccgcaaggccgtcaacaccgccgcctacgtctgcacccaggccggtgcctggccgcagtacccggccgagatgcccgactatctggctgaaatcggcaagtaatccacccatccccttatccgccattcgtgcgacttcacgaatcgactgatcgcaaccggtgagattctccgaacaggaaatctcaccggtttttcatatggtgcgctcacactcatgctcttcacatcctttcgcgtgtcatgaactaaagcggtttagaataatgctgttcccttgatatgtatatccctcaaacaaagaagttgaatttatgacgaccaccgcgataccgaagtcggtctcggatttcatgcagcacatcacggacctgtgtggcaccgaacacaccgcctgggccgagaacttcaatgcctgctttgccgacaccctgaccaccacggtcaaacggcatgacgacggcaccacattcctgcttaccggcgatatcccggccatgtggctgcgtgattcgaccgcgcaattgcgcccgtatctggcccttgccgccgaagacagcgatattgcgaacctgatcgccggtctgatacggcaacagttccgctacatcatcatcgacccgtatgcgaatgccttcaacgaggaaccgaacggcgcctcctgggacaaggacgaccggtccgatttctccagcccttggctttgggagcgcaagtacgaggtggattcgctgtgctaccccatccagttggcttggatgctgtatgcgaacaccggcaacgccgatcacttcgacgccgaattcattgccggcgtcaagaagattcttgacgtcttcgagaccgagcagcatcatgaacgctccccgtatttcttcatccgcgacacggacatccccaccgaatcgctgagcaatgacggcaaggggtcgccggtggcgtacaccggcatgacctggtccggcttccgccccagcgacgacgcctgcacctaccactatctggtgccctcgaacatgttcgccgccgtggtgatgggctatctggaacgcatcttcggcggtgagattctggatgacgccgatatcgccgcccgtgccggcgagctgcgccgcaccatcaccgaaggcatcgaagcccacgccaaaacgacgaaccgcaatggcgagacgatttacgcgttcgagaccgacggcctgggtcacgtcaatatcatggacgacagcaatgtgccctccttgatggcggccccttacttggggtactgcgcaccggacgatccgacgtatctggcgacccgacgcacgctgctcagcgacgaaaacccgtactattacgagggcgagtatctcaagggcatcggctcaccgcacaccccgccgcgctatgtgtggccgatcgcgctgtctatcgaggcgatgaccagcgacagcaaggacttcaaggcgcatatcctcgaccgtcttgtaaccaccgacgccggtacacatctcatgcacgaaggcatcgacgtggatgatccgaccaagtacacgcgcgaatggttcagctggtcgaatatgatgttctgcgaactggtcatggactatttcggcattcgtgtgaagcactaagacgtgcccgctgaatgctcattgcgcacccaccgcatgttctcgttaaggaaaggaacaatcattatgaccaataacccacggtatacgctcggcaccgaagccaaccgcattttcatggcttccgaaacctacgagctgctgaagttcggcaagggcttcccagcgccggatggcggttccggctggctgaacgccgacggcaccctcgacccctcccacggcgtcgagacgtggatcaccagccgtatggcccatgtgtattcgattggtgccatgctcggatacccgggtgcgggcgagctggccgacgcggcgctcaagggattgaccggcattctgcatgacgacgagcacggcggctggtatccgcaggtgttcgcggacggcacccatgcgccgggcaaggtctgctatgcgcatgccttcgtgattctcgccgcgtcctccgccctgctggccgggcgtccgggtgccaaggaactgcttgacgaggcgcttgccacgtatgacaagcatttctgggatgacgaaatcggtttggccgtcgatacctggaataccgaattcaccgagctcgacccgtaccgtggtctcaacgccaacatgcacaccaccgaggcgttcctggccgtggccgacgccaccgggaacaacacctatcgcgtccgcgccggccgcatcatcgaccatgtgatcggctgggcgaagcacaacgagtggcgcatccccgaacatttcaagtccgattggtcgctggacctcgaatgcaacgtcgacaagaaggatgatcagttcaagccgtacggcgccacgccgggtcacggcatcgaatgggcccgcttgatcacgcagtgggcgttaagctccttcgccaaccttgacggcgcacagccgtacgtcgacgccgccgagcatctgttcgcgcgtgccgtggccgacgcatggaacgccgacggcaccgtgggactcgcctacacgaccgactggaacggcaagcccgtggtcaccgatcgcatgcattggacgctggccgaatcgttgaacacttccgccacgctgtatgcggccaccggcgaggagatgtacgccaactggtacgccacattcgcccagtatgtcgatgagcatgtcatcgaccacgagggcggttcctggttccatcagcttgacaagaacaaccacgtgatcggcacggtctggccgggcaagtccgatctgtaccacgccttccagtccacgctgattccgttcttggacccggccgtgtccattgcgacggccgtgaagaacgctgaataatcgacagcatctaagcctctatatccttttttcttcctctttctcaacggcgttggccccgtggaatacgggggccaacg

SEQ ID NO: 598 - DNA, 29285 bp, Unknown
  R14_15m  MAG No. k141_2330
atgagcgaacatgtggagcatgggtttgggccggtgtgggatggtgagtcccgggctttgattttgggatcgatgccgagtccgaaatcccgagcggcggcgttttactatatgcatccgcagaaccggttttggccggtgatgcaggcgctgtttgccaactccgctgatcctgccgacgccgtcggcgattcacctgagtcccgtcgtgcgtttgctctgcgccaccacattgcgttatgggatgtcattgcttcttgcgatatcaccggagccagcgatgccagcatccgcaatgccgcgcccaacgacttgacaccaatcttgcgcggagctccaatcgcccacatcttcacaaccggcgcgaaatcagcgcaactttaccgcaaacttatcgagccgcgcctgaccgaagccggtatcgccatcggcatgacccaactgccctccaccagcccagccaacgcctcaatgcgtttgccggaccttatcaccgcctatcgcgaagcttttcaaaaggcaaacgtactagagaatgcgtattggaaaaactaaaagtagatacctaaaagtatggcgagaccatcaatctcggacggcaaacccagcatcacgaatcctatcttgcatctcattggcaatagcaatacagcgcgcccgcgaaataccagccttcacaccgacaccagtcaaatccgcaacagtgatgttcttcccctttccgttcaccgaagtagtgtgctcgccgttgattccagggttttccgttaaatcatatccaggcgacaatctccacgcttggcgagaacgatcatagagataagagaaattcttcgcatgatcgtcgcggtttccgatgaacacgttaaagcacatgagacggtacaaccgctcgcactcctctgcgctgttgcacacacgcatagtcagccgcatcaatagtccgtaatccaaattgggaatacgatgcgacgtttccagcaatccgccggcggaaatcatatgcaccttatgttcggtgccatcgtcatcccgcgtacggtcaaaccgccggacaccaaaatatccagaacattgcgctgatgcgaacagacgagtttccggcatatcaatgccgcactcgcgcgcaagtacagaaatttgatactcctgttctccgatattcgccgagtctacggatgaggggaatttgataatccattcttctccatcaacctcagtcagaattttcggccgcgcgccaccggacgagccaccaagggcaaaaagctgatccaaatcctcagaaaaatcagtttccagaagattcgcgcactctctcgctatatcgtccaagtcagtagctgcaacaccattttcaatgtccgccgctggttcatattccaaggctcccataccgcttaatcccacaatggacagcctcgtcaaggttccgatagagtaagggtctattcctctctgacgcagaagacgatccgtgagcaaacgcccccacccgtccggcatactgtcatcgaacgccccaaacaaaccatgcaatggatctcttttggcgacaaagaccccctcacgcaatggcagactcagcggacttatgctgaatccactggacaaccacgagctttcgtacgagaacgccactgtttttgccggcgacagtgtcagcgagccaacaatttcaccatccaaaaacacccgtacccgatcaaccgataaatccaacggcactgtctcgctcatcgcgcttccctctcccgcgcagcaatgacatcatcgatagttgcatagtacggctgtgaaaacagtgtctcaaaatcctgctcgcaactcagtgcaaacgcgatattgatgagcgccgtcaatgagatttcgtgctgctgctcgaaccgtctgattgagccaagactcacaccggattttctagccagagccgtttgcgacaacttatgctctttgcgtctggcaaccatgcgttcggcaatagcggccgaaacatccccaggcataggctcatccaacaaagaaaacatactaatatattagcaatttatgcctaaaaagccaataattactcatatattagcagttactgattgcggcaaattggtcacgggactacaaccggcgtgtcgcggtagccaccaacttgcgttcaagtggggttgaactgttttaatcgaattgttagcgttcacggccggccatgaagagacggcggtgacgattaatcatcaaggagtacacatgaagtatcgcagcgtcggcaagtcgggactgaagatcagcgaggtcgcgctggacagctgggtcacggatctcaagggcacagcggccgagaacgtgaccaaggagaccgtgaagctcgcctacgattccggcgtcaacttcttcgactgcgcggacgcttactcgggcggcgccgccgaacgattcctcggcgaagtgctcaagcagtacccgcgtaaggaactcgtcatctccagcaaggtctacttccccaccggcgaaggcgtgaacgaccgcggcctgtcccgcaagcacattttcgaaagcatcgaccagacgctgaagaacatgcagaccgattatctggacatgtacttttgccaccgttttgacgagaccaccgaccttaccgagaccttgcgcgcgatgagcgacctggtcgcccagggcaaggtgctgtattacggcgtttccgaagagtggggttcggcccgcctcgaggaagtccagcgcattatcgaccgctacaacctgtacccaatcaccgtggttcagccgcagtacaacctgcaggatcgctatatcgagcatgagatcatgggcacctgccgcaagctcggcattggtatcaccacgttctccccactcgcgcagggtctgctgaccggcaagtatcgcaagggccagccgctgccggccggttctcgcgtcacgtgggctgacgaatctgagacttcctccaacgggagcgattgttaagcgccgaaatcggtatcgccttgggcctcggcctgggcgatggcggtttcggcgttttttgctgtttgctcaatgacctggttgtatccggtcaaggccgcgaacggcatgaactgggcggcccgctggtgacgagacatatgcggatgcttgcgtgattggtggtgtggcaggttgatgatgtcgtcgtatgcatgggtttcttgcagggtcatgcgcgatggcctccgatctgacggttgcgagcctgaccggtggcaccgtcttccatatccatggctttgatgacggcgttgcggccgaatttacgtttcacatccagcagcgcacgctggatatcatgctctcgagccaacgtctgtgcggcggcatcgtccccacaagccggcatacgcccgcttccgtcgccaccggattccgtgctatcacagtcatatcgcatatcgccatcatcaccgaacaaatcaagctgctcatagcgtttgcccgccgccagttctttgggcgtggccacatcatcggcaacaactgtgagtcgacgcaccagcaaccgcgcatccacaatacgctcgtacagcatggtcatcgcctcgcgaatacgtgcggcagacgacgtaaaatcgcccaatccaatcgaccccacggccgacttaggcacccgacgaccgaaacggtcaacggtcaccggcccttgataggtctttgccgcgcgttcggcggcacgcctcatcgcccggtctgcgcatgaatcaagcttcgaagcatcgagactgccaatgtcatagccgaccgccagtgtcagccgattcgtcatcacccccttatcgaccagatcgagggcgagcgcatcggccatctccttggcgatcagccgagccgtatgccaatcggcgggaccggtgagcacctgaccgctgctgatgctgtgcgcatccggctcataggatcggatgtccgcgatttcgcacggctcccagccccacgcatggtcgatgagcagttcggcattgacaccgaacatgcgatatagcaggtcttcgttgtagtaatccgaagcacgacccaccgagcatcgggcgatatcgcccatggtcatcagaccggcgtgctcaagtttcctggcatagccgcgcccaacccgccaaaaatcggtgagcggacgatggctccagagcagccgacgatatgacatttcattcagttcggccacgcgcacgccgtccttgtcggcgggcatgtgcttggcgacgatatccatggcgactttggccagatacatgttggagccaatgccggcagtggcggtgatgccggtttcatcgagaatttcgcgcacgatggttcgcgccatggcatgcggccccatacccagcgagcgcagatatggcgtgacgtcgatgaacacctcgtcaatcgaatacacatgaatgtgttcgggagcggcatacctgagatagatgccgtagatccgcccgctgatttccagatagtgcgccatgcgcggcttggcgatgaccatcgaggctttgagtctcggcgagcgttccaggtcgcgcgcatcgcaggactccccgattaatcggccgccgggagcatggaccgcgcgctcgatgttgactccattcaggcgctgttttacctcgaatagccgcgcacgaccgggaatgccatagttcttcagcgagggtgagaccgccaaacatattgtcttatcggtgcgggtttcatcggccaccaccagatgcgtggtcaacgggtcgagtccgcgcgccgcgcactccaccgaggcaaagaaggacttgagatcaatggcaatataggtatgctcgcgttgcgtcgataccgttccgctgcccatcgccatcacctccttaccaccgccggcccgaccagcatatcaatacggtcgaacatttgttcgatacaacatgcctgttcgaagctgccgaaatcgacgcacgcaacgcgcccaagcatgctcttcacccacaccacacgcgcagcggcagagcagcgacatgcatgcgtaccatgggaatatgaagaaaagcattacggcagacagcgattttgcggcgtgggcggcagcccgatcccagaaaacgaatcgatcactggcaggagcccgcctcgcgattccggagccgcagaagcatgccgaaatcaagtctcaggcccagcaatggggcatgaccgtcgaagatgccacgatgaccgacgggcacagcgaggaattcctatgtgacggtacacaaagcattgattccattgccgacatgcgcacggcaagtgggctggaggcaatggagtacgcggaacagcacatgccggtattacgcgacaccatggatgacctcaccacccgcatcgatttttcaggcattcgtattgccgtctgcctgatactggagccaaaaaccgcgattctgctgcgcaagcttaaggccaccggcgcaatcgtcggcgtatattgcggcccggattccacggatccccgagtggcggaacagctgcgccgagaaggaatcacggtcgaatccagccgagcctggaccgcggaacaggcgcacgaggcagccctgcgcctgctggacaagatacagccgaacatcatcatcgacgatggtgccagcttcgcccgcctcgcctcgctcgaacgccccgagctcacggcgaatctcattggagtggccgaggaaacgaccagtggcgtacgcgcgttccagcagatgcaggaagcgggagcgctcacctacccggtcgtagccgttaacgacagtgtgctgaaaaccggattcgacaacgcccacggcactggggagacatgcgtgaccaccatgcagcgcattctcggcgagcatgcattcgacggcaagaacgtcaccgtcatcggctacggcccggtcggccaaggcttcgcacggcgtattcgcgcgcttggagccgaagtcaccatctgcgatatcgatccagtggcttcactcaaagcggtgttcgacggcttcgccgcacaagacattgacgaggcactcccttgcgcggatatggtggtgtccgccactggcgtgagacatacagtcacacttgagcacatgcgcgcaatgcacgagggcgcggcgctcgcagtgatcggcggcatcgccaacgaaatcgccttggacgaggtaagcgacttcatcccacaggtcaacagggacaccgcgcaactcattgttcccgacggaccaacgctcacgctaatcgccgacggcgatggcgtgaactacacggtgggaggcggcaatccaatcgagatcatggatctgagcttcgccgtacaggccagcgccgtcgcatatcttctggaacatcgaggcacactggatcacacgcttatcagacttgacgcagcgaccgaccagcgcatcgccgccagcgcgctcaaggcgcgcggataccgagccagccatgccgtggaggacaacggctacgattggcgactgaccagattcgcggaaaacgaccgagagaacgccgaccgatagccataggcacggcaccgaacacaacgcagcgaggagaatatgaccgacaacacctggccgaccgtcgataccgagcttatcgatgatgtgacactgtattccgccaaactcatcatccccgtgacgggccccgtcatcatcgatggcgcagttgccatacatggcgaccgcgtggttcatgtaggtaaacgccgctgggtgctggaggcgctgaagcaggaaatgacgtctcacggcaccatccgtgaacggcattgggatggggtgctcacccccggattggtcaacgcgcacactcatctgcagtacagcggcatggtgcaggtcgggcaaggcacctacgatcggttccgcgcctgggaactggcattcaacgaggtgtacgccgaggcgcagaagacccagccatggaagcagtgggccgaggacggtgctcgccagatggtcgaatcgggcacgacggccgccgcagacatcgtcaccgatctggacgccgccggcgcgctggcttcgcagggcatgcacggcatcgcttattgggaggtaatgggctggcacaacgacgaatggatggaaaagggccgcaccgagctcatccggcagttgcgccggatgaacgaggagcagctgccgaacctcggcatcagcccgcatgctccgtatacgctggagtccgaaccgttcgttgatcttccagacattgctcgtcaactgaacatgcgactgcatatccatctggcggagaccccgctcgaggccggcacttatccgccggtgctcaccacttattcggcgtccgactggcgtgaccacgattgggaaagctaccggcagctcaaagacgtgggcaaaggtgcctccgccatccagttcgtcgatcagcttggctcgcttggcccggatgtgcacattgcacacggcgtgtgggccaatggcgaggatcggcgtattctacgtcagcgcggcgtgggcgtggcattgtgcccccgatcgaatcgcattaccaacaccggcaaagatgcaccggtgcgcgaatacctcgaggaaggcaatctggtaagcgtgggcaccgattcgctctccagcacgcggaccctcgatctgcttgatgacgtgtcgatgctttacgacctggcccgcgaacaaggctatgccagcgacgatctgacacatcgcctgattcgtatgatgacgctgggcggcgccgcctccatgggcatgcacgtgggccgaaaccgcattggacagatcaacgcgggcgcattggctgatttcgcgttcttcgacatccccgtcgacacatcatctccggccggcatcgaagaaacgctggaaacactggtgaagcacggcgcaggcacgaaccgagccacggtgatatccgggcgcgaagcctacaacaacgcctggtgacaccgctgacctgacctgacctgacctgatatcaagaagccaaaaaccagcaaacccgccaagaacaggagatctcattatgagcgtcgctttgcgagacatgagtccatacgcccggtccatagtggaacgccttggactggaagcccaccccgaaggcggctggtacacgcgtgactggcaatccccgcacacggatgaggcctcaagccgaccgctatcgtcactgatttacttcctgctgcccgagggagatgccagcgcctggcataaggtcgatgcggatgaggtctggctgtggcatggcccggcatcggtcaagctggaactcggcggcagcggcgagactccggaatccgacgaatccaagcgaaccgtaatcaccctgggttccggcatcaccaccgatcaggccgacgtaaccgtatcgggacatgcggtcgtaccggctggcgtctggcagcgcacagtgcctggccagggcgatgcgctggtctcctgtgtggtcagtccgggattcgtattcgacggcttcacactcgaacagtgaacgccatttcgctctgcgccaatatgagatatccgttcgcttacgcgccagattgcgcggctctagccggccataagcaatggagataaccagcatccgagaatatcgctgttttgtagtaacccaatagccatacaattggcgcgcatgcatcaagcacggctttgaaccgtgtgcatgacgaacacttgaggagaggaagcccatgttcaataagcaacacatcgtccgtaccattgcggccaccgccagcatcctagctctgtcgttcaccgcagcctgcggttccggccagtccaccgcatccaattccgccgattcgaacgatatcacccagcagacgtacaagccgggcaagctgaccatcgccaccggacagccggcctacgagccgtgggttatgaacgacaagccggaaagcggtgagggctacgaggcggccgtcgcctacgcagtggctgacaagctcggtttcaagaagagcgacgtggtgtggacccgcaccgcattcgacaccgccatcgctcccggtgccaaggactgggatctcaacatccagcagttcggcatcaccgacgagcgcaagaaggccgttgacttctcgtccagctactacaacgacagccagtccgtcgtggtcaagaaagacagcaagttcgccaacgccaccaaggtatccgatctgaagaatgcgaccgtgggcgtcatggtcggcacccttgcctacgactacgccaaggcgaacatcaaggacgacatccagacgttcaatgatgatgccgcactggctcaggcacttgacgccggtcagatcgacgcactggtcaccagcaccgtggaatgcgtgtacatggtgcagtccgagcaggtcaaggacgccaaggtgctcggccgtctgcctgactccgaagacaagagcggcatgggcatcgtgctgccgaaggattccaagctgactgcagccgtgaccaaggcagtggatgacctgaacgccgacggcaccatcaagaagcttcaggacaagtggctggccgagtacaccaccgacctgaccgaactgaaaaagtaagtggagtaggctcacatcataaggtcacaacaccttggccgggcgctgcggaaattttcctgcgacacccggccattccggcattcaggaagcgagcgacattcatcacatgaccgcagcaccaaccgaaaccaggcagtacaatgcccctgacggacacgaggtaagtcaggtcgagctcagacgacgccaatatcgtgttcatcagcaaattcaatcgacgattaccagtctgatcagcaccattgtgttcgttgtggtcatcgtcatcggcctgaagctctcccccggctggccacgagtcaaggagaccttcttctccggcgaatacttcgtcaaatcgtttccccatgtgcttgacggcctatggctcaacatccgcgttctgctcgtcgcagtggtcggcgtggcgattctaagcacgctgatcgcattggtgcgcaccagccgctcccctattctgttcccgctgcgtatcctggcattgatctacacgactgtgatgcgcggcgtgcctattatcgtcgtgctgtatctaatcggtttcggcattcccggcctaggcttgttcggccgtatcgatccctcggtactcggcaccattgcagtggtaatgggatacagcgcctacgtctccgaggtgctgcgtgccggttttaacgacgtacatccttctcagcgagcctcggcccgctcgttgggcctgacctccggccagacgacccgactgatcgtcattcctcaggcattgcgcaaagtcgcgcccgcactgatgaatgacttcatctccatgcaaaaggacgtcggcctgatttccgtgctgggtgcggtggatgccgtgcgcgccgcacagatcgacgtggccagcacctacaacttcacgccgtatgtggtcgccagcctgctgttcatcctgatgagcgtgccgttcatcctgctgaacgactggtacacggaacgtctgcgtaagcgcgaactcagcggaggaacggtatgagcgaaatgaccaatatcaccaccgaggcgagtgactcccccgtgagcaacaagacggtgctgcgtcttgatgacgtgcgcaaatcctttggaaacacgcaggtgctgcgtggcatttcctttgacattcaccaacatgaggtggtggctttgctggggccttccggttcgggcaaatccacattgatgaaatgcgtcaacctgcttgaacaggtcgatgacggccagatttggctgggcaataccgatatcaccgacccgcgtgccgaccaggacaagattcgcgcacgtatcggcgtggtgttccagcagttcaacctcttcccccacatgtcggtgctcaagaacgtgacccttgccgcaatcaaggttcaccactggagcaaggatcgcgccgaaacccgcgctatggaactgcttgaacgcatcggcatgcgcgataaagccagcgcctaccctgatcagctctctggcggccagcagcagcgcgtggcgattgcgcgcgcactgatgaccgacccggaactgctgctgcttgacgagatcacatctgctcttgatccgatgctggtcggcgaagtgctcaacatggttgccgagttaaaggcccaaggcaccacaatcctcatggccacgcacgaaatgagcttcgcccacgacgcggccgaccgcatcgtactgctccgtcacggcgtcatcgccgagaacggcacacccgccgaggtgatggacgagtcgcaggatcccgagaccatcgagttcttcagccatttcaggcactgagacgaagccgaaaaacaaacaccggattcatacgacgaaaggccaaaatcctaagccactattcatactcaactgatctggtgcttaaaccgcgtccgcgaaccccaacaagttccaccaccccacaacacgcgatgtagccgccgattggtagggttggcagatagttaatcccctgtttgaaaaaggagctttggcttgtcggctgaactcgaagacattcatgaggaatgtggcatcttcggcgtatggggccaccccgacgcctcacgactcacctattttggcctgcacgcgctgcagcatcgcggtcaggaaggtgccggcatcgtctccaacgataacggtcatctcatcggtcatcgcggactcggcctgctcacccaggtgttcggcgatgagcgcgaaatcgaacgactgaagggcaattgcgccatcggccacgtgcgttacgcaacggccggctcgggcaccacggacaacatccagccgttcatcttccgcttccatgacggcgacgtggctctgtgccataacggcaacctgacgaactgcccgtcactgcgccgcaagcttgaagacgaaggcgccatcttccattcgaactccgacaccgaagtgctgatgcacttgattcgccgttcgatgcagcgcacctttatggacaagctcaaggaagcgctcaacacggtgcatggcggtttcgcctacctgctgatgaccgaagacgccatgatcggcgcactcgacccgaacggcttccgcccgctctccctcggcaagatgaagaacggcgcctacgtgctcgcctccgaaacctgcgcactggatgtcgtcggcgccgagctggtgcgcaacattcgcccgggcgaaatcgtggtggtcaacgatcacggctacaagatcgtgcagtacaccaacaacacgcagctggccatctgctcgatggaatacatctacttcgcacgcccggattccgatatctatggcgtcaacgtgcactccgcccgcaagcgcatgggcgcacgtctcgccgccgaatccccggtggaggccgatatggttatcggcgtgccgaactcctcattgtccgccgcatccggctatgcggaagcagcaggcctgcccaacgaaatgggcctaatcaaaaaccagtatgtggcccgcaccttcattcagcccacgcaggaactgcgcgagcagggtgtgcgtatgaagctctctgctgtgcgcagcgtggttaaaggcaagcgcgttatcgttatcgatgattccatcgtgcgcggcaccacgtccaagcgcatcgtgcagctgctcaaggaagccggcgccgctgaagtgcatatgcgcatcagctccccgccgctgaagtacccttgcttctatggcattgatatctccaccaccaaggaactcatcgcagccaagatgagcgtggaggaaatccgcgaatacatcggcgcggattccttggcctacctttcgctcgacggtctggtcgaatccatcggactgaacgccgacgccccatacggtggcctgtgcgtcgcctacttcaacggcgactaccccactgcgctcgacgactacgaggccgacttcctgaagtccctcacgcccgaggaccgtgtgcgtctgcctgaattcgcgctgtacaagagcaagtacatcggcaacgagtacaacaccgtgcagccggacgtgcagtaggttcggccggtccttcgactacacctcagtcattggtctttacgactacccctcagtcagcttcgctgacagctcccctgacaaggggagcttagtacaaacgaaaatccgctttttgcaggtggctccccggcaagggagcttgaaaatagaacagaaaggccccaccaaatgccaaaagcatatgagaacgccggcgtgagcgtcgaagccgggtacgaagtcgtcaagcgcatcaagtcgcacgtggcccgcacgaaccgtcccggcgtggtcggcggcatcggtggcttcggcggcctgttcgacctagcctccctgggctacaaggagccggtcctcatctccggcaccgacggcgtaggcaccaagctcatggtcgccaagctggccaacaagcacgacaccatcggcatcgactgcgtggccatgtgcgtcaacgacatcgccgcccagggtgccgagccgctgttcttccttgactacatcgcttgcggcaagaacgacccggccctgcttgagcaggtcgtggccggtgtggccgacggctgcgtgcaggccggttccgcactggtcggcggtgagaccgctgaaatgccgggcatgtacgacgaggacgagtacgatctggccggtttctcggtcggcgttgccgaaaagtccgccattgtggacggttccaccatcactgagggcgacgtgcttatcggtctgccttccaccggcgtgcactccaacggcttctccctggtgcgcaaggccctgttcgagcaggctggctataccgtggacactgagctcgccgagctgggcggcgcaaagctcggcgacgtgctgctcacccccaccaagatctacgtcaaggccctctccccgctgttcaaggcgggcgtggtcaagggcgtggcccacatcaccggtggtggcttcatcgagaacatcccgcgcatgattccggacggtctggccgccgagatcgagcttggcacctggcctgtgctcccgatcttcgacgtgcttgagaaggccggcaacatcgatcacaaggagatgtacaacatcttcaacatgggtatcggcatggtgctggccatcgaccccgcccgcaaggacgaggcgctgaagctgctcgccgacaacaacgaacccgcctacgtgctcggccagatcaccaccgacaccaccgacacgcaaatcgtactgaagtagctccagataccggctcccctcaaagaggggagccaaagactttaggaaggaaaaacatgggtcagaaagtattggtcatcggctccggtgcgcgtgagcataccattgcctacacgctgctcaaggcaccgagcattgacgaagtcaccgtggctcccggcaacccgggcatgctcaaggacggcatccacaccacgcagctgagccagtcgaaccacgccgcacttatcgaattcgtgaagaacaatggctatgactgggtgttcgtgggcccggaagtcccgctgatcgaaggcatcgtggacgatttcgccgccgccggcatcaaggcgttcggcccgtccaaggccgccgcccagatcgagggttccaaggacttcgccaagcagctcatggaccgtcacaacattccgaccgccaaatatcagacgttcggagacttggacatggctcaggcttacgtacacgagcatggcgcgccgatcgtcatcaaggccgatggtctggccgccggcaagggcgtgaccgtggccatggacgagcacaccgcccagcgtgcgcttgaagacatcttcatcgatcatcgcttcggctccgccggtgccaaggtcgttatcgaggacttccttgacggccaggaattctccctgatgagcttcgtcaacggcactgatttctggccgatgccgatctcccaggatcacaagcgcgcccacgatggcgacgaaggcccgaacaccggtggcatgggtgcctacagcccggtgccgcagattccgcagtccgtggtcgacgaggccatcgagaaaatcgtgcgccccaccgtcgaaggcatggccgaggaaggcacgccgttcaccggcatcctgtacgccggcctgatcgccaccgccgacggaccgaaggtcatcgaattcaacgctcgtttcggcgacccggaaaccgaagtcgtgctcccgaagctcacctccgacctcggtgccggcatctccgccattctcgacggcgaaacccccgaattcatctgggatgagtccaacgccaccctcggcgtggtcatcgcctccaacggctacccggagaacgtcatcaagggtgcccgtgtgcccgagatcgaggtcgacgaggattcgcatgtctactatgccggcgtcgcctccgacgacaagggtggtctgattgccaactccggccgtgtcctgctcgtcgaaacctccgccccggacatcaagtccgctcaggacaaggtctacgcgatcatcgacaagctcgagctgcgcggactgttctaccgccacgacatcggcttcaaagccctgaagtaacagaagcggcgcatctgccgcatatttttgtcccggtggccatgtcaatcgattgacgtggctgccgggccagatttttctgtcccggtagctgatttcggctctttttcgcaaaccaggacagttgaacacctcgaatataggaatatttggaattcccttccatgcaaaaccgcactattccgccattttcgtaatacgcggacgatactttcggcgtcagttttgtcccggtaagcagaaaatgactcgaaatcaaataccaggacagaaaaatctggcccggtacacgaatcaatcgattgacgtggctgccgggacagcgaacgtcactatgacaacgccatcacccaatatcagcgagcgatatcacgctagctgaatttggcgatgatgttgaacagtttggccttggcttcattgaagggcgggtacacgaggcgcagagtgtcggggaactgcggcttggtaaccacggttttgacgtggctgaaggtgaggaagcctgctttaccgtggtaggcgtcgatgccggacgcgcccacgccaccgaacggcagtcggctggacagcaggtgacccaacggcaacgaatatcccaaagctccggagctggtctgacgttcgaaagtcagccgaacctcgtgatcgcgcgagaacacatatgcagccaacggccgggaccgcttgttgatgaatcggattgcggactcggcatcctcaaccaccaggatcggcagaatcgggccgaagatctcctccttcattaccggcgcatccggtgacgtgccgtatagcacggtaggcgcgatatatcgggcggcgcgatcgaccttgcctccgcaaacgattcgcccggccggatcgaatacgccgggcaccttgtgaatctcgctcggctcaacagcggccgaggcagtcgcatcactatcagcggctgccgtattcgaaccggccgccggcttcgccgcattgttcgcgctaccggtgccaccaccggctgtctcccccgcgcttccgcgtccggcagccacgacattgaagcgccgcccgaccatatccatggccgcgcctaccgccgatgccacctgtaccagcggcgagctcggctcctcagacggcacggtgccgaccggcaatagcttgcacagtcgttcaaaatgacgatcgttgataatacgaccaaaatcaggcgaggccttcggatcttcgccatagaattcggtgatggctacggcgatgcgctcggccagagcctcggccacatccggcgtggcgagcacatagtcgggtgccacgcaggtctgtccggcattggtgaacttgccccatgcgatacgtcgtgcggccacattgatatccaccgtacgatccacgaagcacggtgatttgccgccgagttccaacgtgaccggtgtcaggtgctcggccgccgcacgcatgacgattttgccgacgtgcccgccgccggtgtagaagatatggttgaacggacatttcagcagttcgccggtttccttgggcccgcctccgaccacgcacacggactcggggtcaagatattgcggcacgagttcggcgatgaggcgcgaggtgttgggcgaaagctcggagggcttcaggcagatggcgttgcctgcggcgagcgcgtcggccattggctccagagccaacagcaccgggtaattccatggcgagatgatgagtaccacgcccttgggctcggcgatcgtccagccggcggcgggttgcagcatccaatgcatcgccttgggatggcgcgcggcccacagtccgagccggttgcggacgaactgcgcctcgccagccaccagattcagctccatcagtatggtttccgccgcgggtttgcccaaatcggccatggccgcagccacgaaagcatcacgattgtccgctaccagacggcatagcgcatccaattgcgcccgtcgccaagccaatggccgcgtacacccggattcgtaggcgtgacgcaactgagcgaaatccgcattgaccatggcacatccttcccgcaggatgcccgggtcggtttccgggcatcgactgtacctatcgtaccgtcatgacgatggcatgagggcgtttgtgctgcaggcaataccagacgtttcggctggtattcgccaaatagcttgggctcggccgaagtaggtggtgcaggtattgtcggcgagttcatcgacggtgatgggattggcgctggccacgccgagcagttcggcattggcaggcaggtcgtgttgtgcggccacagagtccacttgtacctccacatccacagcttcggcagaaggtccgacggcgatatgcccgcctgcatcaaccacaatgcggcggtcatcggtgacatgcacgatggcgtcgcggccctcatagcccgcccatgaccagctggccacgccgtcatgtcctcgttcgatgaatcgcgaggtgcggcccgcgagggtcgcgcgactcgtgaatcatcgcatcgtgcgggagcgtgactggctgccgcgttgccgtatcgcggtccttgccaattgaacggaaccgccagccatgattcacatcgatgcgcttcatggctttattgtaaggcgggagtgattggtctgtgggatctctccctcagtctcacttcgttcgacagctccctcatcagagggagctcacagcactatggcaacggtacagcaatcttggacgggcttcgcccgcgttttgctggctcgcctgtcggctcgcacgttgcctacagaccgaaaatcctccggattttccgtcgcggcacagccgctcccctcacctacggatagcccactgagctatccgctttacggttcggccgggctgtctgctttacggcaacgtcataaaatctgtgtctttgaggtagtttttgccggcggtgatgtcgtattggatgagcttgtagtcggcaagcaactgcttggtttccttgtcgaagtcatcggtggacatcgggttgccgttttggtcgagatagatgttctggccttcgggaatacgatcccagccttggaccttgttgaccacaggcggttccatagcggcaatcttggaatgcatttcggtcaggaacgccagatacgggctgaccttggcgttcatgtgatcggcggcctgtgccacgaagaagttcggcgaagagtaggctgcatcgcttgccttattgccttgggagctggaagccttattcgaccagatgaagtaatcggtcaggtgcagggccaaggagttgttgccatcctcgctggcggacgagtagatgcccggcaagtgatcgccgtagaacactacggtgacgggcttatccagcgcatccagttcgttcaggaactcctgagtggcctgatcggtaatctccacacccttttgataggtctcaatcgactgctgttcatcatcacccagcggcgtacccgtggtggattcagcggtgtagtcgttgttctcataccactcgtggtagggcatgtggttctgcatggtgatgatctgaatgaacttgttcgtcttgccggacctgatgccttccagcgcagaatcataggaagacttatcagagacgtacggcgactcgtcaatcttgtcctgatacttgatcacgtccggaccggtcagcgtgtagaagtgcgagaacccgaacttcttgtagttcgtagcgcgcgagtacatgctggactcgtacggatggtagccgagcgagttggcgggcgcaccccacatctggttgatggtgggggtccaatgctggctcgggaccagctgctggtacgggctggacagggaggaatcgaaattggccatgctcagaccggaaagtcccatgtattcgaggttggccgtaccgccgccgtagccggaggagagcatcaggccggaggtggtgcccgccttgatcttgcggatgttgggcatcgaatccttattggtcttcagtcccggcacgcggctcgggtcggagaaggattcggacagcacgtacaccactgtcgaatcagtgaggttgttggtgcgggaggcgttgattgtctccgcttccttctggtagcgagcggcgaccttcttcatggtctcctcggagtagttgctcggcttgtccatgatcttcgggttgagctgacgggtaaaggccacgagcggaccgttgcgctgcgcgtcatacacggaatcccacatggatggcgtgtcccccaaggcgcgggagaacttgttggccagcgaatcggtggtgctcacatgaatgcagtacaacgagaacaccagaatcggcagcagcagcagaatcagacgggaggtgaggttcaggctcaggttgtccgtacggatcatgcgacctttgcgcccgtcgaagtggcgcagcaccagaatcagggcgagcagcgcggcgaacgcgccaagtgccacgaggatggtcacgtgcgcgccggccggaatgaaggtgagcatattgccggtgttcgagccaaggaagccgaggtcggcgggcagaatggcctcgtaacggatctcgaccttgaaatgttcgatggcggccacgatgattccgaccgcaagaatcacgatgcttgccgtccagaatctgttgaacagcatcagcaacatgaggtacagcaacgcgacaagtatcacgttgagtacgaatacgaaattgccgtcggtccacatcttgctcacgaagccgaatccgacggtcggactggacagttgcacacgggtggagctggacgaaacgcccacttcgagcgccgtcacaacaataatgtcgaagataacgaagagcacgccgtacgcccagccggggaagggcttgtgggggtgctggggcgtgacttcattggcttcggcctttttgacccaaagcttgaaatggggtttcactgtggtgatactactagtgttctcgctcattcgcctgtttccgtatgtgacttttcaagggcatattgttgccgctgaaccttggaaaatccatagttccactatttttcttaccgtttcctaactattcaccctaacgcaaagggtgcctcgggacatccccgaagcaccctgatatataaggagccttccctgatagcgaagcgttctgttctcccctaggcaacgcctcgctatctgacttgattattccccttattgctgttgcggattgccggctaccgccgcattacttcacggcggcggcgaactggtcgaccagtgcgctcatccagtcgagcaggttggtgtactgcttcggcatctgctcggtgagctccacgatcggcacgttgacgtccttggcggcaccggtgatctggtcggtggtggagttggcttcctggctgttgaagacgagcatcttgatggagccgcccttcagggtgtcctggaagtccttgatgtcggccggggtcggctcgctctcgttggcggaagcctgggcgtagcccttcggggtggcgtcggtcatcttgaggtcgtcggccaagtgccaggccacggattcggtggcggcgtacggcaggttctcggtcttggcggaagtctccttgatcttggactcaagctggtcttccttggcgtgccattctttgttgagcttggcgtagtcgtccttgtgactcgggtcggccttctggtaggcggcggtgatggcgtcggcagcgttggaacgcaccttggcggagaaccagacgtgcgggttgtcgccttccttgatgccggcggtttcggcggcggtgaccagcgtggccttggtcgactgggcggccttggtggcccacgggtcgtaatcggcaccgttgaccacggccaccttggcagtgccgaacttggcaacatcctggctggtgggctcgtaatcgtgcgcctcaacgttggtcttggtcatgatgttggtgacttcgacgttgctgccgccgaggtcttcggccacggaaccccactggttgatggaggcgacgacctcgatcttgccggaagacgcggcgctgctggaatcggacttgttgccggcggcattgctggaaccgcaggcggccatcgagaacagggtcgccgcggcggccgcgatggcgagcgcgcgcttggcgttggacatgatggacatgattggattttcctctctaattcggctgtttggccaggcgatgctgctgttgctgcatcatcgcccggcccccaacacgacagaataacatgtattgagaattattatcatttgcatttacgtcagtgtgttgcacgcgcacacccgcgctgccggcggaaatcccgcaccccgacgatgacaacgcgggatcccgccgttttcggcagacgaaacggcagtatccccgcgtccgaacgatacccgcgcgggggttctgccgtttaaggcctcggaaacgacagaaatcccgcgccaccttcgttcggacgcgggggttctgccgtttgccgcacatgtcacaacggcatcgcggcacagaccgacgcctgcaccaggtcgacgagccccacggtgtgggcatcctcacagaccagcgcatcacgcaaggcgattgcacggatgatgtcgcggcaggcgcactccccgtctgtatccaaatggcgtgccaggcaaccggcaccaatgaccggcaattcgagcacgcacgaggcctcacggatcaggcgggagaccactacgccggtcgaacgctcgtcatagacgccgttctcctcgcccatgccgcacaggcacaaacggtcgtcgtcaaagaatcgctcttcgaattcgtcaaggcctacggcattggccaccgcacccacgaacatcgactcaccccactcgttgagacggaaggaatcggccagatactgcgcgaccggcgtggcctcaaggcccacaggcagcgagaccagaaacgcgccggcccgcccttgcagcgatccgagcgtccgttcaaggtcatgtttgaccgtgcagctcatgcagcacccctcgagcccgaacgaatcggactcgccgaacaccaccccgcttgcctggggcttcgcgacgttgcgcacgatatcgagaccggattccacggcttcgttcgggcgcacgtcataagcaatcgagcatacggacgggaaggaatcgatcaacgagaacgccacggagtccaggctcaggcggtcggcgccggtgagcagcaccacgggcgtgcgcccctccgcgtttccctgtgattgcaatgccggatgaatcatgacagcctttctaatttgataatggttatcattatgatatagttgcaggcatgtccaaaacatgtcaaattctgggaacacgcgccggggtcggcaaccgcgtctcccactcgcacaggaaaacacgccgaaccttcgccccgaacctgcagtccaagcggtactgggtgccgtccttgcagcggcacgtcacgcttaccgtgagcgccaagggcatcaagaccatcgaccgcatcggcatcgaggcggcgatcgcccgcatccgccgcgatcagaacgtcaactgaaccggccacggcatcacccccatgctcgggcagtcagtaggcccgccactgtgccggcgcgtaaccgcgcaacaaaccgcgctaacgagctgcatcacccacatggcaccgcgacgtacgcgacatacgtgacataacagcgtgacacccacacatagaaagcaccactcatggcaagcaaatcctccgcaatccgcccggtcatcaccctgaagtccacggccggcaccggattcacctacaccaccaccaagaatcgtcgtaatacgccggaccgtcttgagctcaccaagttcgatccggtagtccgcaaacgggtgctcttccgagagacccgctaatccatctgttcgttcattggacaccagtcgcgaggcgaggaagaggcttaagcacccgccgaaatcgtttcctcgttggcattccggcggtttcctctatcaccatttcatgaactcatcttccgaaccttgcggcatgcgcccaatgaacgaatgcactcgtcccagctccggccggcgcgattcccgcgccccggagccttatcaaggagccggacatggccaaaaccagtaagatcaaccgacaattgcagcgcgaacgcatggtcgccaagtatgccgaacgccgcgccgaacacaagcgcgacagcgtcaaccctcatctgaccaccgaagaacgcgccgaggcgatgcgcaagctgcaggccctcccccgcgacgccagccccacccgtctgcgcaaccgcgattccatcgacggccgcccgcgcgcctacaaccgcaagttcggcctgtcacgtatcaatctgcgtgagaaggcacacaagggcaaactgcccggcgtggtgaaatccagctggtgatcgggccggcacaaccggccgtcaggccgtctcaggccatctcaattcaccggattccacccgcgcgtccgacgccattctcatccatatcaccacacaacaccacacaaccaaaggtccataaccatgcaagagggcatccaccccgaatacggccccgtggtcttctatgaccgctccgccgacaagtacttcctcaccaagtccacactggtggccaaggccgtaaacctgccgaccatcgactgggaggacggcaacacctacccgctcgtcaatgtggaggtgtccagctacagccacccgttctacaccggcaagaatgtggtgatcgacgccgccggtcaggtgcagaagttcaacgctcgttacgggcgcaagtgattcgccgcacattccgcaaagaccgtaagacaagaagaaaggaacggacatgaaggtcaaggcatcggtccgctcattggcccgcaaggatggctcctatgtcgtccgccggcgcggccatctgtatgtaatcaacaagaagaacccccactggaaggcgaggcaaggctgatggcactgcccaagtacaaggcgtcccgagcaaacacgcattcgcgccgagccaactggaaggccaaggtgcctcagctggccacggtcagaacgcctgaaggcgaagtggttcaggttccgcagaatctggccgcagccgtacgaaaggggtatatgaagccataaccaacatcgtggattccgcaatccatcaagtctcgcaacaacaactcgacggtccgctccacaggccggcggcgtacgttctttctcccatttccttccgtatgccgtcacctgccggggcgaaccgccgttttatgaggccaccgcatccgatctggccaagctcgccaaggcagacatcgtggtgctcaacggcgccggctacgacggctgggcggaaaaggcgcagcttgacaagaaacgccagaccatcgtgaacgtgggcggcctcatgggcgtcaccgccaccgacgagcacgagcattcccacgaccacgccgagggcgaagaaggccgccatcaccaccatggtgctacgaacccgcacctgtggttcagcccggaagccgtgctgaaggccgccgaagccatcaacgccgtctacgcggacaaggccggggtcggttctgccaccgccgccaccgtgcaacgtcacttcaacgacaggaagaaaccctcaaggaaatggacaactggcccacgtattacccggcatccatgagcaaggaggaagtggccaccgagatgctggcccaccgatttgccatcggcccagacaaccatgtgcaaagttccccgcatatcgatgtgtaccatcggtatgcggggaactcgcatattatctcgaccactatcatgcgtacggtgctaatatgacggcgatatggcaggtgatattcgcatgaaagaacctcgcacgcagcgcacggaacaggtgaacaccgcgcaacaggaccattcggcgaactatctgtttctgattatcggcacgccgctggtggcgttcctgattgcggcttccgcgatgctcgagtcgcgtgggtttccggttccgctggtgcgtatcggcaccggtgccgcggggcttatcctgcaggcgattccgttcatgctgctgggcgcgatgatgtcggccgtggtcagcacgttcgtcagcaccgattctctggcccgccacataccgaaatcgttggccggcggactggccgcggcattggcggccggcctgtgcctaccggtgtgcgattgcatggtggtgcccacgttcgcgaatctgatgcgcaaacgcctgccgctgccgtgtgcggtgacgtttctgtgcgcggtgccggtgatgaacccgatggcgatatggtccacatggttcgcattcaccgacaaaccatggatagtggcggcccgcatggggttgggcatggtagtggcgatagtcgcgggggtgtcgttcgcggtgtggccgctccgctcccctgcggtgcgtgagaggccgctgacgattgggcggtcgttgatttgcgaggattgtgcaggggcgacgggtgattcgcctgagaaccacccccagtcggctttgccgacagcccccgccggcgggggcacggggcgcggattggagcggttcacgcatttcattcggcatacgcatgacgactttatgcggatgatgccgattctgctgttcggcacgatcattgcctccatcatgcgcaccgcattgtcgtcgttgaccaacggttcaagcacgctcgatgacgctggtgccatcgtactgattctggcggcgatgggactggcgttcctgtgttcgctgtgctctacttccgatgcggtgatcgccgccagcatgattggcgcgctgccggtctccgccatgcttgccttcttggtcttcggcccgatgctcgacctcaagaacacgctgatgctggccacggaatgccggccacggttcatcatccggttcatcgcgaccgtggcggcggcctgcttcctcgccgcgattgccgcccatctggtgatgggagcgtagccatgaagcgcaaagtcacactccccgaccgcgtggaggcgctgtgtttcgcggcgctgggcgcggccatcgcctatgcggcggtgggcggatcatacaccacgctgaccacgccgcgttcgctgccgtatctcatcatcggtgcggtactgctgttcgtgctggcgaccgcagcatggctcggactgttccacgccacggagcgttcggttttgcggttcctgatcgccttgattattccggcgctgctgatcgtcgtgccgttccagcccagcagcggcagcggcggcttcgacgagtacgccggcggccgcgctatcgccattccccgcagttcgcacaagcctgatggcgcctcgcagctgcacggactcgacacggcgaacaagaccctgaccatcagcgacgacgaattcggctcatggttcgagcagatcgaccataatccgcagcgttacgtcggttaccatgtgcaggtcaccgggtttgtgagcaagtcgcgtacgttcggcgcgaacgagttcgagctgtcccgccagttcatgtcctgctgcattctcgacatgaccccattcgggttcatagccagctccggcaaggccggcaccccgcacaatcacgactgggtcaccgtcgacgccgtcatcaagcagggcgcctacggctccgccggccacgagcgccaaggcctgatactgcaggtccggtcggccagcaaagccgcagccgccccgaccggctacttctactggcagtaaatgacgcgtctcccgaaatggaaagcactgcgctgcgccatgactcgccccatatcggcagaaatcccgcgttacaacgaaaggtacgcgggggctctgcctttatagggctcaaaactggcagaaatcccgcgcaggcctcgttgaaacgcgggatttctgccagttgattcaaatcatgtgacaacatgccgggcatctaatttgctttaataacgataatgaatatcatttgttaacagaaaggggcagaacgtcatgagcatcgagcaaaccgcgaccactcgacgcgtgacgcgaccccgactcctcatcacccaggtcctggcgaaactatcccgattcgccacggcccaggaaatcaccgacatcctgcgcgagcgcggcacgcgcatcggcacggccaccgcctaccgcaatgtgcagatgatggcctcccaaggcgagctcgacgtaatccacgtcaacggcgaggccctctaccgcgagtgctcggaccagcatcaccaccatcacatcgtatgccacgaatgcgggcggaccatcgaaatcgagattcccggacttgagcagtggatcgacaaagccaccaagcagttgaagtaccagaccatcgcccacgaactggagattttcgacctgtgccccaagtgtgcggcgaagcatgccatcgaaccgcctctcagcgtcggcacctcaccaaaggatggaccactgacgacgccagacgatactggccgtcggcgctcgaacaaataatggcgcagtcccgacgctactggccttcagcatcggtgcccttccaatccttggcgcaatagcgacgatataagctccactcgcatcgttagattgccaacgcctggcgcagcaccgacgccagacacgctcatcgtcatcgttccaccaatatttggattggtaccgccaccacctataccaggcgtcgacactcggccaacaatcggcccgttaccgacacaaaactgcatgaggtctcattgctcttaatagcagcaatgggcctgataatcactttcacccactttcgccgctgccgtctgccgccctacagtcgcagacgaacaaacgctgaaaggaacaacaatgactatcaagaccatcgatgagcatgcttacgagatcgttaccgaagagggcaccttcgccgtctgcaaggacacgctggccaagttcgacgccaccaagcacgagcacggcgtggccgcctgtggccgctgcggctgctgcttcaccggcgactgctgcgacgacaccggctgcgagcacaaccacaccgaagagtgcgggggcaaggcttgcctgcacgcttgccacgagaaccgcgaaggccacgagtgcgccttctgccaccttgccttcgacaccaacgagaagtgccacgatgagatcctggccgacctcaaggaactcaaggccgagctggctgtctgagttttaggtttccgatttctcctgcggattgactcctctcagggaggggagccagattccgacacgaaccaccgcgcttaccgtatgatgtctacgggcgcggtggttttgtttttctcgatgatggcgcagatttgctcgggcgcctccttgcagccgcgccggacccatagccagataatcgatgagacggcggagaccagaatttccagcgcataggcgcgcggaatgccgccgtagctcagctcggcacccacacgggccgcctgcccaagcagcatctgcttcaacacatccttgacccggtcatacatctgcatatcgttgcccgaacgggacagtgcgtcgaagaacgcatactcacgcttgacatagcgcaacgcctcggcttcgtgttccagttctacaatctggtggccaacctcacggccaaggagaacgtggagctcgcctccaaaatcatgaaagacgcgcaggaaccgactcaagcgcttatcgacgtggggcttcaggaccgtatcaacaacttccccgcgcagctttcgggc

SEQ ID NO: 599 - DNA, 5558 bp, Unknown
  R14_15m  MAG No. k141_2342
ctcggtcagcttcttcagaccgcgctcatccagctcaggatcggcgatgaacatcagttcgtacttgtgcgcagacatcacccacctccttcggactattcggccacggacgttccgtggcaggagtgtgtatgcgtgttagcccatgacgcagcaccaaaccggcaccgcatcttcgggcaacttggacagtctatatataaggcgggacagggtatggccatattcctgccggtttcgcgatgcccaccattttggccaagcccgcgcagccaagcccgcgcagccaagcccgcgcgccatcacccagtattgtccatttcgagcctcgccctatggtcatggcgctgattttgcgggtacgatagtgctcgaagaagcatcagaagaaagggggactatatgttctgtcctaattgtggcgcagctgtgcgcgaaggagcgcaattctgcggttcctgcggcaaccatcttgccgcggcgtcagctccagcagcagcgacgcccaccgcacccacgcccggtcaacccaccggcgccgttcccacgaccgcacagcccgcggctcccgcaccatcgattccgttgcccggcgcagcggctgtgcagccgacgcctcagcccgctgcacagccgcaggcccagcccgcaggcggaccggcattcaccgcaccgaccacggccattccgaacccagggcagcccggcccatcgccggctcccgccgctccggcacaacccatctcttccagcccactggtcaaggaactgttcggcgcccccaacatgcagaccatcggcattgcggccggcatcggtacggcagccgccttggcgctttcgattttccctgcaatcgcaatgaattccatgagcaccgcagcacccagcctcggggccgattcaacactgaaccaagccgttggcggcatgttcatcaccggcaacggcatgaacttcttccactacctgttcctatcgttggtcatgggcctgtctggcggtattcatttcgacatcgtcgacctctcatcctccagcatggacgccagcaacatgatgtcgtacccactggggctcaccggcttggcattgctggtcggcaccgcattcggcgcattcatgctgggccgttccaagagcattcgattcaagttcaccggcctgatctccggctttatcaccggattgctgccggccgtggtcatcacgctgcttgcggccatcgcggcggcaccactcgccagtggcaccaccatcgtggccaaggtgaccggcgccacagtgcgtacgttctttatggcctacctgctctccgcgctcggcgctctggccggctatgcactggcccaatatgcttccgattccaagaatgtgttcggagctacttggcagtgggcacaccgcgttcgcggatacacgcgcacggtggtcagcgtcttgagcttccagctggctttgctcttcatcgtcggcctggtggccctgttcgccgtggcattctcctcaggtcagggaatcctgatactgacgttcccggtcacactgctgatgatcggcgagttcttctttacctggggaaccttcggcgccattacactgaccgagtccggtcagctgccgcaggatctcagcctgttcagcatcaacctcagcgttaccgtatggcctatttggatcctgttcgccgtgttcctggtcctcaccttctacacggcattgcgcgtctccgcacgcaacctgtacgaccgtgcctacatgggctggcagcactgctggaaagccccgatcgccatcatggtgttctgggcgattgccacgctgctgatgggtactatgggcaaccgcacctccgtcacgcaagttcagaccaccggacctgccatgtggtacttcctggtcatgggcctgtgggcattcctggttgaggtcgttgcactgacgttcggcccgaccatggtggtttccatgccgggactgcgggccctacttgtaggcggcactgtgcgtgccacgcctcagcctgtggtcgactacatctatgccagcggcgcaatggtcggcaagtggcccacgtggggcacgccaagcgccggcgtgggtacgggcgcaaacgctgcgcagcctcacgtcaacgtcacgccgacgtccgccggccagcctcctgttgctggtgtcggtgtacccgcgcccgctgccccgggtgctccggccgcccctgcaacccccggtgctccgggcaccacattcgcaaccgcggctcccaccactcccggagcggcaccggtagccgcacctggcgcgacctccaccaccatgaatgagcagcagaagaagatcttcatcatcgttggtgccgtggccggcttcctcgtactgttcggtatcgtgtatggcgtgctgtcttccgccgtgttcagcgcgaagagcgtggcgaacagctatgtggccgccatctcctccggcgactacgacaaggccaacaccatcgccgatcctcacgtggatacgaaccagcgcgcactgctgaccagcaaggcatcctcgggcgagaacacgcacatcaccaacgcgcgcatctcgcagacttccaacaatgccgatggcaccgtgagtgcccagctgacgtacacgcttgaaggcaaggaggtcaccggcgattccatcaagatggtggccaacggcagcaagttcctgatcttcaagaactggaccgtcgccgaaccgttggtcaagaccatttcggtatatgcgccaagctcgctgggcagcatcaccgtcaatggcgtgaccgtaacgcccaagaacgccgtgaacaacgacgcggacgaaaccggcaactaccggctcaaggtgtaccccggcgtctacaaagttggcgtggtgaagtccgactattacaccgccaagaccgtgtctctgagcaccaacagctccgatagcggcactcttgacgctcagcctacggacaagttgacgtcggaaatcgacacggcggtgaagagcaagctggatgaatgcgcggcttccaccgatgcagaaccgcagggctgcccgttcggctactacacctccaattccagccgataccgcaacttcaagtggacgattgacggttatccgaaggtcaccagcgtgagcctgtcggatagctcgttcagcaccgacgaaggtgatgtgacggcgaattacgagtaccgttacagcgatggctgggaaccggaagacgattccagcactttctcggtatacggcaccttcaccatcaaagacaataaggtcagtgtcgagttctccgaataatttcggcaatctcaacactcttacgaaataggcaccccgccgtggcgttcgctgcggcggggtgcttgtacactggttaaggcgtaaatcacacagcgactcaaacaaaggatgcgaacgcatgtcggcgattcttgaaggcactccggataaacgactcgtattggtcacgggccgcgcctaccccgagctagctgagaaggtggccgaatgtttgggaaccgaaatcctcgaaaccacgtcctatgactttgccaatggcgagatgtacgtgcgtttcaccgaaccggtgcgtggtgcggacgtgttcgtgctgcagtgtcattcgggcgatatcaacaagtggatcatggaacagctcatcatgatcgacgctttgaagcgcgcctccgccaagtcgattaccgtggtggcgcccttcctcggctactcgcgccaggataagaagcaccgcggtcgtgagcccatcaccgcccgtctgattttcgatctgttccacgccgccggtgcagaccgcattatgacggtcgatctgcacgccgctcaggagcagggtttcttcgatggtccggtcgatcatctaaccgccatgccggtgctgctcgattacgtgcgttccacccttgatctgggcaacaccaccatcgtgtccccggatgccggccgtatcaaggtgtccgaacagtgggccgccaagctaggcaatctgccgctggcattcatccacaaacagcgtgatattactcgtccgaaccatgccgaggcacatggcattatcggcgatgtcgacggccgcgactgcgtggtcatcgacgacatggtcgataccgccggtactatctgcgaagccgtgcgcaccctgaacgaatccggcgccaagtcggtgacgctggtcgccacccatggcctgctctccggcccggccgtggagcgcctgtctcactgcggcgcgcatgaaatcgtgtttatggacaccgtgccgattcccgaagagaagcgcctgccgaatatgaccgtactgtcttgcgcaccgctgctggccgcgggtattcgctccgtgttcgaggaaggttccgtggcgattctgctcgacggcctgcccgaggacatgcgtccgcgcaatatctatgcgtgattgatacgccgaaaatccttacgaaaaacgccgcttggctattgatcaagcggcgttttttcgtatagctccaatcagatgaaggcgcgctcgccgaagatggcggtgccgacgcgcacgatggtggagccttcttcgatggcgtaggtcatgtcgtgggtcatgcccatggacagttcggtgcagtcggccgtgccttcggcaccggaggcaataatctggtcgcgcgtgcggcgcagatgcgcgaagcccgcacgaatcgtgcgctcatcatccacatgggcgccaatggtcatcaatccctgcaagcgcagtccgcccatcgcaccgatgcgctgggccaagtcgatggcgtggctgggtgcacagccggacttcgattcctcgccggattcgttcacctccagcaacacgccgaccgtgatgccgcgcatggtggcacgacgggcgatcttttccgccagttcgatggaatccacggattcgatggtgtccactaccggcagcaccttgccgattttattggcttgcaattggccgatgagatggaacgggacatgtcgtccggccccggccaaggtgtcatcgcccgaagcggcgtcgcggaccacgcccagcgcataccctcgttcggccagacgcttcgccaagcccggggccttgacggtgacctcctggggacggttctcgccgatgcagcgcacgccggcgtcgatcgcggctaggatctcacccacgtcacgggtcttggtggcggccagcagccgcaccgacccgctcctgcgaccggcgacggcctcggcctcggcgatacggtcgagtacccgatgcacgccatcggcgatctcattcgcgcgcccgcgctcgatgacctcgttcgtcaggtccttatgctccatgtatgccatcattgctgtcctccccggtgaatcgacattccatcatacccatacgggaaggcgttgcgccggcgcctcatcgcttcttggttttgcggccctttaagtagatgtcgatgacgatccatacgccgagggcgaaggccacgacgtagcccatgaagccgatgaccggaatgccgaagataatcggcttcatgccggcgtagtagacaatcgac

SEQ ID NO: 600 - DNA, 11734 bp, Unknown
  R14_15m  MAG No. k141_2454
agttcggcgtacaccgtcgggcagtccatgtatttgaatcggacggagaagcgcttgaattcggcgagattgcgggcctcgatcagaaagtcagtctccgattcgaaggtgtcccacagctcctcgaccacgcccttcaggtccacgatctgtgaggtgcgaatcaccttagtggcggccttggctatggagcgcatgatggagacgtcctgggccatgatttcgcgcacacccgggcgctgcactttaatggccacatcttcgccggttttcagcgtggcgcgatgcacttgcgccagtgaagcagagcccaacggcttggggtcgatatgcgcgaacacctcgtcggcgggacgcccgtattcggcggcaagcacatccaacaccgtggaatacggcatcgggtcggcgtcggcgcgcagtttggcgagttcgtcgcagaagctttgcggcagaatctcggagcgcatcgacagaatctggcccactttgacgaacgtggggccgagcgcctcgaacatgaggcgcatcttgaccggagtcaggccgtgcagcacgtcgaattgctcgacgattctggtgatctgccccagtcgtttgatcttgccacggcgcgtcagatggtagcgcgtggcgaaatcgttcctgcgtccgaacaatgccagcgtttcgtcggatacgctgggggtcgccttgtcaacggtccgcttgagcgtgtccgacgtgtcggcggatcggttcgctgccgcctcacgttcggctttcgcaggcgtcagaatagggtcgaccctgctggaaagcggggtcgactctgattccggcgtagtgcgtgtgggcttggtcactcggccttgccctcgtcggcgggcttgtcggcggcactggtgtcggctgcggcagcagctttgtcgccggcttcggcggcggccttcttggcgtcatccaccgtctcgctcaccttgcgcttgagctcggtgttcagcgccttgccctgctcgaccgtaatctcacccttcttgacgagttcgtcgacgagctcgctgctcttctcatatccggtggcaagggctccgatgcccgccagcaggaccttgcgcaggccatcacccagaagatcaaaatcagccatgatacccctccttcgaggtccgacatggcctggtgccatgtctcgtaccaccaagcctagcgcaaacaacagggcaatgtactagaccctaagactgatttcgactgatttttcgctgattggtacttaccgaggactcaccgagaattcaccgaggacgttcggcggcagccttgcgcgcgttggtggctacttgatcgatccgggcgagctccttggcttgttcgggggtctgatcggacgtatcgaacgtaccgtaacgacgagtcacggcggtttcgataaggaaatcgctgatggcggggtttttaggcagcaacgagccgtgcatgtaggtgccgatcacgttgtacacgcgcgcgccctcggtatggtcttcgccattgttgcctcggccgtcctgatcgacggtgccgagtggctgaacgccttcgcgcaggaaggtctggccggagtggttctcatagcccatcacatcgccgaactggtcggaatgctcaacaagattgccgatcatacgcacgttctggcccacggtataagcaccgataacgccgatgccatccagacgggtgccgtccacggtttcaaagtactcgccgaacagctggtacaggccgcagatcatcagcatcggcgtaccgtctgcggcaagcgagcgcagcaggtcggcgcgatggtagaagtcgtcgatgattttcttctggccggtgtcttggccgccgcctcccagaataaggtccacctggtcgggccaatcgtcgccttgattgtactggtggacgaccggttcgtaaccgtacagttccagccggcggcggatagtcagcacgttgccggaatcgccgtagatgttcatgtctttgggatacagggacaccacatcgattgttctggccatgtcgcgttctccttgtcgatgtcttcccgctaaggggaagtcttattcctcaccatgtcctcctgcaggcgggaggtggcgcgcgggcgctagagggtggttacttgcccacgcccgcgtcccgtacttcggtgatgcggcccagtacggcacgggttctgagcatggcggtgtaggtgcagtagatgtgcttgcgtgtgccgggattggcgttgacgaatgcggtgaccgcctgttcgaggtcggtgttcgtatcggcgactggcacttggtcataccccaagcgcaatgccatgtcccaggcacgcacaccggagaccatggcgacaccggacgcgcgtaaagaggtgaagtccacgtcccatagccagctcatgtcgcggccgtcggcatattcgtcgttgatggcgatcatggtgtccgcgttggccgggtcgaagctggcgagcgagaggcggaagcccatcgggttcttgaccagcagcagttcgaccggggaaccgttgacgtcgatgacctcgccacggccgaaagccggcgtgacgcgggaaacggcggcgatgagctcgtcggcggacacggcgcaggcgttggctgcggcagtggccttggatgcggcggcattgtcttgcatcaccgcacgtaccacggcgagcgcggcggccgcgttgtacaggttgtagacgccttcaagtttgacgtcggtggcgtagtcctggctgtccatctggaaggtggccttgtggtcgcccacggcggtaagtgtcacgtcggcggggagttctgccgtgcctgcggaagctcccctctccgaggggagctgtccgcgaagcggactgaggggagtactgactgaagggagcggcccggccataccttccaccgacacggtggtggccatgtcgtcatcggacgggaaatagtggcgcaaatcgtcggcgaggccgaagtatcgcactgtggtgccagccggggccttcgcggcgagcgcggcgatacgcgggtcctcgcggttcagtaccacagtgccggtagtcgccgcagccacatggctgagcagtttggccgtggtgtcgatttcaccgaatcggtcaagctgatcgcgcatcacgttcagcagcaacgcataacggggcttgacctgcttgacgaagtggacggcgtacgcctcatcgagctcgagtacggcgatgtccgcgtccaatttgccgccgaaagtgacttcggtgagcagtgcggagaccacgccgcgcacgaagttcgagccggtcggattggtgaacaccttcaatcccagatcggagagcatcgaggcgaccatgcgggtggtggtggtcttgccgttcgtgccggacaccaataccacgccaagcggcaactgcccgagcgtacgggtcaggaagccggggtcaatcttttctacgactttgccgggcaaagccgaaccgccatgtttggtgacgcgggatgcaaaccgcacgaagcggcctgcggccacggtggcgaacgcataccacggtttgcgggtctgcaccacggacgattggtcttgcgaaacatcgcgtgaaacgttgcttgccatcatcacaccccctgattgctgttgtagtcctgcggcatgtccttgaatttggacgtggcaccgaggaaggcgaggtggaaggtttcggtcgggccgttacggtgcttggccatgatgatatcggcctcgccggggcggtcttccttgtcgtagaagtcagggcggtggaccaggaacaccacgtcggcgtcctgttcgattgagccggattcacgcaggtcggagagctgcggcttcttgtcgttacgcatttccgggccacggttcagctgggaaagggccacgaccggcacttcgagttccttggccaagagcttcagggcacgggagaattcggacacctcttgctgacgggattccacggccttgcccgaggtcatcagctgcaggtagtcgatgactacgagtttcagatcgttggtctgcttcagacgacggcatttcgcacggatctccatgaggctcatgttcgggctgtcgtcaatgaacagtggcgcattctgcatcttggtccagaactggttcagggtgttccagcgttcgggggtgatgtcgtcggcgcggcgcagggcggccatcggaatattggtttcggcggagataatacgctgagcgagctccaccttgctcatctccaagctgaagaccacggaagtcatgttgtggtgcaacgctgcggcgcgggcgaagtcgatgccgagcgtggacttacccatggccggacgtcctgcgacgacgaccatctgtccgggctgcaggccctgggtcacgtcgtcgatgtcgcggaatccggtcggcacgcccttgttgacgagaccctgctgcagtttgtccagctggtcgagcgcgtcgtggaccaccgggccgatggcggcatagtcctgacgcaccttgcccatcgacatctcgtagatctcggactgggcgaggttaaccacatcctcagcctgcgatccctcggcggaataaccgagctgggcgattttggtgccggcggcgatcacattgcgcaaaatggcccgctgatggacgatctccgcgtagtacatggcattggcggcggtcggtacggatgcgacgaggctgtgcagatagtccgcgccgccgaccttgtcgaggttgccatccgccaacagctggttggccacgagcaccacgtccaccggctgactggcggaaaacagatcgatgatcgcgttatagatcgtctgatgcttgggctggtagaaatcggtgacgtcaatggtctgcgaaacttcgccgatggcatccttactcatcagcatgccgccgagcacggccatttccgcgtcgtcatcgtgcgggggcacgcggtcgaaaatcgggtcgccagctgccgccgcctgcgcgccgccccggcccgcgcggtcgccacgatcgccacgatccgagccactgccgaacccattctgatacgagtgttcacttccttctgccatagccctcaagtataggaggtggcgtggcgagcggaagatatcgcacgactacgttcattaggtcgattcctcactcattaggtcactgtgcttggtaacaccacaaaccatgcgcttggaatggcggcattctgaggcgctcgatcaatatctctcaaagtccaccgacctaatgaatgcacaatcgacctaatgaacgcgtgaaagtgcaagtcgtgccgaatcatcgcgcaccaatttcatcgttggttcaccttgcggtcagcgcggcgacacgctgaagcgtcaaatgtggatagaaaaaatagttatccacattttggggataagtctggggataatccactcatttatccacatattggggataacttggtggacaagctgaggataactttgtacggctgcactaggtgcttgcgcaacgtagctaagcatgatatgcgtgtgagcgtgcatagcaactccaccagcattcatcgccaaatcattgcgttggcgctaccgacttttgggcagctcatcgcagaaccgacttttatccttattgacaccgccatcgtcggtcacattggcgatgccgctttggccggcctgtcaatcggctccaccatcatcctcacggcagtcggactatgcatattcctggcctactcgaccactgcgcaggtggcgcatctgctgggagcgggtcgtcgtcgcgagggactgcaggcaggcattgacggcctgtggctggccttgagcatcggcaccgtactgggattgggattgttcgcggctgccgagccattatgccgggcactgggcggtcagggcgaagtattggaacaagccgtgacctatacgcgcgcaatcgtgctgggtgcgccaggcatgctgatggtatatgcggcgaacggcattttccgaggattgcagaaggttcgtatcacgctgatcgctgcggtgggcggcgcggtggtgaacacggcgcttgatgtgttgttcgttattgtgctgaattggggcattgccggctccggagtggcgacgctgatagctcagtggttcatggggctgttcctggtaatccccgccattctgtggtcccgggcggacggtgcgagtctgcggcctcgtttggccggtattgcggcagccgggggcgacggactgccattgttcattcgtacattggcgattcgtgcggccatggtggctacggtcgcctgtgccgcgcgcatgggtactgccgtgttggccgggtttcaggccgtgaactcctcttggaattttgcgatgaacatgctggattccgtgggcatcgccggccagacgctggtggccacaacgctgggcgctggcagcgtgcagcaggcgcggcggttgacgcgggcgaccgggcgtgcggggctggtcaccggcgcggtaatcggcacggcttttgcggtagtcggcctgttcgccgggcacttcttctcccctacgccaaatattcagacgttgattgccgttggcatggtgacgatgggcatcttcttcccactgcaaggctggatgatggcaatcgacggcattcttatcggcgcgcgcgactaccgctatctggcaggcacctgcacgctgaccgccgtggtgtatgtgacgctcatactcatactggccaatatggtgacgccggcgctgacgagcgacctgatgcgtaccgccgtgctctgggccgcgttcaacgtggtgctcatgggcgggcgcggcctgtccaacgggctgcgcgtgcgctcggacgcatggatgaagtaggtatcggccgcgcgaagtgctgggcgattccgtttacatcgcggcgcgagcggcggaatacatgccgcgcacgatttgttcgcgccacttggaccagccgtattgcttggtgatggtctcaccggcggtggcaccgagcgaggagccgtcggcccgggtcaggtcgaacagcatatccaacagcatcttgtcgtggtgcaagcggtcggccaactcctccgccacggccggatcataggggtccttacccgtggcaaattcggatagggtcaaatgctcacgcaccagcacggtggcccagtcgacgatgtccggcgcgtagcccatacgcttgagaatcaccggcacatggcgggcaccctcggcggcgtgatcggccacgaacgcgcgcttgccgatgtcatgggtaataccggccaacagcaacgccttgaaatgatcgtcatcataccgtcccccggacggtgtctcacgacccagacgcgacgtgacctccaccatatgccgatcgatggtgtaccggtgggcggccgaggcggacggacggttgcggacgccgagccattccggcatccatcgacccggaatgtccacgaagtcgatgctctcccacacttccataagattcggcccgcatgcaagcagacgaataaacagctcgcgcgattcgtcatcccactggttgtcgtgaatcgggcagtgcttcagattaaccaaggtagacggattgatgggcaaaccgaattcgccggccgccacggccatacgcaacgccagcttggcatccttggcaggctcggcaccgggtgccaacaccaattcgccttcgtgcttggccacgccgggagccaccacgtcgaattgcggggcttcacgcttgccgccagagcgctgagagaacatctggaagaacgcgaatcgcggcttttcgtgggtcagcgaatgtccagcgcgggatgcggtggaatcaagcgagaaggagatgcgccggccgatacgggcaagcagcgtctgcaaatcgtcgatcgagtaggcggcacgctcgttttcgggccaagtcggatcggcaaggccaagcatggcagccactttggcctgatagggcgtcagcatcaggttggtatccttgccggccaccagatggatgcagtcgcgtacgtcgagcagacgttccacggcttcgtcgtagatgccgtgcgggcggtcggccagccatgagacggcgagcgcggagacgagcaccgaatcgcgcaaacccccacgggtctccttgatgtcgggctgattgacgtattggaggcggccgaattcgtcgagtcgggctttggcggagtcgagcagttcgggcaggcgcttgcgggcggccttgcgccagcgttcgaggatggatgtggcggtggtggtaatcagagcagtgtcgccggcgatgggcttcacgtccagccagcccatggcggcgggaaggtcatggtcggtgacttcctcgcattgggcgcgcgtgcggatggagtggtcgaggtccagaccgctgtcccatagcgggtaccagagtttgttggccaactcgttgagctgctggtcgttcaacgtgcgaggctcgtagatgatgaccaagtcgaggtcggagctggggcccagttgaccacgtgccagcgagcctaccgcggcgaagccgatgccggagtcgggcacggggaaagagacatccttgcaggccgcattccacagctccgtgaggcattgcatggccagttccgtgcgggctttacgcttggtcgcaccattccggtagacaccatcgtcatccggctggctcatatccatgaatcgttgtttcaagccatctactgctgaagtcattgcttcatctttcattgccaaaaaggtccccgcacggcgtcaattcgcggcgtgcggggacctttcccatgcagtccatcccctgctaggcatggacgtctgtgttatcagatcgcggcggaaccggtctcaccggtacgcacgcgggccacggagtccagcggagcgacccacaccttgccgtcaccgatggtgccggtgccggcggacttgatgatcacaccgaccagcgtctcggcatccgcgtcatcggacagcacttcaacgcgaatcttcggaatcaggtccacggtgtactcagcgccacggtagacctcggtgtggccgcgctgacggccgtagccgttggcctcggacacggtcagaccgtgcactccggcggccgcgagggcctccttgacgtcgtcgagcttatggggctggataatagcggtgatgagcttcatctcacctcacctccttgagaacagagctggcagtaccagcaaaatcgtaagcacgttcgccctggtcggcaagatcgatgccgccgacttcctgagcttcggtgacgcgccaaccgatggtcttctccagggcgaaggcgatgatcgcggtgatcaccgcggagtagaggatggcgacgagagcgatgaccagctgaacgacgagctgcttccagtcgccaccagccagcagaccagtgccttcaccgaagaagccgatgaggacagtgccggtgaaaccaccaacgccatgcacgccgacgacgtcgagggagtcatcgtaaccgaacttgaacttgagaccgcaggccaggcaggtcagaacaccagcgatggcgcccatcacgatggcccacagcggggaaaccacatcggcggccggggtgatggcaaccaggccggcgaccatacccgaggcggcacccatagcggtgtagtggccggagcgaatcttctcggtgaagccccaggagagcatggcagcggcagtggcggcggaagtggagacccaagcgtagccagcggtgccgttggcagcgaaggcggaaccagcgttgaagccgaaccagccgaaccacagcaggaaggcgccgagcatcacgaacggcacgttgtgcgggcggaacggctgcgtgccgaagcccttacgcttgccgatgatgagcacgataatcagggcggcgactgcggcgttgatgtgcaccacggtaccacctgcgaaatcgtgggcggccgcgccgatggccttggagatggcgccgtcagcagacagcagaccaccgttccagaccatgtgggccataggagcgtagtcgaaggtaacccacagcgccacgaagatcatccaggtgctgtacttcacacgctcggcgatggcgccgcagatcaggccgacggtaatcatcgcgaaagcgacctggaaggcaacgtccacggaaaccgggtagttgttgccgttcagaccggtggcggtgaacacgccgtcctgcgcgaccatggaatccttgagcaggaagccgctggccgggtcgccgaaaataccgccgatgtcggaaccggcgtatgcgatggaccaaccccacaaagtccaaataatcatggtgaccgacagcgcggccgcctcaagcatcagcatgttcagaacggccttggcacgaaccataccgccgtagaagaacgccacaccaggcgtcatgaggaaaaccaaggacgcggatgtcaggatccatgcggtgttaccggaatcaatcgctcccatgtctacctccctctctttcgttcagggcaccgggggctttgtgcggccggcgtcttatttgtctctacaatgccgtcccccttatgggggctaacagtttgtcagttaaagccggtctcgttttggtttcgttacgccaagttacgcgattgttaagcgtggctgacagttaggttgatgtcgggtgggctgattccggcatgattccaacgtatacgggaaagccccgaatcatgtttcgaatatgattcggggctgggtttggtgcgttgcgggcgtttcccgcgcccacaacgtggacggacgcagggctcccctcgctgaggagagctcgaccgtctacgcgagaatgccgtccacgaaaccttcaggatcgaaaggtgccaaatcgtccggaccttcgcccagaccgacgagcttgaccggcacgccgagctccttctgcacgctgatcacgatgccgcccttggcggaaccgtcaagcttggagagcaccacaccggtaatgccgatggcttcggcgaacaccttggcctgggccatgccgttttggccggtggtggcgtcgagcacgagcagcacctcgtccaccggcaggttcttttcggtgacgcggcgaatcttgccgagctcgtccatcaggttcgacttgttctgcagtcggccggcggtgtcgatgatgagcacgtccgcgttcgcttccttggccttggcggatgcctcgaaggcgacggatgccgggtcggcaccgtccttgtcggagcggacgacgggcacgttgacgcgtgcgccccaggtttcgagctggtcggcggcggcagcgcggaaggtgtcggccgcgcccatcatgacctgcttgttttcggccacgaacagtcgagccagtttgccggccgtggtggtcttgccggtgccgttgacgccgaccatgatgatgacgctgggcttggcggcacccggcttttcggcattgaggcggcggtccgtatctcgaccgaccagatcgagcagcttctccttgagcgtggcgcgtacttcggctgggtcggctttaccagtgatgcgggcgtcggttctcaggtcatcgaccagttgggcggaagcatccgcaccgacgtcggcaagcagcagtgtgtcttcgacgtcttcccaatcggcctcggagagattgtctttggcgaggatgtcgaacagggccttgccgaacgggttgccggacttggcgagtttggccttgagtcgggtcagtcgagagccgaccgattcggggggctcgg

SEQ ID NO: 601 - DNA, 49497 bp, Unknown
  R14_15m  MAG No. k141_2504
accgctcgcgtgtctactggaaggaggcgggaatcgttgctatacctaaaattcagattgataataagtaaatatacatttgaaggatttgccgtttgctcttgaggcaattgcctttcgtatccccctctctgggggtacttcattgaagacctcggtcatagcgatcgaggtcttttcgtattcgcgggatcaggcctgaaagcattcggcccgcttccctgaaggaaacgggccgaatgcttggactcgggtttcaacccggaaggcttcagtccagcgacttcaccacaacgacctcggtgggcacgttgcccgcggtggccttggagtagggcacagctcctgcgtacgctcgacgagcttggcggcagcctcatcgtcaagatcgggcagaactacctcaatcttgcccttcaggccgaaggactcgccttcaggaccgagcgagatgctggcgcgcacctgactcttggccagcttggtggccgccacgcgctgctccttggcggcaagcgccaacgctccttggaagcaggcgccccagccgatggcgaacagctgctcggggttcgtgccctgacccttgccgcccatggcgaccggcgtgtccaggtcgaactccagttccggctcatggctcacggcgtggccgttgcggccgcccgtaacctgcgccgtagcggtgtagacgatttgcgatggttcgttaccttgatatgtgctcatgctttcatctcagcacgtgttcacgcccgccacaaggactgtcccaccgtagacgatgtgacatcatccacactgtgacttcgcgcacagagtcccgacaccgtcctcacctcgtttatcggcaccatgcgtgtataaccacatatggcattatcggcgaatatcggccggcagaccagttgcacaaggagaacatcatccacatggcagacaccgccaacaccaacgcctggttgccggcgctcaaagcggcgtttccgctgaccataccgatttgcctgggattcctgtttctcggcgcctcatacggcattctcatgggcaccaagggcttctcgtttgtatggccgatgtgcatgagcgcgttcatcttcgccggttcgatggaattcgtcacggtgaatctgctgctctccgcgttcaacccactcgccggctttctgctggccctgatggtcaacgcccgtcacctgttttatggactatccatgctcggcaaattcaaggggctcggctggaagcgtccgtacctgattttcggcatgtgcgacgagacctttgccatcaactccaccgcgaaaatccccgccggtatcgaccgaagctggttctacttctgggtcacgctgtgcaaccagctgtattgggtgaccggcgccacactgggcgggctgattggcgcgcatctgccgttcaataccgacggtcttgatttcgtactgaccgcgctgtttctggtgatcttcctcgatcagtggctcgccggcaagcatcgcgagcgactgtccgccgtcatcggtgtgctgacgtcgctggcctgcctgctgatattcggggccaatgatttcatgattccctcaatgatcgccatgctgatactgttcgtcgcgttgcgcccgcatctggatgtgttgcggccggccgccgacgccccggaagccacggcagaccgtgccatgagccacgcagcggaccagcagaaggaaggacagacgcgatgacgatgaccatctggcaaggcgcgctcaccatcgtgacggtggtgctggggacgatgtgcacccgttttctgccgttcctggtatttcccgaatccaagcagccgccgcgcgtcatcgaatatttcggccgagtcctgccctatgcgatgaccggtctgctggtggtatacgcactgcgcaacaccccgattctgaccggttcacacggccttccggaactcatcgcctgcaccgtcatcgtgctgctgcacgtctggaaacgcagtatgctgctttcaatcgccggcggcacgatcgtatacatgctactggtgcagctggtgttctgaggttgggctcggcttctccttcgttgatctctccctccggtcgccttcggcgaccacctccctctgtgagggaggtgctgaacgcagcgaagcggaggtagagacccgcggtcgtaagactgcgaaacacacagcatcggccacaggccgattcctacagctgcttcgccacccaatcgacgatgtacggagcgacttcctcaatctggtcgatggcgacctcgaactcgtgcttgccgccgtaccacggatccaccaaatcaatctgatcctcgcggccgggcttcggcttgggcagattcgggtcgaagctgcggtacatgtgcacttcggcgcgcttgccggccggcagcatgcgcagcagggcgcgcatgtgggaggcggtcatcggcaggaacaggtcggtacggtcgatttcctcacgtgagatgcggtgtgcgaagtggtcacgcggaatctcatcaccatagccacgttcgcgtaacacgcgcacggcacgcgggtcgatcggatggctccactcctcgtcggacacaccgctggattccacgttcacctggtcgccgagaccgcgctcattaaagaagtgacgcagaataatctcgcccataggcgaacggcagatattgccggtgcagacggtcattacggtgtagggctgggtattgctcatagctttgaatcaatcctcaatcgggcttcaccgggccgcacacggcccgaatgtgtttttggggtcgaatgaatatgaatccggctcatgccgccataaaggacacaagccggattcgcatgcttacttggttttggccaagatacggaaacgataggaatcgatgccggactcctccttggcgggcgtatgccactcgcccacttcggcttcccgccacatcccggcctcgaccagcgacgccatatcgggcgcatagctgtcggcatccacagtgacggccagatcagtcacataggctttgtccgcgaacggcaacgcctcggcgaacagctgggcgccgccgaggatccaaatctccgaacgatccagaccgtcgtccggaatcgcctcctgacgggccatatcgagcgcgtcgtcaagactggtgaccacagtggctcccggcgcacggtacatcggatcgtgggaaacgacgatgttgtcgcggttgggcagcggccggtacttgacccccagcgattcccaagtcttacgacccataatcaccggatgggagacggtcagctccttgaaatgcttcatatcctcggcacagtgccaaggcatgccgccattgaggccgatggcaccggcgcgaccttccttgtcgcgggcttcggcccagataagattcaccgagaaggtcttgggataatcgtcaccccagtcttcttcagtggcagacagcccggcagatccgggctcgggttcgtgatagccgctacggctactgtcatgctccatttcgcttactcctcctggattgcggaactgggccttagtgtagtggacagcgaagactcggggtccgtcaccttcacagtcttcgctgtccacgaaatggtaatcagcatcagaccgcaacaggtgccttaatagtggggtgatgctggtagccgacgaccttgaagtcctcatactggtagtcgaacagggaatcggccttacgaatctcgatggtcgggtacgggtagggcttgcggcccagctgctcaaggaactggtcgacgtggttgtcgtagacgtggcagtcgccgccggtccagacgaattcgcccggcttgagcccggtctgctgcgccatcatcatggtgagcagcgagtaggaagcgatgttgaacggcacgccgaggaacatgtcgcaggaacgctggtacagctggcagcttagcttgccgtcggccacgtagaactggaagagcgcgtggcagggcggcaacgccatcttctccacctcggccggattccacgcggagacgatcatgcggcgcgaatccggatgatgcttgatgaggtcgagcacattggagatctggtcgatggtgcgattcgggtcctcgggggtcggtgcgggccaggaacgccactgcacgccatagaccgggcctaggtcgccgttctcgtccgcccactcatcccaaatatgcacgttgtgctccagcagccagttgatattggaggaacccttcaaaaaccacagcagctcgtaggccaggcccttgaagaacacggtcttggtggtcagcagcgggaagtacttcgacaggtcgaagcgcatctgctggccaaacagggaaatcgtgccggtgccggtgcgatcggacttcagcgtgccttcggtcaggatcttgcgcaccaggtcctcatagggcatcggaatgtccgtttcgggacgtgcggggatacgggagcgaatatctgcgagttgttcttcggtcaaagccatgtgcaccagtgtagcttaggggcataatagagaagtccgatgatgcgggagagcggccaggtgccgcgctcccccgctggcagggcgatgggccagatcgccggcggctgaaaataaaggagcagctatgggtaagcgactgtgggttgaacgcaacaaggacggttcgtgggatgcgttcagcgacgatggcgcgcacattaagttcggcaaggatcgtggccagttcacgccgggcgatctgatgaaggtcgcgctggccggttgcgccgcgctgtccagccagttcgccatcgaacatacgctgggtgagggcaagggtgccaagatcgtggtggatggcacgtacgaccccgagaacgacgcctacaccggtttcgaggagcaggtggtgattgatgcttctgacgccagcctgtccgaggaggatgccaacaagctcaaggaacgcgtcacccgccatatcgacaagggctgcacggtcaagcacacctacgtacaggagaccccggtgcgcatgaacgtcaccgtcaagcactgacgtactaataaaccgacgtactaataaattgagctccctctgatgagggagctcattgtatacccggactttactgcctgtcgggatcgatggtcttttcgatctgctgggcgacttcaggctcggctgcggacaccggaatctcctcgacgccggcaatctcctccagcgacttggtaggcacttcggcgggcgagctcggcacggtgtcgagacgcgattccgcagcctcaacatacttgcgtggcaccacgtacaccgggccggccgcatgctgcagcagtccctggctggtggagcccagcagcagaccggtgaagccgccgcgaccacgggagccgacaacaacaacatcgtgatcgtagctggccttggtcagtgcgctgacggccgggccggaaacgatctgcttgttgattttcagatcaggatgcgattcctgcaacggcttgatacgcacctcaagatcgtccttgtaggactccatgatggcatcctcgccatccacgcccttcaggttcggcacagcggaaatcacgtccagttccgcaccccagcacgtggcgaagtcggcggcaatgtccagcgccttcagaccccacttggattcgtcggagcctacggccaccttggtaatcgtgttgttcaggtgcatcaggttgccgtcatcatcggtgtacggcaccactacaatcgggcagtaggcgtatgccggcagcgacgaggacgtggtgcccagcagacgctcggccagaccgcccttgccacggttaccaatgacgatcagattgtagttacgcgacaattcgacgaacaccgatgccgggtctccggtaacaatcagtgtggcggcttcgacgccctgctcgtctgcgatggccttggccttggccagaatctcctgagcatcggaatgcgcggcgttatcgtcccccatcgccgtgtaagttgcatcgaacgaaacggcggcatagctcggcagggaatatgcgcagacaatctgcagcgtcagccccgcgtgctttgcataattcgcggcccaccatgttgccttgtaactggcatgcgacccgtcaacgccgacgagaatggccttgtcgttaatcatgacgacctccttgaagttattgtggcacgaataccgcgtacctccaacaataccccgcgacactcggtttggccggtatcctccgctcaaaaagaaatccgcgtatacgaaaaaaggcacatcccaaaggacgtgccttaatacgaattcgcttaccgcataattcttgttacatcacgcggcgaatggaatatccagctccaccgaacacggaaacgttgcttattgccgttccctgcaccgggttcatagcattcatcacctgtccgttaccgatgtaaatggccgcatgagtaccattcgcaagaatgtcacccggcttggcatccgccaagcttgcgaccggagtacccacagtggcttgagcaccagaggttcgcggcagggaaatgccaaactgggagaagacgtactgtacaaaaccggagcaatcccatcctgccggagtgttgccgccggcaacatacggatagccttggaacttcagtgagaagctggcaagctcagcgccagtgccagtcattttacccaagtcaacctgtggaatcgacgcacgctgttcagagcggctggctgcagcagcagcagcggactgggctgccgcagcttcatcagcggctttctgagccgccgccgcagcagcagcctccttctcggcctgagactcggtctgtggcacatcaagagtctcgatgccaccccatttagagttctcgtcaaccgaagtggaggtggattcggcgaacagattcttcttcaccgaactcgccttcgggaaagaacgtgaggacaccacagcactcgtctgcgcggaatcggcagaggcaaacggggctacgcatgcaaacatggcacccgtggcgataaccgccactgatgtggaaataatattcttaacgttcgtcatcagcgccttaccttagcacacatgggtcgatttcataacaggaatgtcttttcgaagatgatgtcgcgggtgtatcactcggcaggagaacgcaacgggcctcggataccgattggcatccgaggcctgcaatatatcaatcaataagactgcatcacgggatacgtaccacgatggtgagtttttcggtcatggcgctagcgagagccacgctgtagccgttccagccaccatggaccgcctgaccgttgccgacatacagcgccacatgatcgtagtgcgcgccgccattccatccaccggtgttggcataaatcagaatatcgcccggctgcagggacccgtctgtaactacgtggccaccgggaacattgacgtactcttcaggccaaccgtggaagttaataccacgggccgccaacgcttgactgaccaatgcggtgcagtccatgctctgtccgatcaaagaatacgcacggtcgatagaggcaccggcaccagcggaaaccgaaccactggcatcggaataagtaacagaagagcgagactcattacggctcgcggcgttggcctgcttctgggtcgcctgagcctcggcctccgtctgcttcttggcctcctcttcggcagccttcttggccgctgcggcatccttttccgcctgagattccgtctgcggcacgtcgaggttctcaatgccgccccaatcagcattgtcctcaacattcgtggcagtggcttcagtcgtcagatctttgcgcacctgggtgtacgaggggaaggacttggtggaagtcacagtaacaccctcagctgcagtcgctgtaggaacaaacataaacgagcaagcacaggagacaatcgcggcaacaatggaagaagctacagttttggtcttcatagaaccatcaccttacacggtgcgcattaactcgtacaggatggaagaaataaaacaccccggagctattgggatatatcggcgtgtcggcgcaggtcagttcggactaatacgcggtcgcaacacttgaaatgtcatttcgcgcgaacgattgccgatagggcgacgtcacatccgaacagtaatcaccgaatgtaagccaatgaaatgaatcagtagtggacgtactggaacttaccggcttcggcggcgctgaacgtacgggtcgaaatcacacccaatcccttggcattggattcggagatctcaatggagccgtcggcattgatcttttccagaacggcaacatggccgtatgtgccatcggcattggcctggccaggagcgaacaccacagcatcaccgacatggcgaggagtgttgtccacccaatagcccagagcggaagctgacgccgcccactcgccaccattgccgaagttgccgctggaaggcagtcccagttcggcacgacgctggtacgcgtaccacgtgcactgaccccacggatagttgttggagttggtgccaacggcatggttcgggttgaagccagccggcacagcatcgccatcggcatccatgagagccgacaccacaggattgttcgcattattgcgattcatcagcttggcgtccaaggtgctgtctgaattgctcagcccccaaccgccttcattggtggactgtgcggtaacggaggatgaactcagatcagtacgtgcttcggaacgagaagccgcagtcacatcgctgatgcgcttaatctgcgtggtcgtcgtggccggatcagccacgaacgagttcgtggcgtctttattgttggaaaatgcgagagcacctgcggccgtgccgaccagagcggccagtgaggccgaggcaagaatatggctacggcgttcagcggcacgagcggcctcacgaatggaacgacgagtctggggagcgatttcattgatcttctcggcaatggccggatcaagccccaaaacaacggcgtcgctgccagcggattgcactgcgcgcacggcacgaacggaatgagaacccttgccggaggcaaacaatgccttcgctaagctgaacttctggcgcgagaccgtggtcgctttatgcgaagcatgcttcatactacgttaactccttggatgggttcggcggggtcctttcaacgaccccgtatgaccggcacaattgagtactgtacaacgaacagaggtcaatcctcaatgcgaccccccaccatccgggcatgtcaaacgatttacgtaaccgtgcggcagggtgaaagactgccttgtttccgcccgttcccgaacctcactatccggttatcggaagaatcactaactcatgtcattccgacacaccgtagccatgatgtgctgcgtacattctgcactgcattccgcattgccgctactaccgcccggcaccccggaattccgcagtagccccgcagcaatcccgcacaccgagcattatccgcgatattccccaacactggtctacccttgaaaccatgactatcacactgagtattcccgagtcgctgaagcccgaagatggtcgcttcggctccggtcccagcaaaatccgccccgaacagatcgccgcgctcgatgccggcgccaccaccctgcttggcacatcacatcgccaggcaccagtcaagcaactggtcgcttcgattcgtgaaggtctgcgcgagttcttccacctgcctgaagggtatgaggtggcgcttggcaacggtggcgccagcgcgttctgggagattgcctgcgcttcgctgatcacccgtcgcgccgcattcggcacgtatggctcgttcagtgccaagttcgccgcgtccgccgcgaacgcacccttccttgaagacccggtgctgttccccggcgagccgggcacttaccgtctgcctgagctcaccaagggcgtggacacatattgctgggctcacaacgagacctccactggcgtggccgccccgattcgccgcgtgcccggcagtcgtgaagccggtgccctgaccgtcatcgacggcaccagcgcagccggcgctttgcccgtggacatcagccagaccgacgtctactacttctcaccgcagaaggccttcggtgccgatggcggtctgtgggtcgccatcctctcccccgaagccatcgatcgtgcggcatgcgtcgaatcaagcgctcatctggaaggcgcacatcgctgggtgccgccgttcctctcgctgaccacggcactgaacaactcccgcaaggatcagaccctgaatacgcccgccgtggccaccctgatcatgatggaaaaccagattcgctggctcaacagcaacggcggcctcgcctgggccaccacgcgttgcgccaagtccgcatccatcctgtactcgtgggccgagcgctccgaatacgccgctccgttcgtcgtcgatgcggacgcccgctcgaacgccgtggtcaccattgatctggacgagcgcgtccaggcctcccagatactgtccatcctgcgagagaacggcatcgtggacgccgccggctaccgcaagctgggccgcaaccagctgcgcgttggcgtgttcccctcggtggaaccggctgatgtcatggccttcaccaagtgcgtcgactatgtggtcgagcacctgtgatggcggtctatgcctcgcatggccgaccatatatgccatgcacattgatcggtctcaactgataccgattgaataaatcgtagggagaggtgtttgacgcccctccctactcttactacagtgcatgagtatgaagttcgcgcctctcattgaccctgccgtccgcaaacccgcgcccaagcccgtacgggtggacctgcgtaaggtgtttgccatcggtaccggtctatggattgtggcgttgattgtcgtgctgattctgctggccgtgggctacagcgtaatgccgttggtgattatgtgcgtggccggtgtcattattggcttgctactgctgatttgggaatacttcgaccgctgggactaccgccgcctcggacagtaataaagttcactgcgccaacggcaacgtcaggctgaacgtactgccttgcccgggcgcgctccatacggtcacatcgccatgatgggttagcgccacatgcttgacgatggccaagccaaggcccacgccatccgccgtgcgattgctctgttccgcaccccggtagaaccgctcgaagatgcgcgtctggtccttcttcgcgatgcccgcgccctggtcgatcacgcgaatcaccgcacggtcgccatccttgtctttggatgcggacacactgaccacaccattttccttggaatagccgatggcgttttcgatgagcttggtcacggcgctgtcgatctgatccgcctcaccattgatgactagatcatcgtcgcccttgatgttcagctgcacgccagccgcggccgcctgcggctccagtcgcgccaccgtggcctcgagctgttccataacgttcagtcggttggcggaagacggcgtaatcggctcctgtgcgcgtatgagcagcagcaaatcggacaccatatggttgagcttgctgcagctggaacgcacccggcgagcatcggcagccacctgctgttcgtccagattgtcggactccagcgaatcggcgagtttggccagagcttcagtggggcccaacaattgctcggatacattggtaataaacgagtcacgcacttgagcgaaacgaatcacgtcactgacatcggtaatcaacacgatgacgaactgctcgttgatacgccctacagtcaccttcagccagttggggcggtggacggactgcgtggcgacgtgatcgcccttgttctggtctgcgacgtaccgctccggagtatcggtggtcaagtcgaactggcgcttgccaccagacttgcgcgcctcgtgaatggcatccagcacctgctgctgggcgatggcgtcatctgacaccacacccaggcggtaggcggcgggattgcagcggaccacctcgtcgtgctcgtcgaccaccacggacgcacccggcagcatggacagcagcgtggcggtgtcgtcggacagatcgtcattgtcgtcatcatcggccagcggcgattccacagacactcgatgtgtcgcaaatcccacgatgagcgtgatgattcctaccacaaataaaacagccgcgacaataagagcaatcgcggcgacgagcggcatctgtgtcatgcccccattctttcacaccacacgccgggattgcggtttgccggcgcgccggtaacatgaatttcaggtgaacaacccaatgaacagtagaacaatttgaggttgccattacctacgttgaagtggggaacaagtactggaataatacactggtacaggttgcaataagcaagcatgaaaggctagagaaatgcgcgttattttcaacgaggagctgaagcaggttgctgacgacctcgaccgtatggcgcagaacgtgcgcaaggcgatcaaaggcgctggggaagccctgctgaatcaggacgttgaagccgcacagactgtgattgacggcgacatcgagattgatgccctggagtcctctgtgatcgaccagtgcgtcaagctgctcgccaagcagaacccggtggccaccgatctgcgtgtggtcgtttccaccatgcgtctggcttccacgttcgagcgtatgggcgatcttgcccgccacgtggccgaggccgctcgccgcacctacccggccgccgcgattcccgaatccgctcagccggtgttcgccgagatgatcgacttcctggacaacaccgctgaccagctggtggccatgctctccgatcgcgatgccaagaccgccgaggccatcatcctggccgacgacaagctggacaacctgcaccaccagaccttcgatctggcgctgtccgatgacatcacccgtcagcagaccgtggatatcgtgctgctgggccgcttcctggagcgtctcggcgatcatgccgtgtccgccgcccgccgtgtggtgtacatcgtctccggcttcgaccccaccaaggagccgacccgcgacgagggcaccgacatcgactgattggggcttgtcctcacattgggcgaataactgaacacttgtcctcctatggtttgaggaggatgcccgaaagcggcgatccggctacggctggacgccgtttttttgttgcttctgggcggtacaccggcgtatccatggggcggcaaaacacccatagggcggtaacttgcccatggggcggtttgaaggatatgtgaaaccgcggaattaagccattctggcataccgccccatgagggttttaccgccccatgagggttttaccgccccatggggtaatcaccgccccatggggtaatcaccgccccatggggatttggcaggcatagcaaaggggagccacacattatgtgcgactccccttacagcttgtaccgtgttagcggcttaggctcacttctggccttgagcggcgacagcggcggcaccggcagcagcagcctccgggtccaggtactcgccacgcggcttgatcggcttgaagttctcgtccagctcataaagcagcgggatggcggtcgggatgttgaccttggcgatctcttcctcagacaggttgtccagcatcttgacgatggcgcggagggagttgccgtgagcggcaatcagcacggttttgccggccttgagctccggctcgatggcggactcgaagtacggcttcacacgctcaacaacgttggccaggcactcggcttccggaaccggatcgccggcgtagcgcgggtcgttgttctgggcgtactggtcgttcgggtcgatctcgggcggcggggtggcgtaagaacggcgccacagcatgaacttctcgtcgccgtactcttcgcggatctcggtcttgttcttgccctgcagagcgccgtagtgacgctcgttgagacgccagtcacgctgaaccggaatccacagacgatctgcggcatccagagcgatgttggcggtgttgatggcgcgacgcagcagggaggtgaacacgatgtccggaaggacgttcttctccttgagcagctcgccgccgcgcttggcttcggcttcaccctgctcggtcagcggtacgtcgacccagccggtgaactggttggttttattccatgcgctctgtccatgacggagcagtactagtttataagtcatacggttcagtctacagccgcgtgcgcccaaacacgagtattcgtcttattatttcgctctcatagcgccacggcaaccgccagcaccaccgcaaacagcaaggtctggaagctggcggcgggcagagccgggcggaattgacgtttattcacgctggagaccatgcgcacaggtattccggcgcccgagagcaacagcaccgcaccccacggccaccataatgtaccacacatcagcagggcgatgatccatgcgatgacgcagcacacaatcagcaacgtacgcgcgccggactcccccagccgtacggccagcgtgtgtttgccatgctcacgatcctcgtcgatgtcacggatattgttcaccatcatgatcaggcaggagaacaggccagccgccacagcacccaatagtccgccgacgtccaccgtgccgcacagcgcgtattcggtgcccaataccgcagccaagccgaagaacaggaacacgccgacttctcccagcccgacgtatccatacggatgcttgccaccggtgtagaaccagccggccagcaaggaggccgcgcccacggccagcaaccaccatgcttgggcgagcacgaccgccacaacaccgcatatgcaggcgatggcggcgcaaatcatcgccgcgaacagtacatgcttggccggtaccagtccggatgcggtcagtcgctggggtttgcctgatttcgattcgtccgtgtcacgcccggcgtcagtgccgcggatgccgtcggaatagtcgttcgcatagttgacggcgatttgcaggaacagcgcgactagcaggcacaggatggtcaccggccagaatcggtccatcagcagggtctgctgttcacgggccgtggcgcaggaggccggttctggatatattgcgatgcaggtgcccgaccgctcgatatgcacgtacgccatcaccgccccaaccatcaccgacgcgatggaagtggccaaggtcttgggacgcgcgccccgaacccacaagccgatagacataagcaatccctttcatatataactctggctcccctctctgaggggagccagagtatgcctaatcagccaacgagcggcttgaccagcgggaaggtgatggtctcgcgaatcgtggcaccggtcaaggcgataagcagtcgatcaatgcccatacccataccgccggccggaggcatgcccacgccgagagcctcaaggaagtcctcatcgatgtcgcaggcctcttcgtcgccggcgagtgcgtccttggcctgggccacgaaacgctcacgctgcacgatcgggtcgttaagctcggagtagccggtagccagctcgaagccgcgcacgtagagatcccacttctccaccacgccgggcttggtgcggtggcccttgaccagcggggaggtttcgaccgggaagtcacgcacgaaggtgggctcgtaaagcttgtcctcgtagaagtgctcccacaggtgttcgacgagcttgccgtggttctccacgtcgtcgcgctccacgccgagcttgtcggcgatggcgcccaaatgctcaacggaggtgccgggatgctcagggccgccgttcggcacgatttcctcgcccaatgcctcggacagcgaatcgtacatgctgatggtcttccattcgccgccgaagtcgtattcggtgccgtcgagcagggtgaccttgtgcgagccgtagacgtccatggcggtcttctgcacgagctccttgaccagctggccgatggaatcataggtgccataggcctggtaggcctcgaccatggtgaattcgggggcgtgcgtggcgtcgacgccttcattgcggaagtcgcggttgatttcgaacacgcgatcgatgccgccgaccaggcagcgcttgaggaacagttccggggcgatgcgaaggtacaggtcaaggtcgaaggcgttcatgtgcgtggtgaacgggcgggcggccgcgccaccgtgcagggtctgcagcatcggggtttcgacctcgaggaagtcgtggtcgtcaaaggtgcggcgcagggaggccacggccttggagcggttgcgcaccatgttgcggatgttctcgtccgcgatcatgccgatgtacggcttgcgggtgcgggtgtcttcgttcaggtccttgtgcagggccggcagcggctgcagggccttggaggcgatagcccactcagtggcgaatacggacagctcgccggtcttggaggcgatgacgcggcccttgaggtacaggtgatcgccaaggtcgacgagctgcttgaactgcttgagcgagtcggcgccaatctccttcttggagatcatgccctgaatcttggtaccgtcaccggcggacagctgcacgaagcacaggccgcccgcgttgcgcaggaacagcacgcggccagcaatgccgaccatgtcttcggtctcttcgccagcctcgagcttgccgtcatacttggcgcggaccgcctcgatggtgtcggtgacgtccaagtgcaccgggtagggggcgatgccggcctcaagcatcatcgcgcgcttggccacgcgcatctgcacctgctcggggtgagccagcgggccgaactccttgttggaggggtccacggcttcgtccagcgtggcaccggacttgatcttctcgcggatggtggcgtcctgctcgagcagcatttccgcacgttcgacggtactcatctgcgggacggccggggtttcattctcagtgttttcggtattttcgacaacttcagccatgattcatcagtgtacgcaaggccggcgattatgagcccggcagaccgtacggccatctgaacacccgctcacatgacgcaaaaccggctctgcacaaggcttgagagacctgtacacacggcgaatccaccatcacgcaacactcgcgacatgccgatttgcattgtccaccaccacaatgtaatatctacgtctgttgccaaacgggctgtagcgcagcttggtagcgcgcttcgttcgggacgaagaggccgcgggttcaaatcccgccagcccgacaattggaccggattgttgagaaatcagcaatccggtttttcgtttcctaacccaacaatcagaccaagcgatcggacagcggtaaacaacccgccgcgcacagcgacaaaccgcgtcgcggcaaggcccgtatttgttggcggaccaccgtaatatatcgctcgaatcaatcgattgccgcactgtttttgtaagtaatactgaagtaattagaggaaccatgaagaagagtctgcttgcactggcttcgggcgcgttcattctcggtgccgccgagttcgtgatgatgggtattctgccgcaggccgcggccgccaccggcgtgggcatccccaccgcaggccattacatttccgcgtatgcgatcggcgtgtgcttcggcacactgattctggtgttcggccgcaaggtgccgccgaagaacctcatcatattgtttatggtgattgcgcttatcggtaatctggcctccgcgttctcggtcaatgccgccacgctgattgtcgcgcgcttcattgccggcctgccgcacggcgcatttttcggcaccgccacactcatcgccaaaaccttggccgacaagggcaaagaagcacaagccgtatcggtaatggtcaccggacagaccgtggccaatatgctcggcgtaccggcgggcaccttgatggctgagttcctatcctggcgcctcgcattcggtattctggctgcatgggcggcaatgaccatcgtgctagttctggcatggatccccttcgttgcgccgattaaggacgccggcatcgccggtcagttcaaattccttactcgtcgtggaccgtgggtgattctggccgccgtattcaccggcaacgcaggcgtgttctgctggtggagctacgtctccccttggctgcagaagaccggtggctggtcgtctaacctggtaccgctattgatgatgcttgccggcttcggcatggtgataggcggtcttatcggcggtcgcatcacagataaatggcgccacgccggcactgccgcgctgggtcagacgatttcctgcatcggcttgctgatggttttgctactgccgggaaaccagggcactactgctttgctgaccttctggatcgccttcggcctgttcttcatctccgctccgcaacagctgttgatgaccgaagccggccaaggcggcggcgagctcatcgccggcgcagccgtgcaggtggccttcaacttcggcaatgccatcggctcgattgtcggcggcgcgatgctcaccaccttctcgatgaactatcgctataccggtctgggcggtatgccgctggccctgcttgccgtagggctgctggccttctactcgtggcgctgcgaaaccgataccgacgccattcaccgcatgcgcgaaatcaaggtggactgagaccaagctcacagcaaactccctgacgcgtttgttcacagtattaatagactgaaatcagacacgattcagggaggtctggcggtatggacgaggaagcactgctcaaacaattcgccgcacaattcgcgcatggtccagacgatgccgacgacaccgatgcggcggccgcagcgcaaggtgccgattctactgcgaaccaggccacggacgatgccgatcaatcgcccgcaacctttgatacccaacaattcctgaacggactggacgcgattttcgatcgccacgcggcagccaccgaagccggtccgtacttggaacaggcgatggtggacgcggaaaacgccggcgacgaggccggactgctcaccgtactcaacgaaacgatgggcttctatcgctcgcagggccggcacaaggagaatcagtggattgtgcagcgggcgctggaactggccgctcgtatgggcttgaccaccggcacatccgaggcgtgggccaccacgctaatcaattgcgctaccgcgatgcgcgcggcccaacaatacgatcaggccgaggatttgtatcatcaggcgcagagtgtctgccggcattcgctggcacccaccgaccgtaggctcgcagcactgcacaacaatctatcgatgctctacagcgagacgaatcggcccgacaaggcggaactggagttgcgtgaagcgctgcgcattatcgaagcctcgagcgtgaacccggacgcggatatcgacgtggccagctcgcacacgaatctggcgttgaccctgctgaccgaacacaagttggagggcgcgcattggcatgcagccaaggcactggaaatctatcgcaccggccatctggaacattccgcgcattatgcctccgcactggcgggcttcgcgcaggtgtgctttgccgagagacggtatgcggatgcggttactggataccggcatgcgctggccgtgatcgagaaatgttacggcaaggacaccgattactggcgtatcaccgccgacaatctgcggcaggccgaggaagaggcggcgaaggccggggtgacggttgacaatgcgggtgttgccggcgatgcaggcgcgctgccccagtccggatcacggctgccggacagcccggcacagggcaagaccggtgcgggcgtcgaggcacaggtcggctccgcgtcatcggccgtggacgcggatacgccgggcgcattggcgcaggcgttacccgagaccggtgcgaacgcggcgttttccccatccaccgtttcggtgtcgaccggttctgcgggcgcggccgaggccgtttccgcatgcccggtgtccggactgaagctggcccgcgcgttctggacgcagatgggcaagccgatgattgcggcgaagtatccgcagtatgccgggcgtatcgccgccggtctggtgggtcatggctcggaatgctacggattcgatgatgcgtattcgcaggaccacgatttcggcccgcgcttctgcctgtggcttacggatgaggattacgcggccatcggcgagcaacttgaggccgattacgaggcgctgccgcgcaagttcagcgtggatgcgcaaggccgcgtgacgttcgaggcgcatgccagatccgatgcttccggggcattcccctccgcaggtgcaggctccaccgtcatacccgatgcggcaaacgcacccacccccggcaccgctacggacgataccgccactgccgagtcaggcgcggcgtcctctgatgtggcggaagcgatgacgactccgattgatgcaccgttctcccccaccacgcctcgcgcacaaggtgccaaccgccgtgacggcgtgttccgcatcggtgacttctttgagtcgatcaccgggtatcgcactgcgcccgcgcaaaccgcgccgcacgagtggctgatgctggctgaatcgactctggccgcagccaccaatggcgaagtattcgcagaccccactgggcagttctccaaaacacgccaagggttcaaggatatgcccgacgacgtgcggcttgccttgatctccaagcgactcggcatgatcgcccaagccggtcaatataatctgccgcgttcgttgaaacgcggcgacggcgcggctgcatggctgtccatccacgagttcgtgcaggccaccgcctcgttggtgttcctggttaacgtgccgatggtggtgggctatatgccgtattacaagtggcagttcgcagcattgcgcaagctgtctggctcgatgttcgcgctgttgccgaacgtgggcgaacagttggaaaccgtgatgcgattgagttcggcagcctgctatggaggggccggattcggcgaaggcggcaagggcgcggctccagcaatcgagaaaatcaacgatgttgtggagcagattgcggcggatatcgtcagggaactcaaacgcgaacacctgaccacgtccggcgagaccttcctcgaatggcagcgcccgtatgtcgaggaccacatcgcctctgatgatccggtgcttaaaagtttgtagattcaagctccctctgtcacggcttcgccgtgccatctccctcatcagagggagatattagtgaaaggaacgtcgatgaccaacgaactgactgatgatgaactgcgcgaggctattgtgcgccatgaatgggatcagttccagcgcaccaacaatgagggtggacgcgcggcatgccaaggcaactggccggtgttccaccagatgcggctggcccagttcctcacatgggagcggccattactcaccagctatgccgctgatcttgacgcggccgaccacgtgggccgcaacctcgtgaccgaaaaatacggccgcatgatggcctccaccgcgccggaagatttcacgaagaacatagagccgtatattccgcgtccctctgaagagcgcgtggcccgtcaggaacaggtcatcgcccagcaggtcgcctgggccaaggatttccgcgagcgctaccccaagctcggcgaggcgatgcgcgtactcaccaccaccgaagacacaccatctgccacctcattcgaaacctatctgcgcggcgagcttggtacgtattccgaacggaccttccagctctacgaggtgatgattagcgagcgcgccgcagccagcccgcaacgcaatatcactgaggaaaccttgttgcacacagtccagctcggcggtttcgacactttggatgaggctgaagccgctcagcgctgacgacagtgcctccacgccgtcacgccccatccaccttcccgaatttgtgacgctcacggcgactcagtggcacatattcgggaaggagccggtaacgaccgtgaatatcacagactgaacaacccccagaaagacaatatcgtcaatgtgacaagtgcagccagtgtcaccatcacgcaaatgacacgacgcacgccgataatgctggcgcgataccgccacatacgttccagttcccacgcgaacagcatgaccaacagcacggtcagcacctgcaatgccctccacccaagggaaaacaactgcggttgaggcataaccaatacagccgatacgcctacggcgctcatatagccatacaacagcacggtaatcaccatcaccgctgtgccgataccggcagataagccggcaatgccgtgcaacgtacgctgttgggcggctcccagcccactcggcgtcgcatgcatggcccgcacagtcgccacactacgtcgcccggccagcaacgtctgtagccaagaaaacacagtcaagccaatacctaatatcgccgccatcacgatcagcacgggccctgccaccatcagaccggccagcacgccgagcgagccgacgataccggatctggtacgttgcggcgcggcgaagcgctggtgaggtgtcgcaccggcgacttggggcgttgcccatccatcggctttggttccggcagtcacaccgttcacccaattttccagcgcttgcgtatagccttcggccaatggcaggttcggggtgaataagccctcaccagcccgcatctgatggttgccggcaaaatagcgtacggtgacgttctcgttgccggacttgttggccgtggcgatgatccgctgcgccccctgttcgatgggcatggccgtatcgtaggtgccgtagttcaccagcaccggcatggtgagggatttcagataccggtcggcatcaaagtcggcataggccagatcgaatggcgcgtagtccagcgacatcaatttggccatgtctttgaccacgggcttgggcgtgccggcctcatgcgtataggcgctgacagccatggccatttgctcacgtccattgaacaccggtgcggatgtaagtatggcaaaggcaatgtcttgccgtttcgaggttagaatcgtggcgatccaggtgccttcggattcggcgtagatgccggttttggcggggtccacgccgcttatgccacgcagcacgtcgagcgaacgcccgtattcgcgagcaaaacgcgggtagtcgcgatgcagcacggtgtagttgtcgttgcgcttggccggcaccaaggtcacgatgccggcagaggccatggcgttggcgatatcgccgaaatcctcggcaccgctggtaccggacccgtgaatgaacagacaagccgggcgtggcccgggagcgtcgaccggttcacgtagtacggcgggtagcgtgacgccgtcgccggtcttgatggatagtcgggtttcacgcgtacgatatcgcccctcgtggggaatgttcgcatgggcaggggtgatggtggtgtcggcagaagcgatagcgatgtgcttggtgtagggccgtgtgttccattgcggcatcatcgcccagccaagtgcggcgaataccagcgtcatcgccatcgcggtggcgatgacgctcgctacccgccgcgccgaaatccgtttcatagttactatgcctccccccatcagcatagaacggtcggctcttatcggtcggctcccgtcataatgtgcttctactgggaccgtaatgcaatggttgtaacgctattttctcttcttgacggcaccgactatggcccatacaacggccactattaccagaataagtcccactacggcgcagataatagccgtcagcaattgcggattcggcgagaacagcgaaatcatccgatccggagatatgtacccgaaaaccagcgcgatcacgccgataatcacgcctaatagtccgaataccacagtaggcgcgctggtgctctgtttctggatgttcttggcactcttgacatccttagcattctggacgttcttggcgatcccctcagtttggcgtggtttgccggcgggctgagactgctcataggaaggttgtgctgaagatgctgcgtacatcggtacatcatcggcagatggaatcggcccgccatccccctccacggcatcggcaactgtttccagggcaatccgatctgtggttggttcgatgggcgatggagaggcagctgttgcctgcgtatccacatccgagaccggcgcatccgcatgatcgtcggggacgggtagcacagccgttttgtcatcatccgctgcggatggcagcaccgtggtatcggttcggtcatcgacggtcaccatggttgtggtctcggtggtctcgtcggtttcggaaggtatggccgtggtcggtgtcgcatcctcgatggaggcgaattccttggtttcatcagtcatgattccatctcctggttgtaacggcttgatcattccgattgcccggttgtgttcttgcttgtgctgttgccgtcgtatatatcggcaagcggctggaacgtggagcctttccaatcggaggcgtacaccacgttgacacgtgcttccactgcatagggaatattgatttttaattctgggccgttgtccggcatggcggatcccttatccaaccattcgtaatcaggcccattcatgggattggtggcgctttcagctccgaagaaaacaaagcttagacccatgtagttgttgtataccatctcgtatttgccgccgacgtcactcgaagtgaagtaggagtcggcggtgccgaaggcgtaagtgcaggaatccggcagaacgatatgcacttgcgcctgtgttgcggctatggtgatggtaccgaccgggcaattactgatggaggttttgccatccagcatcttcactgtgtgcggtccatgtgtcttgtcccaatcggaccaatcaatgattgcctgatcggtgttgtagttttcaccgttgaacgccacaccttgctgcaatgtttcgaacgtggcatcactggcatcggcaacgaagatgccatccttttgcacatcgttcatgccgtcgctgtttctcgcgctgatagattgcctcagtgaaacaacagtattgatgccgctggcaccaagatcacggtagtgcacgccatacgtgcctgaaacgatggtcatgcagagcgcgcatccaccggcaaccagtccgagaggaatcagaccaccggtacgccgccctctgaatccgagaatgatgaccaccagccccatcactatgcatactgcggcaatccagatggtgctcagacgcataatgccgataatgcccatgtcgtttacccaaatcagtcccatcagaccggcaaaggagaggaaggtaaggcccagtatgctcaagaccacgattgggcccgccggcttgcggcgcttggactcggtgggggcataagccgtcgcattcatacggtcgggggcaaacggcccgttgggtactgtgccgggcatcgcgccgggcactgtgcccggcatcacgctgggcatcgactgatagacaggctgtgaaacaggttgtgaaacactaggcgcggttcgtgaaacagattgtgaaacaggttgcggagctgaatacaaaggagatagagggaccggttgcgcggctggatatgaggcaggctgtggagctggatacgacacaggctgtgaaaccggtcgcggcgcagatgccccgaatccgtacccttcctgctggcgaatgccgcttttggccaacaaccatagcgctaaggcggcgagcgcaatacaaacccaccccgcacctggaatcacgattgccacggctaggaacaggaagcatccaagacaattccagtcccattggccggcaatgaggtcctcggccaagatgtgcccatcgcgtacatccggcatcagaaaccagccgagtgcgtacagagctgcgccgaagccgaagaacaatgtacatacaatcaccaacgcacgtactagtgtggggctccagccaagccgtaaagcgatgccgctgcatacgccaccgatccaccggtcgtcgccgcgaaccagtccactggatcgcacccaagtgaagaaacgtcgcgatgtcttgtttttttgcggaccaggctgcggctgtggctgatacggattcgcgtttggattgctcatgattccattacaccgcccgaccactgccacaacgctcggggaacaccctgattgttccctgaacaccgggtaaaaccccggccgcaacgccctgagcgcggcacaataggagtatgacgtcatctcccgaaccattgctgcccgcgcgcatgccgctgatgcgcccccggcagggccgctggctcaccggcgtgtgcaagggcatcgccctgcacttgggcatcggcgtgacatgggttcggattgcgttcatcgctctgaccttcctctacggcgcaggcatcatcgcttatgtattcctgtgggtgttcatgcccgccggagacccggtggcggctgcggctcgcacagtgcccgttgatcaggcgccgcttgcgcgaggcaatcagccacttgccgctcatgacgacgaatcggctgccgcaccggaatcattgtccgaggccatccaacgtgctccgaaaccggccgttgtggcattggccggtttcgcgttgatggccaccggactgctgctcaccagcaccggtgcggatgcccagattgtgcttccgctgctggtagggttgggcggcatcgcactggcatggatgaatcttagtccgcgaggcacgcagctgttgtctatgttgggcggcatcgcactgattttcatgggatgggcattgtatgtgcataatgtcagcattcctgggtggggcagctctcctcgacgcattgttgccagcggattcgtgatgatcgtcggtatcgtggtggcggtgatgccgtgggcgaatgcgatgctgcaacgactcacccacgagcaggcattgaaggagcgcgaagaggagcgcgcggacatgaccgcccatctgcatgatggcgtgctgcaaacgttggcgctgattcagctgcactccgaggaaccgaccaccgtattcgccctggcgcgtagccaagagcgcgagctgcgcgaatggctgtatcaggaacgttccacatcggatcgttcggtgggagccggattgaagcagatcgccgccgaggtggaggacgagcacggcaaaccgattgaggtggtcaccgtgggcgacgcgcggccgagcgcccagaccgatgcgctgctggacgccacccgtcaggcgttggtcaatgcggtcacgcatggcggcgagccggtgtctttgtattgcgaggccagcgacacgatggttgaagtgttcgtgcgcgaccatggcgaaggcttcgatatggacgccattccgcccgaccggctgggcatccgcgaatcgattatcggccgcatcaaacggcgcggcggtacagtggagatagtgtccagggccggctggggcaccgaggtcagaatgcatatgccaatcgcgctgaaagcggcgcagggagaacatcgatgagcgagaatgagacagccaagattcgtgtggccgtggtcgatgaccatgagatgttccgtgcgggcgtaatcgccacgttgcgtgattccttcgatatcgtcggccaagcggcggacgtgcccggttcggtggcgatgatcgcacagaccaagccgcaggtggtgttgctggatgtgcacgtgcccggcggtgaaggtggcggcggtgccgagatcctcgccaaatcgcggccctactcccccactaccgtgtttctggcattgtcggtttcggatgcgccgcaggatgtgggggcggtgattcgcgccggcgcccagggctatgtgaccaagacgattaccggcgctgatttgatttcatccatcaagcaggtgcatgagggctatgccgtgttctcgccaaaactggccggttttgtgctttcggccttccagggtgtgccggcggcggggtctgatggcggcgctgatggtgcggcacgggctcatgatgaggagctggaccggctgtccgcccgcgagcaggaggtcatgcggctgatcgcacgcggatacacgtataaagaggtggcggccgaactgttcatttcgatcaagacggtcgaaacgcacgtgagctcggtgctgcgaaagcttcagctttcgaatcgcaccgagctcacccgctgggccgccgataggcgcattgtgtgataaacgacagatgagctccctcatcagagggagctcatctgctcatatcactcggcgtcgcggaaaccgttggggttcttggtctgccagttgagggaggaggcggccatgtcgtcgatggtcagctcggccttccagccaagctccttctccgccttggaagcgtcggcgtagcaggcggcgatgtcaccggggcgacgcggcttgatcgtgtacggaatcggatgaccggcggccttctcgtaagccttgatgacctcaagcacggagtagccgtggccggtacccaggttgtagacgaacacgccttccttgtcgatgtggtcaatgacggccacgtgacccttggccaggtcgaccacgtggatgtagtcacgcacaccagtgccgtcgggcgtgtcgtagtcgtcgccgtagacctggacttccttgagctcgccgaccgcgaccttggccacgtacggggtgaggttcgccggaatacccttcggatcttcgcccagcaggccggactcgtgtgcgccgaccgggttgaagtagcgcagcagcacgatggtccaggacggatcggccacatgtacgtcgcgcagaatctgctcctggaacagcttggaggtgccgtacgggttggtggtgccgccggtcggcgtctcctcggtaatcggcagttccttcggcgtgccgtacacggtggcggaggaggagaagatgatcttcttgacgttgtgcttcttcatcaccttgagcagcacaagcgtggagtacaggttgttgtcgtagtattcgatcggcttggccacggactcgcccacggccttgagaccggcgaagtgaatgacccaatcgatgttgttttcggtgaagacgcgttccataagcgcctcatcgcgcacgtcaccgtcgtaacgcttgaccggcttgccggtgatctgctcgacgcgctcaagcgccacgggagacgagttgccgtagttatctacggaaataacgtcgtagcccttgtcgagcagttcgatgtcggtgtgggtggcgatgaatccagcaccgcccgtaaccagaacagtagtcatatctcctcctttggaaggacttgccttcggttttccttcagtattgagcttacttcacttgacctgtttcacctagcggcaaaaccaagactttcgaggaatgtttgcgtggtggctttctgcttgaagacggccgtgttgccgaggatgcggtagcagacgctgccgagctcgtcacgtacggcttggtggatggcctcgcggtcgcggtttccggccaatgtttcagcgagttcgccccattcgagactgaattcgctgacttcatcgggcaaatcgcggccttcggcgagcgcctcctcgacgatgccgagctggtcgacgagccgtccgggcaggatgaacaggccttgggcttcgatcagtccaatcggctcctgcttgaccggccagtattcggggtgtgcatggaaaataccttccgggtactcgtcgctgatcgcattgttgcggaagatgagactcatctcatagccacgttcggtgatgatcgcgctgggcgagagggcggattggcggttgccgtccgcgtcatggctggcgatgccgttcgccgcgtcgtcataaccgacccatgcctcgcggatgatgtcggatacgtcgatgatgctctggcggtttttcgacaccacacgcacggcggtaccgggccagtcgaggatttcgaccacggcgtccggatagtcggcgagcgtgaaggcggcccaagtggcggccttgtgcatcggcagcagttcgccgccgccctggtagtggtcgtgggcgagcaccgagccgccgatgcgaggcagcgcggcgttgcatccgaggaagtatccggggaagcggtccacgaagtcgagcagatggccgaaggtgtcgcggtccacatgcatcggcgtgtggtcggtgttcacgcagatgccgtgctggtcgaagtagccgtagggcgagaactgccagaaccatgactcaccgccgagcgtgaccggcagggtgcgcagcgtgcgcttgtcacgtccggcgaagccctcgttctcatggcagatcgtgcacttcgggtagccgccggacacggcgttgccggccgccgccttcttcatgttcttgaattcgggtttggcgaggttgatggtcaccgtcagcccgtgcgagtcgaagcgcgggttccggtcgagctgggcacgcttgacataattgttggccacacagtagtcgtagaaccattgcatggcggccatgccgccgtccctgtgctcgatgagcaggaaccggtcgtcgagatcggcggggttggcggagaggatgcccatgatggtgtcggcgtaggccgggccttcctccggatcgaagaggccggcggttgtggcggcggcgcggaaggcggcgagtagggggtcgggggtcttttcgtcagagggggcctggcttcggctgccgacaatgtcttggactgcgtctgacactgacgccgccgatgttgtggttttgggtccggggtaggaatccaggtggaagagggcgaagatttggttgcgggtccagtctgcgttgcgtggatcgaggtcgagatgatccaaggcgtaatcgactagggcgtcgatgctggcgtatacctcggtcagctgatcgctcattgctcggcccccatcatgctggttcgggtatggttcgactgacggctcacttggcagcctccatgatgtcggctacgatggcgtgggtttcactggccttctgctccatctcctgcacgagtttgatctgggtgcgggtgcgcaccagattgtgctcggggtacttggtggcaaagtagatatcgccttccaagtagtcggcgagaaagcgcatgccgcattccatggtgagcaggttgccgctgaacggcagcagttcggcctcgcgcgcggtgatgctgccacgtagttcgcccacgaatccttccgtgtaggcacggaacagctcggtgctgaaatgcaccttgctgaggtccttttcgtcttccagagcagtggacgcaccaaagcgtatggaatcgccgaagtcgaacagcatggagccgggcatgatggtgtcgagatcgatgatcgcacgcgccttgccggtggtggcgtccatgaggatgttgttgagcttggtgtcgttgtgggtcacgcgcaacggaatcgaaccgtccctgagcccatccatcacgacggcatactggtcggcgtggctcagatagaagtcgatttccggctggcatgcggcggcgcggccgagcttgtccgcggcgagggcggccttgaagtcctcgaaacgatgcggggtgtcgtggaagcgggcgatggtttcggtcagctggctggcgtcgaattcggacaggaagttctggaagtcgccgaatgcgctgccggcctcgcggaacacgtccgggttcggcacgaggttgtacgacacggtgtgttcgatgaacttgtagacgcgccatgcgccgccatcgatctcggcccaggtggcgccggaggtggtgggcacaatgtccagcgtctctttgccctgagccttgagagtggaggtgaccagttcgacattgcgcatcagattcaccgtatcggggaagatgctggtgttcatctgttggaggatgtagcgggggccgtccgtggtcaccagataggtggtgttgatatggccgtctccgtaaggttcgatgccggtcacggcaccttccagcgcaaaatgcgaggcgatgccgaataaaacttcattgctttcggtcatgatgggtccgttctccaaaacgcgggaatcaggcttcacgccatgcgatgccgctgtcgggcaggtcgaagtcctcggtggtgccatcggccagagtcaccgtggtccgctgcggctgatcggtgttgttgattacgcagtacaacccttgctcggggaagtgcgccacctcgcactccgggttggacgagctccaagccgcatacttgtcttcgttgtgggaggcgtagaacagcacgcgttccagcagtcgggcgttggccgccgaatagggcagaccggagatgtacacaccgcggccttcgccataatcattggtcgcgagctgcacctgcccgccgtccgcgcgcagcagggtcacgttttcattgaccggatacgtgttgagcacgggttcgccgaagtcgatgccgcccaacggcttgatggactggccaccgccgcaaccgctcagcgggatgcggtagccggcctgttcccaagcctcgcgggccgccgggtcgaccggcacatcggcggtgatgaagtggtccggcaccaccggtgggaagtacttgtccacggagagggtctgatagcgctcctcgtccacgccaatcacgtcggccagctggaagaaccggcccgcttggaagcgcggtgccgagctcggctcgcccacgcccacgaacgcgccgccaccacgcacccaggcgcgcacggtttccacgagcttcgggttggtccacacgtcgccgccggtgaatgcggtgtcgaccgggccgccgttgatgattacgtcgatatcactatcgatgccatgcgcgagtacgtcgtcgaagctgatgaaccgcacgttcacgcgcatgccggacagggattccagaatgccgtagtaggagtaggtctgcttgttgggcagggcgtgtgccacggtgaacgccatccaggaacgcatcttgccccaggaattcagaatcgccacgttgagctcgccttcggcggccaccccaccggtgcggtcgtggatgtcgcggaattcgtcggcgatatgggtcaccgtgtccacgaacttcgggaacttggcggccaaggagaggtagccaccgtagcccatacggccgatcggcgaacgcaggatcgcgcggcgggccttacgccagttgtcgaggccttcgatgctcgggtcgttgccctcgtagaacgtgtcggggaagaagtacggcaggaagcgtccttccgtgtatttgacgcccggaatgtccgcgatcatgcgggtggtggtgccgtctccgatggagccgacgaccgcatccaaacccagcttttcgaacccgtccttatacggttcggtaccgatccactggtcgccaaggaacatcatggcttccttgcctgccgcgtgcgacatgtcggcaagccgcttgacgttctcgcgcacgaatccggagaggaagtcaatccagtcgcgttgcgccttgcggggcacgcgccacgcggagttgtaggcaccgccatccacgaaatcctccggacgcagacggtaaccgtactccttctcgaaatcgtccaatgcgcgcgggctcacggtgcaggcgcaaccgaaccagtcgaccaccttttcgcgacgcttggcatcgaacaggagcgtgaactggtagaagaacgtggtgaaacgcaccacatccacctgcgggctgtccttcagccactgctcgaacgtatcgaacacgaacttgcgggtggccggatggtagatgtcgaacggaatctcgtgttccttgtctccccaatcattggtcaggtggttgtacatctcgaccgggtcccagatgatgtaggccaggaaactcaccgtgtattcgtgcatcggcacggcagcggtcacgtgcacggtgtcctcgcccgggtcgagcgtccagccggacgggtccacgacctcgcccgtggtgcggtccacgacttcccagtacttatgagggtcggcgtcacggttaggcttgagctgttcctcgaagagaccgtccatcagcggcacatccaccgcgttggactcggccaggatacgggcggtcagcaggtagacctgcggggtctcgtccatgtgcagggtgatccactcgttgtgggcgcgggtcgggaagtaggcgctgtagattttcttgccaagagcgagcactgcctcgtccagatgcgtgccgtcggagttgcggatggcgtccgcaccccacaattcggcgagttccttggtcttttcggcaaaattctcttcactgggcagcgtgaagcggccggtgctggtcatgagtgctcctttgtggggttggtcatcaaaaaactacaaagcgacgaattcgtcgcatacaaaatgaccggcgtcatcgcgggccctgggaccctgactgcgtagatccttgacgcttacggtgacgccggacgattggaatcgtgtcactgaatatgggagggacgttgcccggcaccggaaggagtgacacgacatgccgggcagcggattggttagcccttgacggcaccggcggcgaggccggactgccagtagcgctggaggccgaggaacagcacgatcacgggcagcacgccgagcaacgcacccatcatcagggcgccgcgatcggtgaacgtggccagcgagaccatgccgtacagaccgagggtcacgggcttcaaggtgtcggaagacaccatcatcaacggcagcaggaagttgttccacgtggccacgaacaggaacaggaaaatcgtcaccatggccggggccaggagcctcagcacgatggtgaagaagatcctcgcctcgctcgcgccgtcgatgcgggcggcttcaagcagttcgtccggcaccgaactctgtgcgtacgtgcggcccaggaagaagccgaacggcgaaacgcagcacgggatgatgatcgagagcatagtgttggtcaggtgcaacgtgtggaagatcgagtacatcgggatggtcagcagggcggacggcatgagcatgcaggccataatgatgccgatggccgcgttcttgccgcggaagttgaattttgcggtggcgtagccagccatcacagacacgatggtgccgatcaatgccgagacgcccgagtagatcagggagttcagcacccagcgccagaagttgccacgagtccagccaagcagcttggaatagttagtggcgatggcattgggcagctggtcaagcggcacagcaaaccacatgccgttgctaccggtcatctgggccggcgtcttggtggacgcgatgatggcccagtaaatcgggaacaggaagtagatcaacaccagtaccagcagcaccacggtgagggtcttcacggccgcggacggtcgcatggagcgaggcaaatcgtgttgcgcagcctgacgctgcttttcgagcttgcgctcggcctttttgcgggcgcgttcttcaacggttgcggagctcattactcgttcaccttcctttcggccaaggtgtacagcacggcaagcacacctgcgatcagagccatgacaatggcgatggccgaggccggaccgtcaccagacggggtaatggtgccctgagaagtgttcatggccatcatcatcggtgtatacgacttggaaatacccggatcagccgtagacatgatctgcggttcgttgaacagctgaatggtgccgacgatggaaagcagcatggccagcagggccgcgccacgcacgttcggcagcttgatcttcgtggcaatctgccaaccattggcgccgtcgatacgggcggcctcatagaggtcatgcgggatggcctgcagtgcggcaaggaaaatcagcatgttgtagccggtgaaggtccatgtggtgatgttggccatcgagccgagcacgatgttcttgttgaagaagtccacattgacgccgatggcggcaagtcccttgacgatcggcgagatttggccgttgtacaggtagacccagataatcgaggccacgacgccggggatggcgtagggcaggaagtagcccagacggaaaccggtgacatgcttgaccacgaacgagtcgatgacgatggccaacgccagtgcggcgatgatcatgatcggcacctgaatcagggtgtagagcagcaccctgccgacgccggaccagaagttgccggaagtaatagcatactggaagttctggaatcctacgaatttattgaccagctcgccaccgccgtatgcgccaccgccctcggtgacctgacggaagaagctggaatagatggcccagatgatgggcaagatgaacacgaaagtgaacaggacggcgaacggtgccatgaacgcccagccggtgcggttctcgcgcttctgagcgccggaccgcttcggcttggcggcggcacgcctaggtgctttgcccttcgcctgagtagtggatgcagtcataatacaaaacctgtcttcgcaaagaacagtaaaacaaatgacaagggccacagcgcccctgcagcaatacccccaaacaatacggaaggccggagtatgtgccccggcctttcgctatggtgatgcgaggcatcggaggtcttggacggccggccatttcaagccggcccgttgacaagacctagtgaggtcactccttgacggacagaccgaggttcttcagcgtatccaccgaggtcttctgagcggtgtcgaacacatccgaaaccttggcagaaccatcggcagccttggcggcggtctgtttcattgcagcgccgactgcggagaagccaggcatgtaggtgaagtcacccatgttgtcgttcgcggtcttgaactcagccatgacatcctgtccgctgaagtagtcggaccacttctgcggggtcttggcatccgcggtggtggcggccacgacaaggccctgggagacaaggtcatcaacctgggtgttgaaccagtcaaggaactccatggcttcggccgggtgcttggaacccttgagcacggccacaccggaaccaccatcggcgccggtcttggtgccattgccgaaccagtcaccgagctgggtgaccttccactcaccagcaccagtgccaccggcggaatcgatgaacagtggggcttcccaagcggcggccacggtgccgatcagctgaccggactggatggagttatcaaacgatgcatcccaacgcgggttggtgagggcggccttgttgtcgatcagctgctggtagacatcggccacggccttggagcccttagtctgggtgttgacaacccaggagttgccgtcgaccttgtaccacggaccggaagcgccggcctggccggacatcatcatcatggcctcatcaggttggaaggtcatgatgtacttgccttgggcagcggtcttcttggcggtctcaatgagctcgtcagcggtcttcggcacggtgatgccgagcttctcaaattcagcggcgttgtagaagtaagtcagcgggccggtgtcctgcggcagaccgtaggtcttgccgtccacctgcatcagtgcgaacgggccggaagcgaaatcgtccttgtacttggcggcctcatcggtgacatcctgcagaaggcccttggtgaagacctcaggaacctcggagtaaccgacctgagccagatccggcgcattgccagccttgacgtcggtctcgagcttcttgatcatgtcggcggcattgccatcgaacttggtggccttgacctgaatgttcgggtgctccttgttccacttggccacaatgtcgttgaccaaggtcatgccttcggaatcgggcagacgatgcatataggtgatgttgaccacaccgccatcgctgccggacttcgtgtcgccggcagtgtcgctgccgccgcaaccggccaaaccaatacccattgctgctaccgcggcaagagcagccacgatgcgcttgttgtgcgataccatatctctactccttcctagtgaaatcatcacctcagcgtgatgactgattgctaatttaggcctttgctcttttattgtcaacttagctaacaattaccgcgcgtcccgttgaggtgagtggcgttaaaccgattcgatgctcgattgtgcgggtttgttcatttcattaactccccttacaaagcaacgtacttttggtccaccggtagacctaatgagatattggatagcggcaacaatccaaggcgttagcttgcaatcgtccaccacaaattgcaagcacttgccaacattatcggttttcaggttgccggcgcaatacccgactaggggggcaccgcgccttaatgagacgctacacgagcagtctcagcaactggtagagctgccacaggctacgcacgttgaagcgcgtgccgtcaaccgtggcgttcgcctcgccatcgcccacatggacgatcacggtgcgcccgttcacggtcagattaccgtgcatcgtgatatgattcatcttgcaaccttgttgattaaaggcgcaagccggtaatcaacgcaaaggcccgatgccgcaaacgtcgggccttttcttatcggctcacgccgattggcccgtcatatcaacggggacaccgcatgttacggcatcacaaaccaatatatcagcaccccggtggcgatcaagaagacaggttccagaaaaagaaaaagggcctgggcatgttgcccaggcctcggttcgcggacagggcgagattcgaactcgcggagggttgcccctcaacggttttcaagaccgtctctttaggccgctcagacacctgtcctgatgcgcgttcacacgcgcaagtattcattatacagaagggagggatgttgatattcggcagtgcggtcggtcttggattcgcctgctggctattagcgatctctccctcagtcagctacgctgacagctcccccattaaagggagctaaagcacgatgagactcaggcctcccacttagtgggctcgatgacttccttgccgcccatgtaggcgcgcatggcctgcggaatctcgatggagccgtccttctgctggtggttctccatgatggcgaccagccaacgggtggtggccagcgtgccgttgagcgtggagaccggacgggtgccgccatcttccatacgctcgcggatgttcagacggcgagcctggtactcggtgcagttcgaggtggaggtgagctcgcggtagcggccctgggtcgggacccaggcctcgcagtcgaacttgcgggcggcggaggagccgaggtcgccggctgcggtgtcgatgatgcggtagggcacttcgaccttggcgagcatctcctgctccatggccagcaggtgctcgtgctccttgtaggagtcctcctgcttggcgtagacgaacatctccaccttgtcgaactggtggacgcggatgatgccggaagtgtccttgcctgcggcgccggcctcgcggcggtagcaggaggaccaaccgcagtagcgcagcgggccgttgccgaggtcgaggatctcgttctcgtgcatgccggcgagcgccacttcggaagtgccgaccaggtactggtcgtcgggctcgcgcagacggtagatctcgtcggcgtgggagttcaggaagccggtgccgcgcatgacctcggggcgcaccagcgtcggggtgatggccagcgtgaagccgtgctcctcggcctggtccacggccatggtgagcatggcgatctgcatacgggccacctggccacgcaggaagtagaagcgggagccgccgaccttgacgccgcggcgcatgtcgatgccggccacgccggtgccgagggtcaggtggtccttgggctcgaagccttcggccgcgaagtcgcgaatctggccgaccatcttgacgaccacgtagtcgtcctcgccgccttcgggagcttcgggctccacgatgttggagagcttccacatggcggtggtgtattcctcggcggcggaatcggccttggacttgtattcggagaccttctgggacagttccttggtctcggcgatgagcttggccttctcgtccgccggggcggaggcgaccttcttgccgatttccttctgctgggcgcgagcctcttcgaaggccttcagcgcctcacgacgtgcggtgtcggaggagagcacttcgtcgacgagttccacggactcgccgcgcttgcgctgggattccttgacgatatcggtgtgttcacggatgaattgaatatcaagcatgggcaccagactagccgcgtaagcagacaccgacaatggccgaatgcgcgggagtcacgcggaaatcacagggaagcccgggaaagtccgcggacgggtccacccggccaatttcgtcagatgagacgcgattgaaccataatcgcgccccacggggctgttgcgtgcaggaaatgttcacgtacggcgcaccatggccgcaaacgacctccccaccgataacaataggagccatgcctcagcctgccctcaccgtgtttctgatcatcgccgcaatcgccattgtggtggtgctcatcgccgtcatcgtcatcgccctgcgcgcgcagcgccgccgcaagctggctcagacgctggagaagcgccgggacgacgaggtgcagtacgccttcatcgtgaatccgtccaaaccgcaggccgaagcccgccggctgcatatccagaggttctgcgaggccaaggggctcaatcgcatccgcttctacgacacccagcttgacaaggacggcagggtctgcgcgcttgaggcgctggaggacggcgccgacgtggtgatcgcggtcggcggcgacggcacggtgcgcacggtggcgagcgccgtctccggcaccggccatgcgctgggcatcatccccatcggcaccggcaacctgtttgcccgcaatatgggcgttcccgtggacgatatcgacgccgcgctgaccgtggccacctcccacggctcccgcctggtggacatgggccgtctcaccctgctcgaccacccggaggacgaccacggccacgccttcctcatcatcgccggcatcggcttcgatgcggccatgatcgacgacaccaaccccgagctcaaggcgaacatcagctggctcgcctacttcgtgggcggcgtgaagaacctgttcgcgccgaagttccgcggcacgctgacagtcaccagcgccgacggctcgacccacaccatcaagaatctcgatttccgcacggtgatggccggcaactgcggccagattcccatgttctcgctgatgccggcggcatcctatgacgatggtctgctggacttcgaaatcatcgacaccaccggcggcatcctcggctgggccaacctgttcggcgacgtggtgcaccagacgatcatcggcaagcccgaacagaacccgctgtccacgaactcgaccatcgaacaggtccagggtgtcagtgccgaaatcacattggaaaagccggccaaagcgcaggtggacggtgacatgctgccggaaacccgccacatccgtttctcggtggatcaccgcgcgctgatcgtgcgcgtgcccgacgcctccgcgctggaaaagaccgcgcaggccgctgcctcaaatgccacctcgaatttcgccgaaatgaccggtacactcgagccgattcgctgattcgccaatccgctaatccgttactacgatgcgtggccggtgactcgggcgacatgcatcgccaaataagcgatttcgtcgtcgctgatatccgtgtcgaggcgcagttcgagcagggaggcgatggttcgcgcgcatcgcagcgcagcggggtaggactcacgaatcaccttcatcaccggtgccggctcgtccgtcagttgctggtgctggtggatgcgtacgaacaggtagcgcaggtgggtgatgaaccggcccacgttcacggaactgcggtccaacgtgatgccgtagctgtggtcgatgatgtcaagcagttgctggatcacgcccgtcatcgtgtacgtataggacaggtcgccggtggcgaagccggcgttgaccagatgcatggcaagcgcggtggcctcgccgtccggcagcgtgacgtcgagccgtgcattgagcgatgcgagcatcgcacgcccctgcgcgtattcctgcgggtacaggttgctcacctcgccgagcagcgggtaggtgatgtcgatgccgcgccgcacccgctccaccgcattcgccacgtggtccgacagggccatgaccagcgtggtgctgccggtctcgcgctcccccagtccggtctcctgcatggattcgacgaccacgcggatgatttcgggcggaatgtccgccagcatctgcgccagatggtcagggtcgcgcccgtccgatggcacgaaggtgcgcacaactttcgactcgtcgaccgtctgccccggcttggcctggaaccccagtccgcggccggtgagaatcacctcaccgccgtcgccgcctttggcgagcacgacgttgttgttgaacactcgcagtatttccatggcatcctttcgcaacgtcattgttccacatcgatgatcgggctgccggctgatacggttttgcagtcgccgccgttgtcgtcgctgctaccgtcgccgatcaacggcgtgaccacggtcagttcagcggcgttgaccaccgtcaccaccaccacaacgctgtgcccggccgccgcgactttgccgaaatccacggtggccagtggctctcccgccgcgatccgctcgcctttgcccacggccacgacgaatccctcgccatccatattgacggtgtcaatgccgacatgaaccagcacttcgatgccgtcatcggttttaatgccgaaggcatggccggtccgggccacggttttcagcgtgccactgaccggtgccagcacggccgtctcgccggccgtctccggcacgacgcctacaccctcccccagcgcgcgggaggcgaacaccggatcgccagtcgcttccagattcatcaaccggccggcgaccggcgacaggatggcgttggagtcaggagtccgatcggaggcaggccgcgatggggaatcttccgcagactccgcatccgacgatgtcgcgccaatccctctcaccgcatcctgcgagcgtacgttctcgcccgccgagaccatctgcgcctccgtggcgcgcggcggcgtacggtacccgaacagcaccgtcagcaccatcgccattacaaacgcaacggcgatggacagcgcgtacacccacattctgtcaaacaccggaatcgtcagcaacgaggagaaggcgaacgccgtagtcgtgacgccccggaccatctgaccggatggcagcacggacgggaacagccagccaagcaccgcgctggtcacgccgccggccgcgcagccggcgagcagccagcggtagacgcggcggtgatgcagatggatgccgtacaggctcagttccgaaacgccactcagcaatcccgcgagcaacgcccccaccgcggtctgccgcatggccgaatccttgccgcgtacggccagcacgagcacgccagcggtggcaccgaagcaggcaaagttccatacacccatcggaccttggacgaaatcgtagccgagcgcctgaatgttcatcagcatcagggcattcaacggccagtgcagaccgagcggcacgagaaacgggtagagcatcgggatgatgagcgcgaataggaacggcacgtgcgcgttaagccatgctgtggccgctcccagcccaccgccgagccatattcccagaggcccgatgaccagtatggtgagcgcaaaaacgacgaccagtgagaggaatggcacgaacaccagctgtacgctgtcgggaatgacgcgcttcaacccgtggtagaccacggcgagcacggcagccatgagcaacggcacgaagacgttgccgccgtagtcgttgagttgaatcggtatgccgaacgccgacacggtgcaggtttcggcgccgaatacggcgttggccgagcattgaatcgccccggagagggcgctggatacggacgtcccggacattccggacattccggacatcacgccagtaaactgcggggtcatcagcgcggccataatcgcgccgccgagccaggggtcgacgtccagtttcttggccgcattgtaggcgatcataatcggcagaacggtgaacacaccctcccaaatcgccttgagtagtatccagccggcggaggtctcgccgtcaggcacgatgccgagtgcaacgatcacgttgacgatggcgatgaccagcgaggcaccgagcagtacacccagaatcgggcggaacgagtcagacaggtagtcgaaaaacgcggcagcccaagcgcgggcggcactgccccactcgcggacggtacgaggcgtgaagcgacgggatgtattggatgggccgcaactttgttcggcgtcggtggcagtatcgcgcgatggtgcggcatcgtcggaaaggtacggcgcggactgcgcgggttgcgtgggctgtgtggattgcgctgactgcgcgggctgcgctggctgagtgggctgcattgactgagtgggctgcattgactgagtgggttgcgttgactgcgacgctgactgcatcactgccgatggcaattgcgctgccggcatcaatcgcgccgtccgcagccgaacgatctgctcgtacaccgaggcgaccgctccgccgatgatgacctgataacgattgccggctcgcgggaatgcaccgaggactccggggacggattcaagaccgtgctggttgacatggccggcatcggccagttcgaagtgcagtcgcgtggcgcaatgggtcaggctgataatgttcgcggggccgccgacggcatcgacgatgcgcgccgcaatcactgcaggcgttgcgttcgatgcgttcgccacggttcctccttgctgccgtatgccactgtgttccattatcggcgctgggtgccccaaaagcacggcaatgccggcaaagcatcgcgaaacggcaactatgcgctacggtgctccgcgatggtgtcccgccataatgttccgcgatgatgcttcgccacacccgttctccgtatttgccgcagcgcccattccgacatcattccaccatgcagaatcctgcaatcgttgtcaaaaatcatcgttttttgccgcctattcggagtgtcgcgactgcggaagtcgtattctatctttcacacacgttgcgtagcagggttgttactcaaaacgaggcaagacctggagcgacgtggaatttgcgtatcgtgatatgcgaattccacgttgttccaggtctttttttgttttcgggcgactgcagacaatcgaagcctgaccttgcacgcggcagaggggccacgcaacaggcgcggtccgtcaacggcgaaaggacaaggcaatgacgacgacaacggcatcacccgtatcgaaacagacggcatccgcggcgcaggaaaccagcgcaaccggtgcggcggccaccgcaatcgaaaccatcgaaaccggcgtggccggagtggcgggcgcggccacaaacgcggcagccaacgcaatcgaggacctcgaagccgccgaatcgcacggcttctccacgcgcttcccgctcaacagcgcattcatcttcaccttcggcgcgctcggcggcatgctgttcggtttcgacaccggcatcatctccggcgcctccccgcttatcgaatcggacttcggcctgagcgtctctcagaccggcttcatcacctcctcggtgctgatcggctcgtgcgcaggcgcgctgtcgatcggcgcactgtctgaccggttcggccgcaagaagctgctcatcgtctccgcgctgctgttcctgctcggctcaggcctgtgcgcctcctccaccggattcgcgatgatggtgtgcgcccgcatcatcctgggcctcgcggtcggcgcggcctccgccctgaccccggcgtacttggccgaactggcgccgaaggagcgtcgcggctcactgtccacgctgttccagctcatggtcaccttcggcattctgctggcctacgcctccaacctcggattcctgaaccacaacctcttcggcatccgcgactggcgctggatgctcggttcggcgctggtgccggccgccttgttgctgctcggcggcctgttgctgcccgaatccccgcgttatctggtgaacaagggcgacacccgcaacgccttcaaagtgcttacgctgattcgcaaggacgtggatcagacccaggtgcagattgagctggacgaaatcaaggccgtggccgcacaggacaccaagggtggtgtgcgcgaactgttccgtatcgctcgtccggcgctggtggccgccatcggtatcatgctgttccagcagctcgtgggcatcaactcggtgatctacttcctgccgcaggtgttcatcaagggcttcggcttccctgaaggcgacgcgatctgggtgtcggtgggcatcggcgtggtgaacttcgtgagcaccatcgtggccacgcttatcatggatcgtttcccgcgcaagggcatgctgatcttcggttccatcgtgatgaccgtttcgctcgcggtgctcgccgtgatgaacttcgtgggcgacgtggccgtactggcagtgccgacgatgattctcatcgctttctatatcctcggctttgcggtctcgtggggcccgatcgcctgggtgcttatcggcgagatcttcccgctgagcgtgcgcggcatcggctcatccttcggctcggcggcgaactggctgggcaacttcatcgtctcccagttcttcctcgtgctgctcgatgcgttcggcaacaatgtgggcggcccgttcgcgattttcggcgtgttctcggccctgtccatcccattcgtgctgcgcttggtgcccgagaccaagggcaagtcgctggaggaaatcgagaaggaaatgaccaagcactagacaaccggcacacgattcgcacaaaagttgacaactcttaacataagagtacccaaagtggcgaaaaacgtggcagaatagggaacatggtagcaaacaatgcgggtcagcccgccaccccagcagatctgattaatgtcgatgaggttatcggcaagtactatgacctcgtccccgatcccgaagtccccgagcagcgtgtcatcttcggcacctccggtcaccgcggatcgtccctgaagacctcgttcaacgaagcccacatcatcgccatctcccaggccatcgccgaataccgcaagaaggccggcgtcaccggcccgctgtacctcggctccgacacccacgcgctgtccggcccggccaagaagaccgccatcgaggtgctcgtcgccaacggcgtgcacgtgcgcgtcgactcccgtgacgacttcgtgcccaccccggtggtctcccaggccatcctgacccacaaccgtgcggtcgacggcacccagcgcttcgagggcgagggcctcgccgacggcatcgtcgtcacgccgtcccacaacccgcccaccgacggtggctttaagtacgaccccgtcaccggcggcccggccccggccgagaccaccaacgccatcgccgctcgcgccaacgagctgctcggcgacttcaagtccatcaagcgtgtgccctacgaggaggccatcaagtccgagtacgtcgagggcttcgacttccgcgagcactacgtggacgacctggagaacgtcatcgacttcgacgtgatccgcaactccggcgtgcgtctgggcatcgatccgctcggcggcgcttccgtgaactactggccgctcatcaaagagaagtacggcctgaacatcggcgtggtgcgtcctgaggtcgacccgacctggcgcttcatgaccatcgaccacgacggcaagattcgcatggacccgtcttccccgtacgccatgaagggcctggtcgacgagctcaacgccggcgcctgggacaagtacgatctggtcggcggcaccgacccggacgccgaccgtcacggcatcgtctgcccgaactggggcgtgatgaacccgaaccactacatcgccgtgtgcgtggagtacctgttcggcggcaaccgtccgggctggcctgagggcgcagccgtgggcaagacgctggtctcctcttccctgatcgaccgcgtggccgcatcgatcaacgcgaaggtcatcgaagtgccggtgggcttcaagtggttcgtggacccgctgttcagcggcgaagtcgccttcggcggcgaggagagctccggcatgagcttcctgcgcaaggatggccgcgtgtggaccaccgataaggatggtctgatccccgacctgctggccgccgagatcactgccaagaccggcaagaacccggcccagcttcaccaggagcaggtcgagcgcttcggcgagtcttggtacaagcgcgtcgacaccccgaccacactggagcagaaggccaagttcgccaagctgaccggtgatgatgtggccgccacgcagctggctggcgaagacatcaccgccaagctgaccgaggcaccgggcaaccacgccaagatcggcggtctgaaggtcaccaccaaggacaactggttcgccgcccgcccctccggcaccgagaacatctacaaggtgtacgccgagtccttcgtctcccccgaggctctggacaaggtactcgacgaggccaccgtcgtggtcgacaaggccctgagcgagtgaaatcgctgcgttagtcgcgttcaccgcaaccaataaggctctgcattggattcatacaatccactgcagagcttttttagcgcatatgcagttcgcgaccactgaaacacgcaggtcaacggttctcctcatgcaccatgactgcattttctcaacatcactgcagggcaggacggccagatgaccgcgaaacgttcgactacctatattatgaccgagtttcccatcatcattgtggggtcacagcggccagatgaccgccgaagcgttcggtcggcttgcatcatggtcgagttttaacatcgttgtgggacgccacgacgaatttgcccattccagagctgccatcccacaaaagcgtgggacaacagctaagtcaatcgttttacatttcccccatcccacacactcaaactggaaaccccggaaagacgccattcctgccacacccgtcacagccattacccgaggggccgtgggacgccacgcaaaaatcggcaaaacatgcgtagcgtcccacacccattggcgcaaatccacgctcaatgcaccgacaacacccccaatcgaccactatgacacatttccctccacaatcgaacactagtcattcacgaaatccatcactacgaggcatcgcaatcgaacggcatgcaatatcaagcacacaccacaacaacaggtcg

SEQ ID NO: 602 - DNA, 22057 bp, Unknown
  R14_15m  MAG No. k141_2516
ccttttctacaagttcaactactggagcagaatctctgcacaacatcatcgttgcaacggtaagtctttccaatgcccgtccaacgtaacagtcctcgtgaccatacactatttgtgggctctgctctgttcagttgttcttgtacctcataatctattcacgcctgccgcttcctgcaagttgaagacggcagttgtgctgtttttatcacaagtgttcaattgaactaagaaaacccggaaaaacgaatcaaaacgttcgtttcaaacccgtccgatgtttgattgtgttctgttcgctgcagtttacggcgtgtcgcaacggccaccaaccccactaccacatgttcaatcgaacatgactcattcacataaacgaacatccgacaggagctcccaaccgactcccagcaaaccaacgtgaacacccgctgaattttggcgagttcagtagctttccggccactccagagcttacgatgtaagttatggcacagatatttgacgcaccctcgaaggcaatcctgcgcagtcagatcgcagagcatattgccgaaaacgacaacaacgaccgccgcgtcgaccaggaaggcgagacaccgctgcccaaggaccgcttcttcgaccgcgagctcagctggctgaagttcaaccaacgcgtgctcgaatgcgcggagaacgaagacatgcccctgctcgagcgcgccaacttcgccgcgatcttcgcctcgaaccttgacgagttcttcatggtgcgcgtcgccggcctgaagcgccgtatcgactcgggcatcgccgtgccgtccgcagccggcctgagcccgcgccagcagctgcgcgccatcagcgaaaccgcgcatcgtctgcagaacgagcacgcacattacgcgattgacacgattctgcccgagctggaaaaagagcacatcgtgctgctcacgtgggacaagctcacctccgccgagcaggagcggctctctcgctactaccgccagcaggtgttcccggtcctgacaccgctcgccgtggatccggcccacccgttcccctacatttccggcggttccatcaacctcgccgtgatcgtggagaacccggcatccggcaaatcgcacttcgcccgcgtcaagatcccgggcaacctgccgcgactggtgcccgtggacgacatgaccgacgaggaatcgcgcgacgagcgctatggcttcatcgccatggaaaagctcatcgccgcacatctggaatccctgttccccggcatgatcatcaaggaagcccgatccttccgcgtgacccgtaacgaagacatcgacgtggaagaggacgatgccgagaacctcctcaacgccatggagaaggagctgctgcgtcgccgcttcggaccgccgattcgtctggaaatcacagacaccaccagcccgttcctttcccagctgctcgccgaccagctcggtgtgagccaggacgaggtgtatcgactgcccagcccgctggacctcacggtgctcttcgagctcggcggcgtggatcgccccgacctgaagaaccgcccgttcgtgccgaccacgaaccgtcagatcgccgaggtcgagtcctcccgtgcgcaggacattttcgccgccatccgcgagcgcgacatcctgctgcatcacccctatgactccttctccacctccgtgcaggccttccttgcgcaggctgccgcggatccgaaggtgctggccatcaagcagaccctgtaccgcaccagctccaactcgccgatcatcgacgctctgattgacgccgcccatgccggcaagcaggtgctggctctggtggagatcaaggcccgcttcgacgaggacgccaacatcgcctgggctcgcaagctcgagcgcgccggcgtgcacgtggtgtacggcatcgtgggtctcaagacccactgcaagctcatcgaggtcgtgcgtcaggaagccgacggtctgcgccgctactgccacgtgggcaccggcaactacaacccgaagaccgcgcgactctacaccgatctgggtctgctgacctgcgatccggtggtcggtcaggatctgacccgactgttcaaccagctctccggttacgcgccgaagtccagcttccaccgtctgctggtggccccacgtaccgtgcgcaccggcctgattcagcgcatccgccgcgaggaggacgctgcacgcgccggtaaggaagcgtggattaagatcaaggtcaactccatcgtggatgagaagaccatcgacgccttgtaccgtgcctcgcaggccggtgtgaagatcgacatcgtagagcgcggcatctgcgccctgaagcccggcgttcccggcctgtccgagaatattcgcgtgcgttcgattcttggccgcttcctggagcactcccgcatctacgctttctgcaatgcggacggcccgcagattggcgaaggcccggcttccggcccggaggtctacatcggttcggctgacctcatgcaccgtaaccttgaccgccgtgtggaggctctggtgcgtgtcaccgccccggagcaggtcgacgggctcatcaagtacgtggacctgcagatggccgactccaccatgagctggcacatgcagcccgacggcacgtatgtgctgcacaccaaggacgacgagggccgcccgctggtcgacagtcaggaatatctgattcgcaagcaccagcgccgccccaattcgcacaactgatttcattcgatgctccctgtcagcacgagctgactgagggtggttacgatgcccggctcctctttcgagaggatgccgggcatcgttgttcagcgcgcaaaaactacgtagcagcggtccaacgcgacctacaatacaagagatgggtacgaacagtatgagacgaatcgtggaagccgccggcggtattctgtaccggtggaaggatgatgccgagccgacgcaggcatcgtctccatcagcgaaatccaatattgccaccgatggcaccatcatcgcgaacaccacggattctgacggcaaggccacggcagcacccggcgcatcggacgcggctcccaccccggacccggcgcaggccgacagcccggccgcggcggacaacgtactcaaccgcatcgaactgtgcgtcgtgcatcgcccgaaatacgacgactggagctggccgaaaggcaaggtcgacccgaacgaatcgcaccggcatgccgccgtacgcgagatcggcgaggaatcgggcctgtccgtggaacttggcccttatctgggcgacatcgagtacccgctgtccgaagaaggcagcaaacagcgccataccaaggatcggtcggcggataccaagcatatccagttctggatggccacgccgatcagcgccatcgacaacctgcggcgtacccatgcgtttggcccggtgcatcgggcggacatcggcgaaatcgacgaagttttgtggctgacgccggccgaggcccgcaagaagctcagccattccaccgataaggacatcctcgcgctattcgttgatcgggtcgaagaaggtgcactggacgcggtgccggtgattatcgtgcgccacggcaaagcggaagcgcgcaagctgtggaagggttcggacgcgaaccgtccgatcacgccgcgcggcgcggctgcggcatacgcgctgaaccgcgagctggcgtgtttcaatccgacccgactggccacgtcgccttgggtgcgctgccaggagacgttggagatgttcgcgtggcagaccggacgagacatggttcatctcgatccgctcaccgaagatgcatacgccgctgcgccggacaccgcatgggagtgtctactcagcgaaatcgagttcgcacttgagcgccgtcagcccatagcgatatgcatgcaccggccggtgattggtggtatgttcggacacctgcgcagcatgtgcgttgcgccgtctttgagcaaacgcctgatcgccaagacaccgttcatgccgaccggcacggcggtggcgctgttcgtcactccgacgcctcatggtcccaaaatcatcgatattcagaaggttcaaccgcttgtctactagacccgcatttcctgattcatccaactcctcggccgctgccgccgcggctcatgccgcgcacaatggtgccgccggcagtctgggcccgggcttcggctcgttgcgtgcggccggagcggcattcggacctgctcgcatgggttcttcacgcccctcgcgcccggctcagctcgacccggctgtggccgatggattggccggtggcatggacccgcaggcgttgagcgagatgagtcatctgtctgctgccgcattgctggatcgtgtgcgccatagcgaagacccggcggttgttgagcgggtgctcacgttggtggagacggtcggcgtggatgaaatcgccgaactatggagcgatgccgagccggattcgctgcctggtgtgctgtggcgactgtatatgttgcgtacgtggatgcgatcgaatcgcgactcgatcgcgcatctgtggcgcttgggtgagccggtggccactaccgcctccgccatcgccggcgtggatcaggctcccagtgaagatgacatcgtgcgattggccgattcgattctctccggtgcttttgtgggcgattttgccgtggcgcttgagcgtgcggcggcgtttaccgatgtggtggcgttgggcttgcgcgtggaggcgcggcgcatggtgacccgggccgaggccaacggcgccttctcctcggatgccgatgagaaggccgtgcgcaccaaagccgcccgccttatgcacaccgccggcagcctcatggccaccgccaaggatttccagcacggtgccaacctctggcgtcgcggacggttggagtagccctgctccaggctccctctgatgagggagctgtcacgggcgatgcccgtgactgagggagagacccaccaaccgcaccccaacaatcagctaccaaccaacaccacacctcccccggcgcggcgagccccatcgcaagctatactaagtatccgcgtcggaccgtgcttaagccccgggctccattttttgccgccgcgagcggcccttgcgccgacaggcgctttcgcggttcggcgcttcttttcttttacccgattcacgccccgaacgttgcgatgggcacgaccagtataccgtcattgcggcgataggccttcccacctcggccggtaaggaacatcatgaactctggttcgcgaacttgggccatggggttgccacagattttgtcgcggaaggatttgagcttatccgcattgtcatcgttcaccttaaggtcactgagttttatttcgatagcaccccacctgccgtcagacaactcgataatgacatcaacttcaagccccttgtcatcgcggtagtaggcgatgcgattgttcgcgcccggcatggccgacagatatacattcaaatcacgaatgcacagcgtttcaaacagatcgccgagcgtctgtgtatcgcgcatcagagtattcggcgcggcacctaaaaccgcagcaggcaacgaaggatccacgaaatatcgcttgggcttggttcgcacacgactctttgcgcggagtggcggctcccaaccctccaaatccgtcagaaggtacaagtccttgagcattcccaaatagctctttactgtctgcgtatccggttcacggcgctcatcgccataggccatatccgcagccagcgtcgcatattttggtgcctgcgatacgttcacggcgagcgcacgcatgagtgcacgcgcggtttcagggttcttgttcatcttgggcacgctgatatcaagcacactcttgatatattcactcggaatttccagagcaaactcgtcatccaaatcaagatttgcgggccacccacctcgacagcaccatctggcaatatcttcaatgctggttgcacattcggcaggctcgaattgtccatcaaacaaaccagacaagctcactacaccggtagattgccctgactcgcacagactcataggccacatacgcaagcgagaaattcgacctgtgccactgtggtgaattgtttctcggtccttcggaatggccgagcccgtaagaatcagctgccccttgcgattcgcattgtcatccacatgacgacgagcggcatcccaaatttgcggcacatcttgccactcatccaccaaatgcggttcattacccatgagtaccaatgccggatcagtctgtgcggccgcaaaggtagcggcatcatccagacgatccatacttcgcgagcgggaaagcgccgtccatgtctttccacaccattttggcccgacgatttccaccgcgccgaatgctttaagtaacttacctaacctgccatcgaccacgcgagcacgataatcaggttgagtcaaggtatcactacgattgttcaaatcgttcattttccggcctttctcagctacccaatcacctcaatatagattttacacctttctcattcccggttttacaccattccgattcccggttttacaccattccgattcccggttttacaccgcaaggtgtctagtttcttcctatgacttaatccaccgagaatcaatccaacgaatcttcgcgcacgactgcgagcgctaggccaaacttgacccattccgatgagacatatttcacaataccgtagctttttcagctggtttccagaaaccgttgacttactgtccggttcggcctagatacgctctttttcgaatctcatgaaatcaacgtcaacaccttggggaaactctcatgaaggcaaccatcaccaaagcgactatcgcagttctcgccggactcgcgatcctcgccgatgcctttctgcttttttcgatgaagatatccaatagacgccacgtgaatgtcattgccatagtgacggatgcacgcgcacgatgcgagcgtcgagccgctccacgatgtcgtggtgatgcgtggagaacagtacagtcttgccggcatcagtgaaggcgcgcaatacctcaaccactacgtcagtattgcgctcgtccaagccgtcggtcggttcgtccagaacaagcaggtccggattcatcgacatgcagcaggcaatcgccacacgctttttttcaccgccagacagacggtatggcgcccgctcccgcatccgatccaagccgaacaacgtcaccatgtcatcgactctgcgctgtacttcggcatccggcaaccccatctgcaacggaccgaacgcaatctcctcttccaccgacgggcagaacagctgggtgtcggagctttggaacacgaatccgatgcgctgatgcagcgctttggcgaacaggctgttcttcgcctcgacttcctcgcgaaccaccggagtaccgccaaaccgatactcgcctgagtccggaaattccagcgcattgatgatgcgcatcagcgtggtcttgccgctgccgttcggcccgagcagcgccacgcgctcaccgcgttcgacggtcagcgaaaaatcacgtagcacggcgtgcgacgaggtttcatcgtcggcgtcgccgtaatctttataggaaaagtcgatgtgattcagttcgaccagcgggtcgccgcggaaccatgagttatctggctgcatggctgcagtttgtttatgattacgctttaatccgaacattattgggctccattcattcgaaccaccctcatcccgaatacaccgccagcgcaatcattgcagcaatgcacacggcatacaccccgttgcgccacgtcagcagacgctcgtggtggatatgatacgtaccgtcaaacccccggcacaccatcgattcagccatttgccgcgcctgcgtattcgcacgcagaaacagcgcgcccatcaactggccggcggacgtcagcttggtccggtcgcggcccacgctgcgcaaccgcagcgcatccagcaactccaccatcgaacgaccgagaatatcgatgaactgaatcgtcacgtcgcagatataaatcaccgaatcagggtagccaactgcgcgcagtccggcaatcaggcgattccacggcaccgtacgcgccagtgcgatcaccagcgacaccgccacgaacgcacgcaccaccagccggaccggcgcactgtactgcccaatcagcaggctcggcaccgccacgaccaggctcaggatgcatacggccagcaccgggccgagcaacgctctcatcaggcgcgccggccgggtcgccatcatcagcagcaccaccgccagcatgatgtacgagaacagcatgttgcatgtgatgttgacgcagacaatcgcggccagtatgcccagcagccgcacgcccggattgaccgagcccagcaccttgtcgaccgggctcgactcaatcggcaacgcatgaccaacctgctcgagtacgctgccgaaatgccccaggttgtgttcgatgaaggatgacttgtcagccggaggatcgtaatcctccgactcacgcatccatgcaggtatcgtcaacgcgcggatgtcttgccgttgccgctcaccgcgagcgccagcagacggaacacgatagtgagcacggcgatgccaatcactgcggagagaatgtagccggcgatgtccggcagaccctgcagcgagtagtcaggcaacagcgcatcccacgagaagccatgggcgatgtactgcggcacgtagttgagccccgtggcactcatgaagtcctcggcgccccactcgccccaggcgtcgccggtggcgagcaggccgatcggggaaagcaccgccaccacggccagcgcaatccacgcagacttgcgcagtccggcgtgcgcgacctgtttgccgtcagcaccggcggtctcggcgaagttcacacgggcattgtcttcgataatctccggtgcggtacggcgcacgaattcgacaaccaccacggtcaccagaccctcgaccacgctggctacggccaggtgcgggatcagcatggcgggaatcgtcacgttaaaggtgaacgggaagtagagcgcctggccgtcagcggctttgaacagcagcggctgcacgccgagttccagcgccacgcagaatgcggcgagcgtgatgccgatatagccggacacgaattcggccacgcgttccttccagccgtcgggcagcaccttacgtagcaacacgtacagtccgtaagccacaaacggcagcacgaacgccatgttgaagcagttggcgccgagcgtgatcagaccgccgtcgccgaagagcagcgcctgcagcagcagggccaccgacacggcgaccgtcgcgtactggggaccgagcagcagagcgatcagcgcgccgccgacaccgtgcgcggtggtgccgccgggcgtgggcacgttgaacatcatgatgaggaacgagaacgccgcgccggcgcccaggtaggccatcttctccggcgtgctgttgcggatcacgtagcgtaggcacagcacccacaccggaatcatgatgacgtagaacaacgccccggtggacggcgaaatgaaattatccggaatgtgcatcgccaatgtgacggtgtcaggtacttcgattatatccaacttccctctttttgttgatttcggagctcgaccacaacctcccgctccaggaacgtgatatgtaatatcacaactgtgattcgtctaatgcacaaccatgcaaaatagcttgcaattactagcgacacaccgtgtaccatatatccggtttccgtgttttcggatatttttccgctatattttttgcatatttcgatcattcgttacaaagtgacgcaacaggctctctacactgtggcatgaaggacgtggggattctcacgccacaagcaattttctccaaggagaacggatgatcgccaaagaaatcaccggcaacatcatcagtcagcagtacagcgacggcaaacttaatgtgtcgattgccttcgactggttcgaaaccgataagaagcgcatgcgcaaggtggccgaggacggcaccgagttcggcatcatggttggcaagaccatcaaggatggcgatgtgctcgccgaaaccgaagacaagcgctatttcgcacgcattaaaaccgcacagctgattgagattccggttaactcgatgaaggaaatgggacgcctgtgcttcgaactgggcaaccgccacctgagtctcaaggtcgagaacgaccgcgtgctggtgccgtacgaccatccgaccatggaatacacgaagaagatcggttatgaaccgcatatcatcgagggtgggtttgacggcttcctgatcgtcaaggcccacgccggcaccggcacactgattccgggcaccaacaagaccacgggcgacgtggccgaggaggagcaggaagccgaggccgacaaggaattcccggccgaggaggccgccggccatctggatgtgcatacacacgacgcaggtgagggtgagcccgccgaatatgagatgaacggcgtgctgcaccgcccggacggctcccacagccacgacggcggccgcacctggcacacccactgatagccccatgaacatcaacgaaaccgaatcgcgacgtctggccatgctgcaggtgtgcgacagcgtcttccccgtgggcgcgttcgcgctgtccaacggcatggagaccttcgtacagcgcgacttcttgcgccgtggcgccgatttcgaggagtatatgaagaactacctcgaagtcgcaccgtacaaggaaatcgggcagatggtgctggccggcaagtacgccaccgattcgcgagtctcccgcaaagggctggccgagcgactcatcgaacttgacgagctggcctcggccctgcaatccgcacgtgaaatccgtgaaggcagcgagcgcatgtgtacccgcctggtcaagctggccgagcagatggatgccggccaggcgcagacctcggatgggcatcgtgggttcgccaagccaagtcctgccgacaatgccaccgcatccgctgcggattcgcgcgaaaacagcatcatcgccgtgcacgagcatcacaccgaacgccaccagctgcacgatgccgccgacggcctgtacggctcgccgtcgctcgacctgtatgctgggctgattcgcgagcgccgctgccgtggcctgcattcgatcgcgatgggcctgtacgcggctgaccatgcgaacgacgtgcgcgacgcggccatcatgtatggatattcgctgttgagcgcgcttaccatgtgcgccgcgaaggcgattccgctcagccagtacgctggccaagtcgccctgcatgattcgttcccgcgcctcgtgcgcgcggtgaatatcgcgatgacgttgaagcccgaggatctcggcatctccggagcttacctcgacatcgccgccatgcagcatgaaatcttgtactcgaggctctacatgagctaattatcctggctcccctcaaggaggggagccaggataacctcacccgcaaaccacatacctaactaattcccacataaaggagaaaccccatgtcatacgtacgcatcggcgtcgccggaccggtcggttccggcaaaaccgcgcttatcgaacgcctgacccgcaagatggctgacgaatacagcatctgcgtggtcaccaacgatatctacaccaaggaagacgccgagttccttatcgagcactcacgcctcgcgccggaccgtatcgtcggcgtggagaccggtggctgcccccacaccgccatccgcgaggactgctcgatgaacctcgaggcctgtgaggaaatggcccgcacccacccggacgtgcagatcatgttcgtggagtccggcggcgacaatctgtccgccacgttcagcccggacctggccgacgccacaatctacgtcatcgccaccgatgagggcgacaagatcccacgcaagggcggccccggcgtcacccgctccgacctgctggtgatcaacaaggccgacctggccccgttggttcacgccgatctagacgtgatggcccgcgactccaagaagatgcgcggcgaccgcccgttcatcttcaccgacctgatgggcggtgccggagtggacgacgtcatcgcatggatcaagaagagcgtgctgttcgaggacatgtgatgttttggcccgcccgtatccaaaaacggacgggccgaaacataccgttgcaccaagtgcggcataattgcccatgtcatcgtcaggcaccaatcataagaaggcagcgattcgtccatgggcagtagcacttttcgtctatccactgcattccgccacggacgtaccaaaatcgacgatatttatttcgaggcgccgttcaaactgatgaccccgttcaccaacggacgtcattcggatttcgtcgtgatgctcgcctcccctggcttcctgaggggcgatgaagcccatatcgatatcgacttcggcccaggcaccgattcgaccatcaaaacgcaaagctacgagaaggtgttcgacaccgcggacggctcggccgaacgcaccatcgaactcagggcgcgtggcaatgccaaagccgtgttcctgccgttcccagtgattccgttcaagaacagctcattcatgaacctgaccaccgcgcatatttccgccgagtcagcattcgtgtatgcggatgtggcgacatgtggccgcgttgggatggatgagcgttgggccatgaaacgttttacgaatcgtatgcgcgtatatgtggccgaacccgaagccgtgaccaaggccgccgcagccgaattggcgcaacagcacgcacatcgccgaggccggccttccaaggcggaagccgccgctgcccaaccgcgcgaacatctggcctttgctgaccgcatgctgttggaacctgatgcttttgactacaccgaactcggcatgtggcgcgaattcacccactgcggcgttctctacgctcacctgcccgaactcgaccctagcgacgctgtacaagatgccgcaactaaagaagcatcctccgccgccatccgcgagcgcatcgagactgcccgcatcgccgccgaagacgcgctcatcactcgcatccacgaacacgcagacgccatcggcttcaccggcgagctcggcgtgagccgcgtaatcaatggcatctgcttgcgtgtactgaccacccgaggcgacgacgccttcgacctcattcgagatgtggccgatttcgtgaccgatttcgtggccgaaggctaaaaccaagtggctctcccctttgaggagagccaccagttctctcagaacaggaagtaccgctgggtaagcggcaactcgtacgccgggtcagagtggaccggttcgccgtccaccgtcacttggaaggtttcgggattgacctgaatgtcggcgagcacgtcgttgaacttcagatccttcttgcctaccgtgcggcagccatgcactggtaacacctggcgctgcagctccagcttgcccttgatatcgtcatccacggcggcctgcgaaacaaacgtggcgcaggacttgccaagcgcacggccgagcgcgccgaacatatcgcggtagtagacaggttccggggtcgggatagaagcattcgcgtcacccatacgagagtaggcgatggagccacccttgatgaccatttccggcttcgcgccgaacatggacggctgccaaagcacgagatccgccatcttaccgacttcgatggagcccacgtattcggaaatgccgtgggtgatggccgggttgatggtgaacttggagacgtagcgcttgacacggaagttgtcgttgcggttgttgtcgtgttcgtcttcggggagcggaccgcgctgcttcttcattttgtcggcggtctggatggtgcgggtgatgacctcgcccacgcggcccatggcctgcgagtcggagctcatcatggagatgatgcccatgtcgtgtagcacgtcttcggcaccgatggtctcggggcggatgcgcgagtcggcgaaagagatgtcttcgggcacattgcggtcgaggtggtggcagaccatcatcatgtcgagatgctcgtcgatggtgttgcgcgtgaacggcatggtcgggttcgtggaactcggcagcacgtttgggaagccagcggcacgaatgatgtccggagcgtggccgcctccagcgccttcggtgtggtaggtgtggatggtgcggcccttgaacgcggcgatggtgtcttccacacaaccgccttcgttcagagtatcggtgtggatagccacctgcgtgtcggtttcgtcggccacgccgagtgcagtgtcgatgacggccggggtggcaccccagtcctcgtggatcttcaggcctgcggcaccggcgcgaatctgctcacgcaacggttcggggctggagtcgttgcccttgccaaggtaggcgatgttgatgggcagcgcttcggcggcctcgatcatgcgggtcaggtggaaggctcccgggttgcaggtggtggcgttggtgccgtcggccggaccggtgccgccgccgaccatcgtggtcacgccaccggcgagggcagtgcgaatctgctgcggggagatgaagtggatgtgggtgtcgagtccgcctgcggtgacgatgaggccttcgccggcgagagcttcagtgccggagcccgcttcgagaccgggggtgataccgctcatggtctgcgggctgccggccttgccgatggcgctgattttgccgtctttgatgccgatgtccgccttgtagataccggtgtagtccacgatgagggcgttggtgatgatggtatccggcgattcaacgtcgagctgcacggagctttggcccatgccgtcgcggaatgatttgcctccaccgaacttcagttcatcaccgtagtgcgtgtagtccttttccacctcgatgatgaggttcgtgtcaccgagtcgcacgcggtctcccgtggtcggcccgaacattcccgcataatccttgcgcgtaataatcttcatgtcaaaagtccttgctgtttttcagctccccttgtcaggggagctggctcgcgaagcgagactgagaggtagtccgctccccgctggcgggagctgtcagcgaagctgactgagggtggcccttagctcagattcccgagaatccaagctcatgcgccttcttaaacgcggcctcccgcacctcagggtcatccaacttcccctcaaccagtgcgctgaagccgtgaatctcacgcgtgccaccaatatcaatcaaccgcactcgatgcgtttcacccggctcgaacctcacagccgtaccagccgcgatatccaaccgcttgccatacgccgccttacggtcgaacttcaggtacttattaacttcaaagaagtggaagtgcgaaccaatctgaatcggtcgatccgcagtgttcaccacgtccagctcgatgtcttcggaaccttcattgagttccaaatcatcgtcagccagcagatattcccccggcaccaacttctcggtggattcgatggggttatgaatagagacgagcttggtgccgtccgggaacgtggcctcgacctccaccacttccagcatctcggccacgccatccatcacatcttcaggcttgagcagcgtgcgaccgtatgccatgagctccgccacagtgcttccctcacgcgcccgctcaacgcattcggcggaaatcaacgcaatcgcctccacatagttgagcttcacgcctctggctttgcggtctttggcaagctgccccgccaagtacagcatcaacttgtcagtctctcgtggtgtaagtctcataacatcctctgttgttgactggagtttttcaggcacaccaatgtgagccctaacatcgcccaataataagagcgttataagaacgggacgtttctcataacgctctatggccataaacgggggtcgaatcaatcacactctcatggattccttggcggcttctacttggtcggggccgccttcgccggtggcgatgaaacggccggaggccaggacgtagtagcggtcggcgcgctcgacggcgaattggaccttctgctcaaccaagaccacaccgatacccttgtcttcggccatcatgcgaatggccttctggatttcggcgacgatattgggctggatgccttcggtcggctcatcgagaatcatgagcttggggcgggtgatcagcgcgcgggcaatcgaaagctgctgacgctggccaccggacagcagaccggcacgtcggccagcaaattccttcaagaccgggaacatttccacggcttcgtcgtaacgggccttggcctctgaaccgtagcggtcggcgaccacgtgcaggttttcgtccacggtcatggtgccaaaggactgctggccctgcggcacgaacgccatgcccttgcggatgcgttggttcggtgcagccttggtaatgtccttgccctcgaaactaatcgaaccggacgaaacgggcagcaagcccagaatcgccttcaacagcgtggtcttaccggcaccgttgttgccgacgatgctcacccattcgccggcggccacgtcgaaactgatgtcgttgacgacggtcactttgccgtaaccggtgttcaaatcctttacttcaagcattgccatgattattcactttctacggcgtcgtgcatattgatgttgaggcgcgttgtatcaccctcaatatgcactgaaaaagcgcattccgggatgcgatggttgttgtcagtgcggtccatattgcgcttcttcctcttacctactcccctcagtcaccttcggtgacagctcgtccgcaattaaggacgggccttgcctgcaacctgctggttcgactatcgtctcgccttcggctacaaacagcccaccgggctgtttgcttaacgcctcggcctcagggaggggagacagggagttagttttctccgccgcccaggtagatgcggactacttcttcgttgttttggatgtcttcgaccgaaccctcggcaaggatttcgccctggttgagcaccgtgaccgaatcggcgaactgacgcatgaaatccatgtcgtgttccacgatgatgaccgtgcggttcttgctgcatcgcttgagcagctcaccggtctgcacacgctcggccggagtcatgccggccaccggctcgtcgagcagcagcaggtgcgcgtcctgcacgagcagcataccgatttccagccactgtttcttgccgtgcggcaggatgcctgcgggcttgtttgcatccacagtcagattgcacacgtccatcatgtattcgatgttctgcgaaacgccgcccatcggctggaacagctcacgacccttcttgcggaagccctcggccagctgcagattctccaacacggacagctcttcaaccaccgatgcggtctggaaggtacgcccgacgcccagcttgacgatgtcgttcggcttgcggcccaacagctgctcgccacggaattccgcggaaccagtggccggcaccagtccggtaatcgcgtcgatgatggtcgttttaccagcaccgttcgggccgatcaggaatcgcaaatcgccgtgctgcacagtcaaatcaagattcttgacggccacgaatccatcgaactcaacgtgcagtccacgaacttccagataatcgctccactggccgccgcgatcatccagcaccgcaagctgatcgtgcagcttcgtacgctcttcaacgatttcggccttcatctgggccgcttcgtcgcgcatacgcttggcttcgtcgcgcatctcaatcatttcggcgcgcaactgctccaaatcggcctgcgatgcaggtgcgggagccgatggattcgagctcatgttcttctcctcactcatgcgttcaccgcctttgcagtagcagtaccggtaccggcaacggcaccagcaccagcaccagccgaagctccaaccgaactctttccgagcccgatcttctccttaatccaaggccatacgcccttgaactgtcccaagcccttcggcacaaaggcaatcaccagaatgaagatcaggccttcgatgtacgtccacgcggacggatacgcctcagacagctgcgtttccgcaaagcgcaccagcagcgtgccgatcaccgggccgagcaaagtggcacgtccgccgatcaccacgccggcgagcatcaggatggacggcgtcacgccgatatcggacggcgaaatgatgccgaccactggcacgaacattgcgccaccaatgccggcgaacattgcagccaccgagaaggcgaacaccttgatggaggcggggttatagcccaagaacttcatgcggttctcttggtcgcgcacgccgataatcaggtcgcccataaacgatttgcgaatccagtagacgataagcaccatggccagcgtcaggaacgcgcagatgtagaagatcatctgcttgttggcgttatcagtcaagtcgtaaccaaagaatcccttgaaatcgttgagaccgttggtgccaccggtggttttcgactggccgataagcagcacggcgaacgcggcaaccagcgcctgcgaaagaattgcgaagtaggcgccacgcacgccacggccgaacacagccagaccgaggattgcggcgataatgcccggtaccgcagccacgccaatcacggcgatgaccggattgcggaagagttcccagaatccaggaaccttggtgatgccgtactgggacatgaagtccggcacttggcccacgccaatgtcctcaagcttcatgtggatagccatcacgtacgcgccgagaccaaagaacaggccttggcccagcgtcagcataccgccttggccccaagccaggccgatgccgaccgcgaccatcgcgtagcacaggtatttggacagcaggccgaggttgtacacgctcagcacagtcggagaaaggaagatcagcgccacggcaatgaccacaccgatcaaagccttatatttcgtggcgtattcgctcaaagtcatcttcattgtcgtttccttacccttctgaagcactcacgcgaggttcctggagcggatggagaccaagccctgcggcctgaactgcaggaacaccaccacaatcaggaacacggcaacctgaccaatcgaggcagaggtcggcagttcgatggacgactggcacaagcccagcacgaacgaggcgataaccgcgcccttgagctggccaacgccgccggccacaacaaccaggaaggcctgcacgatgaaggtcgtaccgaagttgaagctaatcgagttcagcaggctcagcgccacgccagcgataccggcgatgccggagcccaggaagaacgtcacatggtcgaccatcttggtggagatgccggaaacctcagcgaggtcgcggttctcggaagtggcgcgaatctggcgacccagcggcgtgagcttcaggatcgcgtacagcgcagccacgcagataatcgacagaataaagatgaacagtcggcctgcagagaagctgtagccaaagatggtcaccggattggtcagcgcttcaggagccgaagcgtagaccggagtggcaccgaaaatatcgcgtgcgagctgctgcaataccagcgatacaccgaaggtaaccagcagcgtatcaagcggacgattgcgcatacgctccagcagcaacacgtccagcagtaaaccaagcaaaccggctactacgaaaccgaccaccagcgccacggccagggacactgttttattgccgatgaccatgctcatgacgtatgcggtgtatgcgccggccatcatgaattcgccgtgggcgttgttgataacgcccatctggccgaaggtcaacgacaacccgagggctgcgagcagcagaatcgatccgttggacagacctgccacaatttgtggaaataacatacccatgttgttgtgtcctcttctctcagttgctctcgacgctggcgctcaggctcttggcccagctgtaggtcttcaggtacgggtccggcttgatgggaccgtccgacttccagacggtgtggatgagcttgtctgagccgatcttgccgatgtatgaggtcttgtagatgtggtggttttcgccgtccaccttgaccttgccttccggtgcattgaaggtgacaccgtctgctgcagccttgaccttgtccacatcgaacgacttggccttctcgaccatgcccttccacaggtacacagatgtgtacgccgattccatcgggtcggaggtggggcgattggctccgtagcgcgccttgaagttcttcacgaacgtcttgttttgcgcattgttcagcgtctggtagtagttccaagcagtgagctggtccttgacgttgtcaacgccgatagcggaaacctcttcctcggcgatagacatggaaatcaccggcgtggtggcggctttcagaccggaagccttgtattccttgaagaatgcgacgttggaatcaccgttcagcgtgttcaccaccgcatccgcgccggagaacttgagcttgttgacgatggtggtgaagtcggtggagcccattggggtatattcctcgccgaccacttccatgccattgccctcggcgtacgccttgaccacgcgatttgcggtctgcgggaacacataatcggagccaaccaagaacagcttcttgtagccttgctccttaaggtaatcaagcgcaggcacaatctgctggttcggggcagcacccgagtagaagatgttcgggctggcttccatgccctcgtattgcagcgggtagaacagcagcgcgttatccgcctcgaacacaggcagcatggccttacgcgaagaggacgtccagccgccgaacaccgcggccacgcattccttttcgatgagggtcttggctttttcggcgaacacagccggctcggacttgccgtcctgctgcactaccttgagctgcttgcccagcacgccgccctttgcgttaatctcatcaacggccatgtgcagcgaatcactcaccgtctgttcggaaatggccatcgtgccagacagcgaattcacgaaaccgattttgatggtgttgcctgaggtgtccacacatgatgaggtgtcgcttgccgcagtcgcgttgttctcttgggcctctttctcggccacggtgcgaccccagccacaaccgctggtggcaagcactgcggcaacaatgcacaccgcagcacccatcttcagtctttgcaatcgagtcatatgactcttcctccccacatacgactacattccgcgaacgttgcccgcccgcggaatgtctacgctgattgccgtaccgtgccctgatgcctgatatcgtgctgaaccacttgccgtatatcgacggctggcttccggccgactgcactatacgatggcagtgcctgcgtgaatttccgttgcctgaatatttcatatgcgtctcatacataacgctcacgttacaaaatcaacggtgttacgcggcccgccgtcgaacgctgtttacattggtgtgcgatacgcgcgcgactgccgcccaagtgacttccccgcgaactacgggtaggctggggagtatggaacttcacgttttgaatcatccgctggtcgagcacaagctcaccgtgctgcgcgacaagaacactccttcctccactttccgcgagctcgtctcggagcttgtgatgctcgaggcctatgaggccacccgcaacctgtccgtagttgccgcaccaatcgaaacaccggtcgctccgatgaccggtaagaagctggccaaaccgcgtccgatcattgtgccggtgctgcgtgcaggtctgggtatgctcgatggcatgacccgtcttatgccgaccgccgaagtcggcttccttggtatgaagcgcgacgaggaacaccccactcagcaggtcacctatgcgaaccgtctaccggaggacctgtccggtcgtcagtgcttcctgatcgacccgatgctcgccaccggtggcacgctggttgctgccacgcactatctggccgagcg

SEQ ID NO: 603 - DNA, 11083 bp, Unknown
  R14_15m  MAG No. k141_2547
atggtgttgccggccagcagcgggcgcacgccttccggcgtgaagcgcagcacgtattcggtgaccttctgctcggcctcggccaggctcaggccattctcccactcgttgatcaggccggaacgggtgtgcatctggcgcacgaaatcgttcatgtggttcacagccttctcggacggcttgatgacgtaatccacgccctcgtccagcacattcaggtcaaagtcggtgggaaccacagacacctcgacgagttcgtcgccgccgaagatgtcaagtccggtcatctcgcaatcgatccaaatcaggcgcgagtccttcgcgctgtacgtttccgcgtcatggctgtcgaccatggtgtgcctcttttcttcgctggtcatcgcttatgcagaacagttcagactataccccagcgcatacaagctatctcgagccacatacgcgaaaagggcctgcataagcagacccttttcacaaggaatcaacccctaactagcgcaagctagcgggcatcaaccgatcagttgttgtggaagccggagtagttcggggcttcggcggtcatcacgatatcgtgcgggtgcgattcgcgcagaccggcgtcggtgatgcggatgaacttgccacgctccggcatctcggcgatgttgtgggcgccgatgtagaacatggactggtgcaggccaccgagcatctggtagagcacggcgttcagcgggccgcgatacggcacttcgccttccacgccttccggcacgaccttatcgctggaggtcacgtcggcctggaagtagcggtccttggagtaggacttcttgccgcgcggggccatggcaccgagggagcccatgccacggtacagcttgtactgcttgccgtgcaggagcaccttctcgcccggggcttcctcacagccggcgagcgtgccgccgagcatcacggaggaggcgccggccacgagggccttggcgatgtcaccggagtagtggatgccaccgtcggcgatgcagggcacgccagcggcacggcaggcctgggcggcctcgtacacggcggtgagctgcgggacaccgacaccggcaacgatacgggtggtgcagatggagccggggccaataccgaccttgacggcgtccgcgccagcctcaatcatggcctgagcaccggagcgggtgccgacgttgccgccgatgatctgcacgccgtcgaaggcggagtcgtgcttcaggcgggaaatcatgtcgagtgccagacgagcctcaccgttggcggtgtcgaccacgagcacgtccacgccagcctccatcagagcggaggcacgctgccaggcgtcgccgaggaagccgacgccggcggccacgcgcagacgaccctgctcatccttggtggcgtccgggtactgctcggtcttgacgaagtccttgacggtgatcaggccggtcaggtggccttcctcgtcaacgagcggcagcttctcaaccttgtgctgagcgagtagacggtgagcgtcgtccttggagatgttggacgggccagtgaccaggttctccttggtcatgacatccttaaccttcagggtgtcgtaatcctcggaggcgatgaagcgcatatcacggttggtgatgatgccgacgagcttgttgtccttgtccacaaccggcagaccggagatgtggaacttgccgcacagcttgtcgaggtcggccagcgtgacctcggggttgacggtcagcgggtcggtgatcataccggactcggaacgcttgaccacatcgacctgagcggcctggtcgtcgatggacagattgcggtgcaacacaccgatgccaccgttacgagccatggcgatggccatctcggactcggtcacggtatccatggcagcggagaggaccggggccttcatcacgatcttgcgagtcagatgagtgctggtgtccacttcggagggaatgacatccgtctcgttcggcaacagcagcacatcgtcataggcaaggccgagcttggcgaaaatcgggggaaggggagcatacgccgactgggcgtttaattcatcaaggtttgtagccatgtaaacactatatgaaaatgcgctgaccttcacgacacacgcttgtgagcgctcacttatccgctgccgggtcctgcacctcacccacctgcgagtcccgcgaatttgcaggcgaatcagtcatcgaatccgctgcctgagagccaatcgaatcccggctctcccctactgcagactgcgatttaggcactgtatgctgcgcgtttttacgtgcggattcgaacgtcaggttctcggcttggatctcgggaatacgatgccgcagataggggtacatcgtggctatggtcagcaccaccacagcgatggccatgcccacggccacgtgctgcgctttgaagaacagaatcgtcagcgaaccgaatgcgatcaacgcggcccatccccacagaatcagcacggcgccacgcaccgaatgcccgatcttcagcatgcgatggtgcaggtgcatacggtccggatgcatgggcgactggcctttggccaaacgccgcacaatcgccagacacatgtcgagcacaggcaggaacaacaccagaaccggcagcagaatcggcatgaacaccggcagatagatgctggcatgaatcgaggccgggtcaagacgtccggtcatcacaatcgaagcgcaggtgatgagatagccaagcagcatcgaaccggaatcacccatgaacagtttggcgggatgccaattatgcagcaggaagcccacgcagatacccaccatcatcacgtcgatcagcgtggccaacgaagcataactcggggaagaccgggcgatgatatacgaataggcggcgaacgctatgccaccaatcgccacgataccggccgccagaccatcgaggccatcaacgaaattgaccgcgttgatcgaggcgacgatcaggaatgcggtgatcgccatggacagactcggcgaggcggtaatcagcgaaccacccaaaggcagtgagatgatctgcaatccgtcccaagccacgaatacggaaatcagcagctggccggcgagtttcagcatccaatcgagatcccacaggtcgtcggccatgcccagcagactgatcatgatgccgccggcaagaatcacccacatctggtaattgccgttgaacaatcccgagagaaaaggcagccgactggcgaatacggtagccacggcaaaaccaatcagcatgccaaggccgcccatgcgcggcgtgggaatggtgtgcacgtctcgggcacgcacctcgccaaccgcaccgatttcgatggcgacgtggcgaatcagcggagtcaccagccaggtgacgccaccggcgatggcggcaatcagtaggtagattctcatgcgccgagtcccccgccgttgaggtggagggccttgcgaatcacgttttgggcgatgacgccttcacgcaggatctcgatgccgtcgcgcgcgtacggatcggctttgacgacggtgctggagacatggccttgggtgggaccgccgtccagatacaggtcgacttcgttgccgaacgcgtcaaccgcctcctggacagtctgtgcgctttcgtcgccggaacggttggcgctggacgcggccagcggaccagtggccttgagaatcgcgaggcacagcgccgaattggggatgcggatgccctgcgtgccggggcgaccatcggcggtgtcggccaaagtctccaacgtgcagtcgggccgggctacggcaatcggcgagaacgcgccgggcaggaacgccgccgacaaacgattcagtggagacggcaggtcgagaccgagttcatcaagctggtcggtggatgcgagcagtacctgcaacgccttatagcgcgggcgacgcttgagccggtagatacggtcgatggcggccttattacgcggatcgcacgccactccatataccgtatccgttggaatgacgaccaatccaccatcccggatgacacgcgccgcttgtgccagcgattcatccgtgactttcagcgttgttccgccctccacgctcacgacacctccgttcgcctgtgtattcacaatctaccattgcaccattgcgccccgacttgcatagttcatcatcgctcgtttgccgtactgctgttttccgattcgccccatacgcacagaccgtagatacaatgagttcatccatgctctttcgcgaaattacaggagtgttcaatgagcggaatcaatgctgaatccaccaccatgcctcccgtcgaactgcgtatgccgcgcgccagcgagcgcgtgttcgccaacttcaacttcactgtgctggattgttgcccggtgacgattggcgagggttgcgtgatcggtgccggctcggtggtgacgcgcgatattccgccgcacaccgtggccgtgggcaatccggcccgtccgattcgcgaaatcacggacgcggacgcctccgccctgcagtattacgcgcagtagcagcggcggccccgcgcctgtggctacttctcggcgaagagatagcggtctcggccggtccaatctttgccggtggaggcggtggcgaaacctgtggccttggcataggccactaatcgttcgccttgggtgagatcatgctccataaccaatacgccgccgggcttgagcaggcgccaggcgcgctcaataatgcgttcagggatgagcgtgccgtctgccgaaccgccgtatagcgccagttccgggtcccagtcgcgtacttctggttgttcggggatgtcggtttgtggcacgtagggcgggttggtgatgacgatgtcgatggtgccgtcgagttgcgccagcgtggccagtgacgtggcgtcggcgacttccagttggtaattggaggcgatggaggggtatcgtttcgcggttaccgccagattgcgccgggtccattcggcggtacgcggggataattcgacggcccatacttggctgccgggcacttcgctgactatcgacaggccgatggcaccggaaccggcgcacaggtcgaccatgcgcgggtggatcatgctgtgccgggtcagccagtcaagaccggcctggactacggtttcggtttccgggcgcgggataaagacgccggggcccacctgcaggtcgaggtagcggaaaggcgtgtggccggtgatgtattggagcggctcgcgtttggcgcgtcgggaaagcatggcgtggaaggcggcaaggatattggtgacggggtcggcctgaccacccccagtcgctgcgcgacagcccccgccggcgggggccagcgaatcgaggccctcccccatcagcatggccttgtcgatatcgcgtagctcggcgtccacggcctcggccagcaacagtttggcatcatgttcgggcgtctcgatgccggcttcgcgcaactgcgcggcggcttgacgaatcaggtcggctatcactgctggttggccagacggtcggcttcgtcggcttggatgtcggaatcgatgacggcctgcaggtcgccatcgagcacggcgtcaaggttgtaggccttgtaattcgtgcgatgatcgacgatacggttttccgggaagttgtacgtgcgaatacgttcggagcggtcaagcgaacgcacctgcgagtgacgcatgtcggcggcttcggcggcctcttgctcatgtttcatggccagcaggcgagacttcagcacacgcagcgcggcggcgcggttctggatctgcgacttctcatcctgcatgttcactgtgatgccggtgggcaggtgggtcatgcgcacggcggaatacgtggtgttcacggactggccgccggggccggagctcatgaagatgtcgattttcaggtctttcggatcgatctcgatctcgtcgtcatcctcgtcggcttcggggaacacgatgacgcccgcggcggaagtctggatacggccctgcgattcggtgacggggatgcgctgcacacggtgtacgccgccctcgtatttcatcgaagcccacacgccgtcttcgggagcgggcgtgcccttggcgcggatggcaatctgtacgtccttgacgccgccgagctcggtggtgttctcggactgtacgttcacgctccagccacgcttctcggcgtaacgggtgtacatgcgcagcaggtcgccggcgaacagtgcggcttcttcgccgccggtgccagccttgatttccatgatggtgtcgcgtgcatcatccgggtcacgcgggatcagcgcggtacgcaacttctcctcggcgtcgggcagttcggcttcaagacgcttggcttcctcggcgaagtcggcgtcctcgccggccatctcctgagcggctgccagatcgtccttcacctgcaaccaggttttgtaggcgcccacgatggcacccagttcggcgtgacgacggcccagcttgcgcagcttgtccgggttggacacgacttcggggctcgccatctgttcttcgatggactggtactcctcaagcgcggttgccgccgccgggaactgttcgtctgccataacacgctttctttcgtacggtggtgtctattcggttgtgcaggtcaaaaaaatgtcaaagaatacaaaaacgccagtcctcgatcgggtatgccggagcatgccgaatcgaatcggactggcgtgaagtatgctacttgctcttcttgccgtagcgcttctcgaagcgagcaacgcggccaccggtgtcaagaatcttctgcttgccagtgtagaacgggtggcactgagagcacacgtcaacgaacatgtgatcttccttgccagcggtgcgggtcacgaaggtgttgccgcacgagcacgtcacctcaacggggtggtaatcaggatggataccctgctgcattttacgtctcctatggattcgggggacccgggtcgtcatgcccctatggcaggacgtgaaccggaacctaagggattgtacgcgcctatctggacgtgaagacgcgctgtgccgccgcaggaggcgacgcaaaagagtggggccgcaggggcttgaaccctggaccgggcgattatgagtcgcatgctctaaccgactgagctacggccccacattcgctgcgtaaaacagccaacttgcaaagtgtagcatgaacccaccaacgccggcacacgcgccatgcacccatgccatgcacccgccagcacaacaagcagcatctcccggcgctacttctcccccatgtaccccaacgggttctcgatgaaccgtcgcaagcccatttcggccgcgccatatagcgagggatgcagcgccaccggcggcacgaacacgcggatcttcacattcgggtatcccagaatttccgaacgcagccggccttcaagcacggtggccagctcgtcgccgaagtgcgtccacagtccgcccaacagcaccgtatcgacatccaccagattcacggcggaagcgatggcggaaaccagcgcatcagcggcctgatcgaccactttggccacgtctggatcccccgcacgccaacgctggaggaatgtatcgatggcctcgctgctggtggcatccccatcctcggcaatgccggcagcctcgaccaaggcgcgacggcccgcaaacgcctcaaggcacccgtggcgcccgcagctgcacaacggcccatccatcgccacggacagatggccgatctcgccggcgaatccgtgcgagcccatcaccacttcgccgtcacgcaccaccgcgccgccgatgccgatatcggtagacaggtaaataaaggaatccgtgcgatccaccacattcaggaaggacgcacgttcggtggcataccccggaatctgagcgatggcggccatcttcgcttcgttaccggccaccacatccagccggcgtaccacgttgaaccgggtgaggttgacgttttcccaacccagattgcgggccaccaacagccacatgtcgtcggtgacgatgcccggcagcgcaagcccggctcccaccactttgcagccacgtcgtttgagtcggctttccaacgggaaggtcatcgcatcgagcttggcgaagatctcgtacgggtcagtgccggtcatatcctcactcacccactcctgaccgagagtgtcgccgttcagatcgagtgccaggcaaccgtagccatcggtgttgatctgcaggccgatgccggcgatggacccgccatgaatctccagcggcgtgctgggccgcccatatgtggtggagacgaccggctcgccttcctgcaccacgccactatcgatcagcatcgaggccaacagcgaaagcgtggccttggtcaggcccgtttccttggccaagtcggccctgctcatgggtttctccgcgcgcaacaaagtgtcgagaaccaccgacaaattatggttgcgcagatcctcctgattgatcctgcgtagacttgccataggctcctacctccttgcacccctagtctcgaacgccgcacaggcgctcacatccgtctatcgcacaatgatattgtgcgtcaaacgattgaaccagatacgcaccctcgcgtgtttccgtttgcaatcatacactgcaatacagtatagtttaatcgtctaacttattggttgtggcgcgccgagacttgcaagcgcgaccctcatcgaggaggaatgcatgacgagagtactggttgccggcgtagatacgtcaactcaatcaacaaaggtccgcattacggacgccgccaccggcgaacaggttcggttcgggcaggccaagcacccggatggcacctcggtcaacccggaattctggtgggaggccttcaccaaggccgccgagcaggccggcgggcttgacgatgtcgcggccctcgcggttggcggccagcagcatggcatggtcattctcgacaagcagggcaacgtgattcgcgatgcgatgctctggaatgacaccagttccgccccgcaggccgccgccctgatcgacaagctcggtgcaactccggccgagggcgacgaaccggacgacgtgaccgcccgcggcaagcagcgctgggtcaaggccgtcggatcctcccccgtcgcttcctacacgctgaccaaggtggcgtgggtggccgagaacgagcctgagaacgccaagaagattgccgccgtctgtctgccgcacgattggctgagctggcgtatcgccggctatggcccggtggccgagggcgaggacgctcatctcgaagccctgttcaccgaccgttccgacgcttccggcaccatttactacgatgccgcgcatgacgagtaccgccgcgatctcatcgccatggtgctgacccccgccgagggcgaggaagccgccaaggcccacgccgacgccattgtgctgcccaccgtgctgggcccgcgtgaggcagccgccgtcaaggccgaccccgccattgccggcaaggacgttgaaggcggctgcatcatcggccccggcggcggagacaatgccatggcctcgctgggcctcggcatggccgtgggcgatgtgtccgtatcgctcggaacctccggcgtggccgcggccatcgctgaaaacccggtgtacgacctgaccggagcgatttctggctttgccgactgcaccggtcattatctgccgcttgcctgcaccatcaacggttcgcgcattctggacgccggtcgcgccgcccttggcgtggactacgacgagctggccgaactggcctttaaggccgagccgggtgccggcggcatcaccctggtgccgtacttcgacggcgagcgtacgccgaaccgtccggacgccaccgcctcgctgactggcctgaccctgcacaacaccaccaaggagaatctggctcgtgcgttcgtcgaaggcctgctgtgttcccagcgcgactgcctcgagctgattcgttcgctgggtgccgagatcaaccgcatcctgctcattggcggtggcgcgaagtccgtggccatccgcacgctggccccctcaatcctcggcatggacgtgacccgtccggccaccgacgaatatgtggccatcggcgccgcccgtcaggccgcctgggtgctgtccggcgaggccgaaccgctgacctggcaactcaccatcgagggcgtggagaccggcgagcccaccgaagccgtgtacgaggcatacgccaaggcgcgcggctgatacgctgccagcacaatccatgagataacaactgaataacgattcctgatgaatgccgccatggcaagcatcgcgaagagccgctgttataccgcgctcctcgctgaagcacacatggcggcatttttcgtttcccacgcaatccacaaatacggctataatcaagtcgtttgaacaagtctggagattcttctatgaacgaccgctcccgtatgatgctgtacgccctgaccgccgtcgcatgcgtgatttggatatggcaatccgccaaagaagcaatggccgatggcacgatgatcagcacctcaaacatcatctttttggtatgcatcggcattgccgccgtctactgcgccgccaacgcattgatattgtggtggcgtcaacccagcaaggaggatgcggagaacgatgacgccgcggatacgcctgacggtaccgataccgacaccgcagatgccgagggatccgaggacgacaccgatgacgatgtcgaaaccgacgtcgcaaccacggatgccgatgcaccgccaaccactaatcgccagtaaccatcgttatcgttcgcccgaatcaagcgaatcatcccacttcagcaaaggaacattatggaagtaacaaccgtgtcaaccgtgatcagcgtggtgctgggcgtcatatgcgcgccttgcggcctgtttctggggctcgttcccatgaaggccgatctggtgaccgccaagcagtcaaaggcctcgcagatggtgagcttcatcgttgccatagtgttcatcggcttgctggtcgcaggccatgatctggagacctgggccatggtaatcggtctggtcatcggcttcgccgttgccaagattcccgcgctgca

SEQ ID NO: 604 - DNA, 19759 bp, Unknown
  R14_15m  MAG No. k141_2572
ccgggcttgcgcgcggccagcgggttgcccttggcggtggcgccggggccggcggtgatcgggcggttcatgcgggcggtggccatcgggatccagtcgccggtcagcgggtcgcggcgcatctgcggggcggcgtacggcacttcgttgccgtcggcgtccaggtgcggggcgaaacggtagtccagcgggcgcgggtccttgagctcgcgggtcttggcaccggagacgaactcggggtcgtcgtccaggtagaagaagtcacgaccgtcggcaagcgtcgtcggcgtgatgcggatgtgctccttcgcatactccccgggggtgtagttggcgaaatcagccatgggtttactcactttcctcaatgatctcgctctggtgggccagcacgagttcctttaccaaatccttggttttggcggcggagtcgggatcgagcccgtcgtcagtaatgaccgtgtccacctggtcgaagcgcgcaaacagcgacagcgatgtgcagctccacttggtgtgatcggtcaaaactatggtacgatcggcgatgtccatcatcgccatatcggttgcggcttccagcgaattcggcatcaggaagccacggggaatcgacaccgagtgggtgccgaggaatacggtgttgacacgcagcgaggcgacgaccttgtccgcgatcggaccgacaagcgagttcgatcgggtgatcacgccgccggtgacgatcacctccacgtccttggattcgagggcctggaccagttcggccacgggaatcgaattggtgaggatggtgatgccgctggactgctgcgattcgagcagatgctgggcgaagacataggccgtggtgccgccgccgatggcgatcacatcgccgggagccacatatttgatggcttcctgggcgatggcgtccttcaggccgagatccatctgggacttgacagagaacaggggttcgctgagcaaggtactggtagtcaccgcgccgccatggacgcgcttcagcagtcccttgtcggcaagttcggcgatatcgcggcggatggtcatcgctgacacacccagttccttcgatagcgccgtaatgcgcactgccccgcgcgtgcgcaacctgctcaagatgaggtgctgacgttgtgacgaaatcatgtgaacattatcgcacacaaaagctcacaaaccaaaccggcttgagcgttttggggacaatctctcgaaaattccgggcaattcaggtgttcatttccacaaaaccgcgcaaaatcgcacattgtgcgaaccgatattctcgcagcgaccactagcgcgatgactcacgaccgacgactctcccgagcgcgttgctcagcggcgagtcacgcctgatacctggtgcatcccgattcatgtatcttctgccgagccgacgcctgcgtgcgcctcgacacgcggtagccccttccccaattcgcctaggcaggaatcgcctagccgcaccagcccaagcgtgagacaataggcggtatgacttacgtttctgaaagcttctggcacgacgccgtcaacaaagccaccaccgatctgttcaccttcggctacaagcacatcatcaaaccgaacttcgtgttcaaccaccgccccgatgaggcacacgatcagatgatcgagttctgccacgtcatcaagaacgtcccgccgctgctgctcgccgagcagctgatgctcgactacaccgaccccattctggaaacgaatgtgatgggcgtcgatttcaccaacccgttcggcctgtccgccggcctcgacaagaactgcgacatgcccgtggtgctggaccatgccggcttcggttttgaaaccgtaggatccaccacctcgcgtccctgcccgggcaacgccaagccgtggttccaccgtctgcctgaatacgattcgatgatggtgcacgtcggcctcgccaacatcggttcggacaaggtcatcgagcgcgccgagaaggcttggactcaggcccgccagatgcagctgtctgtgtcgatcgcccgcaccaacgacgaccagtgcggcgatttggacgaaggcattgaggattactgcatttcgatgcgccgcgccgccggccgcaccgcgatggtggaggtcaacgtctcctgcccgaacacgcgcgtcggcgaaccgttcaccgcgactccggaagcgctcgaccgtctgtttacggcgctcgacaagatcgaccgcccgcagcccacgctggtcaagatgccgttgaacaagccgtggggcgagtacaaggagctgctcgatgtgctggccgagcacaatgtgcaggggctgtccatcgccaatctgcagaaggaccgcaccggcctcgagattccgcgcgattgggagggcggcctgtccggcggcccgtgcaccaacgccagcaccgagctgattcgcaaggtgtataaggagtatggcgaccggttcgccatcgccggcatcggtggcgtctttacccccgagcaagcctatgcgaagattcgttccggctccagcctggtcatgttcatcagctcgctgatgtaccgaggcccgcagcagatcaccgtgttgaagcgcggtctggcccagctgctgcgccgcgacggattcgagcacgtctccgacgccgtcggcgtggacgtggagtgaactcacatattgccctattacccatggggcggtaaaaccctcatggggcggtgattgtcccatggggcggttagccaaatttcacattccgcagaataccgccgttttgggttaccgccccatgagggttttaccgccccatgggaaagtcaccgccccatgaggattcagtacgcaccggccacgtattgcggggcgtaggggacctctgtggacggtatgcccagcttgttggccgcacgcaacggccagtacggatcgcgcaatgcggcgcggccaatttccacggcatcggcttcgccacgggccaaaatcttggccgcctgcttcggcttggtgataagacccaccgcggtcaccggaatatcggccttggacttgacctgctcggcgaacggcacctgatagttcggcttgaccggaatcgacactcccgacatgatgccgccagtggacacgtccatcacatcgacgccatgctccttcagcaccttggatagtgcaatggtctgatccaaatcccaaccgccagcggcccaatccgtggccgaaatgcgcaccagaaccggcacgccctcggggacggccccgcgcacggcatccacaacctcgaccaggaaacgagagcgaccggtcaaatcgccaccatattcgtcatcacgctcattgctcagcgggtcaaggaactgagaaatcagatagccatgcgcagcatgaatctgaatagcctggaagccggcggccaccgcacggcccgccgccgcggcgaacgcaccgaccagaccatgaatctcatccacagacagcgcgcgcggcgtacgcagcccgccgaacgcgatttcagacggtgccatggtgggccagccgcccgcctcctccggcacactctgaccgtcgtaaccaacggcgaagcaaccggtcgaagccttacgccccgcatggttgagctggatggcaggcaccgcacccgcctcgcgaataccgtccacgatccagcgccaagcatcaatctgcccgtcttcccacaggcccagatcgcacggcgtgatacgcccttcaggagccacggcggtggattcgacgatcaccatgccgaatccgccgaacgcacgagacacgtaatgctggtagtggaacggcgtgggcctaccatcgcaggcgaacgacgaatacgtgcacatcggcggcaaccaaatacgattacgcacggtcacttcgcgcagcgtcattggcgcaaacagtcccggacggtccttgctggctttcttatctgccttgctcacagcttccctttcctcataatcctcataatcatcgaacgattcgctcgtcttgcccgcgccggcccgcttcttggaccgtgcgtcggattttgacttcttcttaccgtgcctacggttcctcgatgcatcctcgtgcttggtcttcggctgcttggactgttcgccgtccgaagacgaagccagcgtcaccgctttgagatccggcacgtcgaatccacgaaaatcaaaattctcatgcgtcagatcgtcgtcgctcatcgttcccctttccaatgcgcgttcatggcgaatattcgatgaacgcgctggcgttgtcattaagtattgtaaaacgggcgtcacctgaaacaggtaacgcccgcaaactacgtaatttgggcatcgcagtcgactatgttacgtagactcagccggcctgcaatcaccaaatgtcaaacgccaatcaccaatcactggccatcattcgaccgctctgaattggtgccctgggtttgggtgttgttttgcccagtgttctgcgactgagactgcgactgggattgaccattggtggtcgtctgcgattggctgttgccattcgtagtggtctgcggcacgctgaacgttcgtccgccaatgcccaggtacttgccagtcgtggtgtacttcgagacgggctggccgtaatcgttgtcaatcggtattttcttcttggaaatgtagctattgaagaagttggtaacggccggagctgcgattgtcgaaccatcccaatagctgttgtaccggccgttgatggcaatgttggaaatacggttggtgtacgggttctgtgcatcgccgaccacagcgaacgccgcaatctgattaggaatgaacgatccaccggacaccgcaagatcctcactggtaccggtcttaccaaacgacttacgcccgtcagccaatctgaatgaccaaccggcaccatccggccgcaccgtaccttggttcagggtataagcgagtgtttggatgatgtccttatccaccgcctgatggcagttcgcggatggaaccttgagatcgttgccgtccttatcggtcaccttgctgatggcaatcgggttgcattgcacaccattcgaggcgtatacggcgaagatgctcgccatggtcagcggggacacattcaccgagccgatcatcatggatggtgtatacacctgggttttgtcgatggtctcacccgtggcggcgtcatggtatcccagtttggtcgcggtgtccgccaccttgcacagtttgaggatggcgcccatggaggcctgggtggtgttgtgcgatcgcaccagaccgaggaacgggctttccgggttcaccgtgccggcgcccatggcgttcgacacgttccacgaatcggcaccgcccttgtagttgttgcaggcgaagtcggtcgtggggtacgtcgtggtggtctgtaggttgtcgttgatcgaatgacccgcctccatccacgcaatcaggttgatcggcttccaagacgaaccaatggtccaaccggagccgccgccgtccaccagatcgacggcatagttctggcccgacttggtcggatcgttcgcggctgccggagtggcgtcatagtaacgattcaggccaaagctcagcacctcgccggttcccggtttgactgcggccatggctatttccatgccgctgggatcgtccggtggaatggtattacgcgcggtctccatcatcgtggaattcgcttccacatccaacgtggtgacgatcttcaggccaccctcctgcagcagcttgttacgctccgcacgagtcttgccgaattcttcggagttctggatgcgatgcaccacgaaatcacagaagtatgcgtagtcgccggtgtcctggcagccgacgttcacggcctgcaccttcagcgtgtccttcagcggcgtgttcacggcttcggtgtactgcttctgggtgatgtacccctcctgcagcatcagcttgagcacgatgttgcgctggttctcgctttccttctggttctcctcgaccagcggatcgtactggctcgggttcttggtgatagccgcgatggtggcggactgcaccacgttcaaatcggcggcggacacgctgaagtagcgctgggctgcggtttccacgccatacaggttgttgccgaactgggcgatgttcagatagccctgcagaatctcggccttggaatacttcttctccatctgcacggagatcagcatctcgcgaatcttacgggcgacggtgtcttcggtggcatggtactgggcgatcgggtcgtcgtcctcgatcgcctgcatgagcagcacgttcttgacgtactgctgggtcagcgacgaaccaccctgctgggagcctttgacgaggtaggtctgcacgaacgcacgcatcacgccttgcacgtcgacgccggcgtgagtccagaatcgacggtcctcgcgcgccaccactgcctgctgcatggttttggaaatcttcttcagcggcacgacgatacggttttggttgtagaacgtcgcgataacggtggaaccgtctcgcgcgtacatcgtcgacttctggggcagaccggtcacgtcgaagtccacgttttctaccttgagcgacggaatcaccgctttggcggctttattggcaccgaccacacccggtacaaacaacacgctggccgccacgccaccgcagacggcaagcatgatataggccaagaggagaacaagcacacgttggagagtgagggacttctttttgggcatgggccccattctaaatggggtgccctaccaaccgggctcgcggtcagcttccgtgaacatatcatcacaagaaccgcactagcgtaacattggctggaagtcagccgaacggtcagcgccgcgagcgtcgaatcagcatgcctggctggaagatgatgatcgatcgaccgtcacgtgcgatccatccgcggttggaaaagtccatcaacgccttgttcacggtctcacgactggagcccaccagttgggccagctcttcctgagtcaggtcatgcggcactttgaggccctgttccaccggctcgccgaaacgtgagcccaagttgagcaatgtcttggccagacgcgccggcacatccatgaataccaagtcggagatgcgttcgttgttgccgcgctggcggttggccatgacctgcaacatgtcgatggccacacgcggatgctcatcaagccatgcgaacagggcatcatgctccagccagaccacgcgcgtgccatggctcatggacaccgcggacgcagtgcgcgggccaccatgagggtcgaataccggaatctcgccaagcacttcgcccggcgcgtggatggacagcagctgcacgcggtcatcggaagaagtgcgaatcagcttgacgcgcccctgctccagtagatacatgcgctgatcggtatcgccttcggagaagatatagtcgcccttatcgaaggtcgcacgcttcaaatgcggcagcagctcctcggcttcggctggcgatacctgcttgaacaatgccgtatgcagcaggatgttctcctcgtcagcaaaagcgtttggcgtttccaagctcatcgcaccatccttattgtcctacgaccgtcgtcggccatccgtcatattgtaacgcgccccacaggtttcgtcagaagcatgccatcattcgtcacttcatgtgtggcgcgatccgatagccgtacgacatgctgacgaatgtgttaccgcgaaaaacggcactgtcgcggttaccgcgctcgcccatgacaaaaccacgcacggccaccggcaaaatcgtatacggccatcggtgaaatcacgccgcaaaccagtcaataaggtgttcgacgatgtgttcgcggctgagacccgtctggcttttcatcgggtccacgcgtttgactgctgatttcaccgctttgtctgacatcttctcgcgactggtgttgagcacacggctcatcttggccgcatcgatgtcatatgccatggtcacatggtgcagcaccgcgccgcctgagcctacggggaagcgccgttgcgccgctcccccgatcttgccgtactgcgaggcgatatcattgaggcccgcgaaccgcacatccaagccaagttcgcgcagcgcttcgaccagccaccagtcacagagccggtaggattcttcgatgcttacgccctgaacgaaatcgagcggtgcatacagagaataggtaatggtgttgcccggttcgataaacatcgcgccaccacccgtgcaacggcgcaccacgtcgaaaccgagctgctcggcaatgtccagattcacctcgtcctgggccgattggaaacggccgatgaccacagccgggcccgcccactcccagaaccgtatggtcggctgtcgtgttcctgctgcgacttcacgcgcccaggtctcgtcaatggccatttgctcgtccggcgtacgcggatggtcgtggatcacggtgagttgaggtctgagggcgttccagcgctcccggtattcagagcttttgtcgggctgcttggtttgtgtattgatggatgccggggtgttcggcgcatcggggctgaccacccccacccgctgcgcgggagcccccaccagcgggggcaagttgctgcttacggctcggctatatgcggttttgacggcaacttcatctgtgccgataatttggcaactagggtgagcgtccaatacggaccgcaatgaatcatcactaattagagcctgttccaagtcacgcaacaaagcatgagattcggcatccgaaactgattcaataaagaaatcaccgctgatatggcatgactgtgcggtgccgtcatcatcgacggatacggtcacggcgactagtttgccgccaacggttttgcattccccatgtcgcatttgcatgcaactcagtataaacttggctcccctctggaggggagccaagtgggacatcacatgcgggccagaatgtccttgccgacctggtcggtggagcgcacggtggagccgagctcctcgatgtccgcttcgacggcggtgtgaatcttcttggccgcatcatcaaagccgagatgctcgagcagcatggcggcggagaggatggcggcggtcgggttggccttgttctgaccggcgatgtccggagcggaaccgtgaatcggctcgaacatggacgggaactcgtcggaggcgttgatgcagccggaggcggagtagcccacgccgcccaccacggagccggcctcatcggtcagaatgtcgccgaagaggttgtctgtgagaatcacatcgaaacggctcgggtcggagaccaggaagatggtggccgcatcgatgtgctggtagtcgtgggtgacctcagggtattcctcgccgaccttgtcgacgatgcgttgccacatatcaccggcgttgacgagcacgttcttcttgtgcaccagggtgacgtgcttcttgcgcttcatagcgagcttgaaggcgtaacgcaccacacgctccacaccgtatgcggtgttgatggacacctcggtggccacctcctgcggggtgttgcggcgcaccgcgccgccggcgccgcagtacagaccttcggtgccttcacgcaccaccacgaagtcgatgtcgccggggttggcgagcggcgaggtgacgcccttgtacagcttggagggacgcaggttcacgtactggtcgaggtcgaagcgcagcttgagcagcaggccgcgttccagaatgccggccttgatgcgcggatcgcccacggcgccgagcagaatcgcgtcgttggccttgatgcgctcctcttcgtcctcgggcaggatcgcaccatcgcgcagataacgctcggcacccaagtcgaagttctcatactcgaagtcagctacgccttcagcggccttttccaaagccttctgagcccacggagtgacttccttgccaataccgtcgccgggaataacggcgattttatatgtctttgccatagttcaaggagcctactcgcgcgaccacctgccggcccgaacccgctcagctagtggacacaaccaacatgcgtatcgtgtcgagacattcattaggtcattttagtgttcattaggtcggtgtgggttcatttcagggactgaaatggcggcatttcagtctcacatagaagaggacaccgacctaatgaacgacgaaatgacctaatgagcgagccccatcacatccatgcaccaagcgttctcataggaaacctcttcccattgtttgtaacgcccggatagaccgccgtgaccggcctcgacctcgatcttggccaccgcgtccacgccggcggactgcagacgggccagccacttgagcggctcgacgtacagcacgcgggtgtcgttcatcgaggtggtgatgaagattctcgggaattgcgcggcggcgagcgcgccggcggcagccccatcagcactgccgtcaccggcagcctcgtcgtcgccgccctcgagcacggtgaccggcacattctcgtatggcgtgtacgacttcatgtactgatacacctcagggtcatgcaacgggtctccccattcgtcccattcggtgacggtcaacggcaagtccgggtcaagaatggaggtcaacgcgtccacgaacggcacatccgcctcaacaccggcgtagcattcgggtgccatattggcaatcgcgcccatcagcaggccgccagcggatccgccgttggccacggtgcgccaagcatcagccaaatgcgccttctgcagcgcgcgcgtggcgtccacgaagtcctcaaaggaatgcttcttgttcagtctgcgcccctgttcataccaggcgcgtcccatttcgccgccaccgcgaatatgcggcacggcgtacagcacaccgcgatccaacatgctcagacgagagaccgagaaccccggatcggaggaaatctcgtatgcaccatatccggtaatgaacatcggcgaatcctgcgccgggcaatcgcggtgccagacgagggaaacaggaatgcgttcgccgtcgcgcgcggtaatccacacacggcgttccatgtaatcgcgtggattgaagttgcccaacacggtggctcgcttcagcagcgcatcttcgccggtggcgggatcgatttcgtgcagctcgcccgggcgggtgtagctggcgaacgagtagcgcatgcgcggcgcctcatacgaggggttgccgccgacgccgatggtgtacaggcgccgggtctcaccgggcaggtggtcgtcgctggcaccatcggaagatgacgtgtgatccgtgggggcctcatcttcggtccacaagatttcgccatgatcgccggtgaagttttcgcgatcggcggcgaccatgtcccagtcgtcctccagggcaggcggcagcaattccgtaaaccgccacggccgtccggccaggaagtcggcggcagccgcgctcttggtcatgtatgccacgtgcggctggccgtcggcacggtagctcagggacacaaagttgcgatgcaacgcgatgccttcgatgcccagaccgtgggcaccctgcaatatcgccggattggcggcgttgaagtatgcctcggtaatcggcttatccggctcaccatgttcacagccgtacggcgacccggcggcgatgcacacgccttcgccgagtcggtacggcggctcatggccacgcatgtcaatgacgtcgatttcgaaattcggattggcggcgttgtggtagaccacggcgagcggcacatccgcaccgttctcccccgcgccttcaaaacaggcaaagctcacatcatattcaatatcgttctgacgtggaatgaaggcttggaattcgccttcaggcgtggccaccggcagcatcaacacttcggtggtggttttggaaccggtgccgatcacgatattgcgctcatcaaaactgatgccgacgcccacccagaaccgttcatcggtttctcggtacacgcacacatccgattcgaccgccgtgccaacacgatgccgccacacggcgagcggccgccaggaatcgtccaattccacccagaacacccattggccgtccggcgtgaagcatgcgctgccaatgccggtgaactgttcgggcagttcgctgaccggctccccggtctccagcccggcaaggtcgcgaatgcggaaatcatatcgttcgtctcccgcaacatccacgccgtacagcatccaacggccgtccttgctcagatccaagccgccgagccggaagaagtcatgcccctcggattccttgttcgcatcaaaaacgacctgttcaccgggcatggagccgggcgcgccttgcggatccacgaccggcgggtcccagtcatcggcatcgcgcacggggatgcggcattgcacgccatactgtttgccctgctgcgtgcgggtgaagtaccagtaatcattgacgcgcgtgggaacagacatatcggtctcttccacatgcgatttcagctcttcaaacaacgtatgccggaaatccgccagatgcgccatgcgacgctcgcagtactggttttcggcagctacgtagctgcgcacatcatcggagtctttgtctcgcatccactcgtaatcgtcgtcgaaaacgtcaccgtggaattcgcggcgcttcggctcgcgcttggcgtaaggcggcatcgcggccgcggcgtttgtgctctcgtcagtcataccacgcgattataggcgaggcaccacaccgggacgcattcggcgttcatcacgccgcgcttatcgcaacaccgtcttcagatacggcagcatggtcttcagaatgttcgagccggtggtgccggtgaatactggtacatcggttaccggagtcggctgggtcgaggtgagtcccgtcaccgacgccaatccggttgattcgcgcgggctcaactcacgaatgacgatcgccagtacacgtccgggatatctgcgggcgatggtggcgtacgtggtcgggtccttctgcccgtcatcgcccaccagaatgaacttcatgtccgggaagtcggccataagttgttcggcaaactcaagtttgtgctgggggccggtgggcacgaaggtcttgggcctcgggtcgaggtcgcgcagcagcagcgggccttcgggaaaaccatggtcagtgatgaagttgcgaatcgaactctccacattccagggcgatgtcgaaagatagaagaacggtgcgccggggaacaagtcggcgatgcgggtgaacagcacgctcatgcccggcacggaggctttcttcttggggtcgaggaacagcaggttgtacgcggccttccatggcaccggggcctgtgtgatcatgatggtgtcgtccacatcggagatgatgccgactttggcactggcggggatggtgtacaggttggcgctcacgggtttgcggttggccacgctgtaggagacgcgatggatgccgggcaccagacgatgctcggccacgaggtcgaggtatccggcggaatcggagatggcgtattcgctgccgagatcgcgcgtgcggtccaccttgtcatagacctcggagacgccgatctgcacggtgttgagcggcgtgtcatcaatgctggcctgcacgtgggtgcgcggcgcggatacggcaagcatgccgcggatgccgcggatcagttcgccggattgcgcatgcttgggggcgtataccgtgcggcagatcaggcgcgagtaatcgccggtgccataacccacatagggttccactcgcggataccagccccattggcgcaccacctgagtggagatgtgtgaccatacgccgaacacgcgggtgatggcacgacgtatgaatcgggtgatcggcggcttgacctcgatgcgctcacgcttggagggggtgtcgaacgtcgtggcagccttgcgtgcgggaatcggcacggtgggcatgtcatcggaatgttcagcattgctggcattgtcggcgccattggcggatgccttgacgtcagagactggcgcggtggcggacagcgctgcattgcgagcagcagcatcccaaggcagtcgcttgcctgccgcctcaaaatcctcgcgtgggcttctcatagacaccaatataggccatacgcctcattttcttggctccgttgtagatgactttgttttagcttgtcgctagagcgaagtcatctgcatggcctcgttgccgaggccagctccaagactcacacggcttacgccgtcgcttggttcgcgtttcacaggatgccgcgttgcccgacgcgatgcgtcggtccgtcttccgcttcctccgcgcgcgtttaacgtctccggggcactcccggcgacttggatgttgatggccgcgttcagatcgcggtcgatgacaagcccgcactcctcgcaatggtagacacgttcggacagggacagtttggctttcaccgtcccgcagttcgaacatgtcttgctgcttggataccagcggtcgatgacgtggagcctcgcgccggtgcgtgcggtcttgtattcgagctgtcggcggaactccgcgaacgcggcgtcctctaccgagcgggcgagcctatggtttctcaccatgcccgccacgttcaaatcctcgatgctgatgtccgcgtaggcgcgggcgagcatggtggtggtcttgtccagtaggtcgcggcgtaggtccgccacgcgggcgtgcagacgcgcgaccctcgttctcgccttgcgtcggcggttggagcctttccgtttgcggctcagattcttctgttcccgcctcaatcgtctgaggttcgagtccaacgcgcgtggattgcggatgatggtgccgtctgacagtgtggcgagctgtttcacacccaaatcgatgccgacactaccgcctttcagcggcgtgggcatcggaccatccttgcgctcgacggtcaaactcgccatccagcgtcccgcatgccgggatacgctcatgcgcagcaccttcgcgccatccacccgcttggatacgttctccatgcaatgcacgcggcctatcttcgggagccgcagcgcataagggtcacagtcaatgagaccaaacgagcccgtcgtgtacgcgaatccgggaaccgccctgtccttggatttgaagcgcgggaagcccatcctgcggcctttccgctgccccttgcgggacttggagaagttcttcagcgcgtcggccaatgattcgaggccgctgttgtacgactccttgctgttctccggccaccacggcttgccggtctccatgctgacggcgagggcgtccttgttggcgttccaccacctgcgcagcgcgtagtacgaccattccggcttctcctgccgttcaagcatgtccttgacgtgcgcgagtcccgcgttgtacgcgaaccgcgccgcaccggcatgggactccaagagtcgttcctgccgtggcgtcgggtcgagcgccaccttgaccgcctcaagcatcacgcgccgccctcaacgccgcgtccgtcttatgcttggcggcacgacgcccgtacagtcgtgcgcagaacgaggtcagcacctcggccatgtcgcgcaccaagtcgtcgtccagctccgtgtcgtccaccacgatgattcggcgtccctgcgccttcaacgcgctctccaccagtcccgcgttcatgcgggcgagcctgtccctgtgctccacgatcagcgtgcccacggtcgggtcggacaatagccggttgagcttgcgccgcttgtcgttcatgcccgagccggtctccgtgaccacctcggggctcttgacgcccatgttgatggcgaacgccttcaaccggtcggcctgacgttgcaaatcgtccttttggtcggacgagctgacacgcgcgtaacacaccgtcctgccgttcgctgtgggggcggcgggctggttctcgtatttcgggtcgtggatgataatcgtgcccgtgttcatgcgctcgaacgggacgggcatacggttctcgcgacaccactgccacaccgtctgctcgttgaagccctcacgcctcgcccattccctgacacgcatgacttaattatatcacacgaaaacaaactaaagcaaataatcaatctagcaggttataacccctccataagaggcacgatgcatataggtttgatgccacatactggctcccctcagggaggggagctatgggtggaactaccgcacgaccttcgcgtattcgtcggcgctcagcagctccggctcatcgtcgtcaagctcgaccttcagcagccagccttcgccgtacggatcgccgttgaccacggacgggtcgtccgccacgtcacggttcacatacttgaccgtacccgccacggggctgatcaacggctggacggccttggaggattcaagctccacgatctcgtcgccggcctccacacgggcgccaggctcaggcaaatccacgaacacaagttcgccaagctggtcggcggcgtattcggttatgccgatgattgcggggtcgaccgaacggtccacccaagcatgctcctcggagtattcgaggtggtcgggaatgtcgaggttcagcggctgttcgttttcgttgtcatcactcatagtcataagcctaacctatcttcgcggtccgtcacagctcgcgaccgagccattcctcaatcatgtagcgggcgatggtggcgcggcccggcgccgccatacggccggcgatgagctcggccgtgtattcgtcgcgtgtgacccatcgcgcggtcatggtctcctcgccgtccacatgcacgtcggtggtgatcgcatgtgccttgaacgccatcatcagcgaagccgggaacggccacggctgcgagcccaggtaccgtacctcgccgagcttgatgccggtctcttccatggcctcgcggcggcaggcgtgttcaaggttctcccccgcctccacaaatccggcggacaccgaatacagcctcgaatccttccatgccgcgttgtgttgcagcagcagacgatcgtgcccgtccacgatggcggtgatgaccgccggctccacgcgcgggaacagcacacggttgccgtccgcctcgttggtgcatcgctgcgcccatccggcgagcgccggccggaccgccgcgccacaggtggggcagaaccgctggcggctgtgccagatgcttaaggtgatggcactggtggcttgcccagcctcgcgcgcgttggcgtgaggggcgaatccgcgcaggtccacccagtcgaaccgggtcacggcctgttgcagcagcgtgggcttcggggccaagggttgtacgggcgcgccgaccgaatcatcgaaggcatcgtccgcaccttgtccggccgaatccggtacaccgagcggcccggagattttggctgcggctacgccgccattgcccttggcgtttcccggctgccgtattccggcggcagcacctccgctgatgccgttcttgcccagtgcgccgtccacggtgccggaatcctgggtgccgagcacgccgccggcagcaccggaaacaccagcaatcccgccaacaccgggaacaccggcttccggcacgcgcgtgatatccacggcgaccacggattcgccgcgcgccccgacataggagccgaggaacatggcgaccgcttcggggtagcgtgccagttcggcggacacataggcgcccggcaacgtggcgagccgcattttcacgttctcatagtccacgagctcgccttggccgcgcggtacggcgacaagtccgccgcgcgtaagcacgactttggtggtcggctcggccaacagctcgtcgatcagaccgggttcaccgcgccggtccacctgatagtcgatgtcaccttgcgcgagcggcaggaacggcagcgcatgggtcagcgccaggggcgaaaaatgaatgtcagtgcccatcgaggtctcctatgcgttcttctgcgcgttctgcacgcgcctgacgagcgagagcagtgctcgcgccacggtatccggatgttcgacggcactgaaatggccgcagtccggaatgtcgatgaattcggcgccggcgattcgctcggcgagcggacgcatcacactcggattgctggaggggtccagttcgccggacaccaccaggctcggtgcgctgatcgtttccggcaccgcccccagttcgggccggccataggtcatgcgctgacgccaagccagaccagccgggttctgttcgttgatccagccggtcatggtcgcgatgaattcaggagtcttcttgacggtggaatcgccatcggccggttgcgcgaagtgcatgaccggttcgaccgagttcgtctgttcggcggcgtccgccatcttcagtcggttctctccgcccacgccgtcggacgcggccatcgtgtcacacaaggccagtccggccaccgtttcggggtacaggcgctggatgtccatcgccacgtagccgcccatcgacagtccgccccagatcgcctgctcgtagccggcggccttgatcaggtccacgtaggctccggccaggcgatccagcgcctcgctgtaggcgccgttcgccatgcgggggccagaatcggcatcgctcggcaccggggatgcgccggagccggccatatccggcgcccaaatcgggaagtccggcacatcgttcaggtcggcggagtcggcgagcgccttcgcgcacacgtcccacatgcggtggtccaccgggtaggcgttcatcagcaccaccggcacgccttcgccatcgcgatagatatgattggccaattcgattgccatgaattactccttcacattcacaccccactggcggagctgtcggctcagtcggctgggagcggtttcaacgcggaccgccctccgtcgccacgcgccatccccaccagcgggaagcaaaacaactgtcagattccggcccaggccaacgcctgccgcacgatgcgcccgtggccgttgaccatctgcgtcacgaacgtgttcattacgtcgctcttgggatccacccattccacatccagcgtctcgtcctgtggcttgcagtcgccggcgatgggcaccacgtagcacagtgcgatggcgtgctggcgcggatcgtagtattcgctcagtcccggcgtggggaagaattcggccacggtgaccggctggagcccgaccggcagcagcggcagggcgatatcgcccaaatccttggccacattgcgggcgatggcctcgcgcagcgtctcgtggtacagcacacggccggtgatcagcgtacgctcgatcgacccgtcttcggcgacgcgcagcagcgagcccacctgggagatgcggcccatctcatcggtgcgcacgggcacgatctccacgtatgcgatgggcatctgatgacgcgcccggttgatgtcggccggtcccagccagcccggcgggttgccgtggccggaaccgcccccgtggatgaagtcctcgggcgtgatgttgtcgaattcgccgcggccacggccggcatcataatcgccctcgtcgggcacttcatcattcatgactggcatggtctcattatcgcgcgcattgatgaacatgggcacaattcaccgaaaaattgtctgtgaattctcagcaaagcgcctcatcgcctccatgcgcccgcaatccattcagcttggggcacaaacttttgccgaaatgttgggtgttgctgggaaactggtacacagcatcaagcactgtgtttgaggaaggaacttcaatggccaccaccgccatcacttcagctgagtttgagaagaccattac

SEQ ID NO: 605 - DNA, 28654 bp, Unknown
  R14_15m  MAG No. k141_3015
atagtgctggtggaatgcggttgggtgcccatttcttttgtgctgttgttggtcgccctgtttatggcttgggcggtgctgccaagcgaagtggcgattgcccgtcaatgcgccagcaagcgggtcgaaccgttctggatgtggtattccgccgaactcatctgggtcgagactctgttcatattccttgccatcatggttgccatctcaggaatctgacatggccggtgaagcttaccggggctcatgcgcaacgaaccatttccaagcgggcacttgtttgatgacataattgctgttgcggtattcgcgctcgattccatcgccgacgatgatggttccttcatggagcttttgttcggccatgagttcccagagcgcgcgggtttctctctcgatggtccgagtatcatccatgcgtgccgtgacctgatatagctcatattgttcatgttcgagtgcatcgcccatcacaaaatcaacttcatagccatgttccttggtatggcatgacgatatgccgtcgcgacgataacctgcggttcggcggcgtagttcgagataaacggcgttttccaatcgttggccatcatctctggcgcttgccatgcttgaggctgcggccagcccgggatctatggcgtatatttttgatgtggaagtggtgctctctttgagcgacatagagaagtctttcattcgaaacaccagataggcgtcttcaaaatattccaataaatctcccagtagcacacggctggtggctagtccggctgaacgcaattcgttttctatcttgcgaatagacaatggcttgccgttgctgccaagcaagcgtcgtgccaatgcggaggcaactcttggacgcgcgatgtcataacgttccactacatcgcgggatacgacacgctgcacatatgactggagcagggtcacacgttgagacgttggcagtccctcgattgctgggaatccgccctcttccaggtaggagatcaatgcggccgacagcattaatcgttctttggtggaatatccagctgcttcgttccggctgagcaattctgattcggcgataccgcgcgcgcggacaaactcacggaatgagaaaggcaaaagctcgaagtccaatgctcggcctcgaaattcggtggaaatttcttttgagagcattttcgaggaagagccggtgacatagatcgttgcttttgtggtgtctacgatgcgacgtagccaagcgccccagttctgcatttcctgtaattcgtcaaaaaacaggtacaagccggtgtctaggctttcgggatgcatggagcaaaaggtttcgattacttcatcgcccacacttggagtgatgtcgccgagcctgtcatcttcaaaattgatatagcagatttggttccagctgacaccggatgtatgtagggcctctatctcttggaataggcggtagcttttcccgctgcggcgcatgcctacgatgaccttcaccagattgcctactctcggggtcagtggcttacctagatccaagtcgcgcggcacaatcgggtggaaatcttcgattctaaaatcgcgcagcttttcggcgatgatcggatttgccataatgtgcctttcaagaaaacggtaatgctaccttaccaatattgaggaaaactggtaaccttatcttaccaatttttagttttttggtaaagttacttagccggagttgtgttactgtgttgacgagttttgcgtctccgcaaagcattggccttggtacaggactagacttaagtgctatgagagcgaagactgttaaggatcggcgtacgggggctcagacgctgaccatacataccacgcgaggcgagtcgttggatcttgggcaggcacaatggcttgctgaaggccattggtatatgctgccgttccggtttgaaagtaatggcgcggaaatcctcttctattacgacgtgactcattgcgagaccatgcatggcgtgttgaggtcggtagtgcctggcggccaatatgtgggcatactcgtggcggtattgtccgttatggagcaatgcgaggagcatcgcgtgccgctgtcgtacgtgcagtgggaccccaaaagcgtgtatatctccgcacaggggtatccgctgttcgtggtggtgccggcgctgggactggaacccgatcgcaacaccgccaccactttgctgcagacattggccgatgcacgccggacccggcttgaggatgccgttgtgcaaggctatcagcgtgcgctcgccgagttcctggggcgcaattcactggttaatgcagatgctctgcatgattttatggcgtatttgctgcccggcactgttcagccgcgtcaagcgcagtcagcgcagtcgactcatgaagataatggttcggagacgcaattcggcgcgaccgtagtgtctgacggcaccatggtcggtgccacgcgatttggcgccacagtattgagctccaagcctaaacttcagacgacgccgcaacaggccgcaatgccgacgacttccgcggcaccgtcaacgcatgcaacgccggcggctcctgcaatgccggcagcacacgcggcaccggcacagccgactcctgtaacgtcggcctcgcccgtgacacagccggctcctgcaatgccgattgccgtaaatcttccccgcaagcaggaaacgcagcccgctcgtgagaatctcgttcgcgaacaatatatccgtgaagattccgcccgcggtgtggcatccaatgtggcggctgccgctgccgcgggtgataccgctactgctgccgtggccgagactaacacgggtaacgctgctgccgccgctcacgttgctcacaccgtcaacaacgttgatgctgctcgcgttcccgccactagcaacgtcgttcgccctatcctccctgtcagcgccgtcagcacagcactgcgcgccgatgagaacgacagcgaaggcgagacgatgctgcgcctctacacggacaagtccagaggctttaccgtcacacgattgcgcgacggtaaagcaataacagtgcacgccacacgagccaccatcgggcgatcgaaaaccgcggacattcacatgggcggcaataccaacgtcagccgtatccatgcggtgattgacatgctggatgacggacgtttttgcatcaccgacaatcattcggccaacggcactgcggtaggtggccgcgaactggcaagcggcggttgcgaatatgcggcatctggcggcgatttcacgctggccgacgacacattcgtgatctctctcctacaatagaaggcagagaagaaccgaagcgatgacgctgatagcgggggagaagaactatgaaacgatgtgcacaatgcggcaatgcggttcctgacaatatgatgttctgcacgcggtgcggagccccggtaccggcggacgctacggtagtggcatcgcgcgggattccgcagccgggtgtgccgcagccgcagccgagcgtacctcggccgaatgcgcctcaaacgaatattccgcaaccgggcatttccagtccgaacggtccaatgcccggcggccaggtgccgggcagcccggtacccggagcgtatgccggtgccgccggtgccgttcctccggcaggaatcccgacctcgaacaatggcatgccaactggtgcaggcgtgcccaacaacggcaatggtgccggcaacaacggcaaaaagccccgtaaaatcgtgccaatcatcatagcgattattgtggtagtggcgctgatagccggcggcatcacgggctttatattctggcgtaacgcgcatcagaaggccgaggccaagccaacaactacctccagcaccaccaaatcgaaacctaagacaaagactaagacaacaaccaaagaccagcagaagaccaagtccgagcccgccaagccggcagccaccgaagtgacgatgaccgatttctcatgcgacggcaactccgccagtgactggaagtggactggcggcgcgatggtctcgaacgtcatccactgctgggatggggattcctcggtcgattcggattcgtcgtccaaatcctcaagtgattccctggacggcagcggcgagtatgccttcggcgtctggacgccggcgctggatgaatcgaaggaaatccacgtatccatgctcgaatcgggggagaaggagtattccgagccccaggtcgccgccacgtacggcgataatccggcggtattcgtgttctatgcggtgaaaaccaaggcagtgggcaccacgccggaaagcgtgcatctgttcgctcacgaggtcgatctcgataccggcgaactgtctgaccgcatcgacctgcgaaccgaggaagacaaccttatcgactatgagcagggttacgaatactcgttgctcgccgagtcccgcaacatggtggccatcaagaaaacgtggcatagcgatgaaaaatacaccgctaacaaggacgagcgctcagcgaccatcaaccacacgcaggtgatgggcgtaactcatgacagtgataccgccaaggtattgcagaccttccaagacaaaatcgtgcttaccactgattctggcgggtaccagtatgcgaaacaggtcaatgcctccgcgagcggcgtgagcttgtacgacgcatatatggtgcgagacaattcgtaccacctgtattcggtcgaagacaacaaggaaatcatgagtttcccgttgaattactgcgatacggactactcaagttgtgatttgagccgaatgcggtatctcggcaagaacatgtatgtgaccgatgattcgtatagcggcaagtttgtcatcgatagcacgaccggcaaacggcaatcgttggaagacgtgctgggactgagcaaggatgaggacgtcaaggccattgaccaattctccgacggcaccctctacgtgcagacggatggtaacggcaacgaaagcaaacgcgtgttcctgctgtcgtccgatctgaagcccacggaagtgttggatgggccgcagtggggtcgtctgttgttgaccgacggcagtttcaagggcatcaactatctgaccaagaccatatacgtgaagaccacggatgagcagatcatcgttgatgcgcaaggcaagtccgtgggcaagtacacgcaattgccattggatgatgattccatggtatgcgaccattccgttatggaatggatggcgtggagtccggaatccagcggagacgtgattgtgaccatcggtcaggccccgggcgatcccgcgccggatctgagcaacagttcgtcgcaaagcgagagtgattcggattcgtcggactctacggactcatcggactcatcggactcgtcaagttcgtcgagctcatccagcgataacaagtcggactcgaagaagtaactactgcgttcagcggtcagtgaccgcccagcccggtataggcatagccgagcaaccgtcactgaccgcccgccaacggcaacaataaaccgcaggtaccgtacgggtacaagttgttctcacagcttgcttggtacgttacctgcggtttattgatatctgggggggggtatcgctggcctgtacagtccagaggtcactgctgttcggagaactggaagaactggtctccgatacgcaccgtggcaggcgcgctgagcttgagcggtgtgcccttggtgacttgggtctcctggccgtcggcgatgatgtaggtgccgttcaacgagccatagtcctcgatccacaacgcgccatcggtatcgatgctgatggcggcgtgattacgggacgtggtgcgggtcgggtcttcgatacgctcggccttggcaccctgcggcacatccatggatggcttgcggcccaacagtgtgctcttgtcgatcacgatggtctggccggtgacatcgttatgcagcagatacgttttcttcggtgccttggaagtgaacgacgaggagagcacggtgctgtcccagtcttcgatgtcaccttcggcggcatgaggcgtggtatccgccggcgcagaggtggctgcggcgggcttggcggcaaaagtgccactggcctgcgcggtgccggtatccggctgcccataatcattgtgctgcggctcagcggtgccggccgcggaggccagggcaccttccaccggatcgtcagaataccaacccagttcaggtgctggagggtagggaagtttggccatgatgatgccgtcctttcactgacgggaagccaaagcggcgttgatcgccgggtcgccgagctggcccagccattcgatcagtgccggataggtgttgggattacgggcgatgcaggcgcgtagttcaggcgcgtattgggcaatctgggcgatttgcatctggtcggtggtggtcagggcctgttcggcggtgaagccataaggattggtggccacaggctcctcgaatgccgcctgagccgcgggctgctgggctgcgtactggtcggcagcgggctggacagcggcagcatactggtcagttgcgggctgctgggctgcgtactggtcggcagcgggctgagctgcggcgtactggtcggcggcgtaagcgtctgcaggctgctgctcggcagcctgctgggccgcctgtgacggggcttcctgatcctggaccgggccgccgaatgcctcggcggtgaacccgtattgcgccagggtctcgcgggcgcgctcatcgccgaattcggcgatccaacgcttcaagccggggtagcaacgcggatttacggcgacgtttgcgccgaattccggattctcgtaggcgatttttgccaacagaatcgggtccgcgttcggatcctgtacggcagcgaccgcagcatcataatcaaccatgggattacctccttatgttcgctcggttatgccgaacgtatggtccgtagtgtttgtagtgttgcgtcttcaatggcgccaatgtcctcgccctcgtccagtttaaaagcgctgaacgcgtgatgttcgggttcggtcagtggcatatcggccacaatcacagtgatattgtcggttccgcccgcatcgagcgcggccgccaccaaggcgtccacggcttcctgcggactggaatgcgctgcggcgatggccgcaatctgttcgtctgacacttcaccgtgcaatccatccgaacagatgatgaaacggccggtcagatcggcaacatatacgtcgggcactatgccgtccggatcgcccaggcattgggtgatgatgttgcgtggaatggtcgcctccgcctcttccggcagcatctgaccggaatcgatagcctcctggcgttgggaatgatcccgcgtgatgcgggtcagcgaggaggcgtcccacacggggatgatatccgtggcgggggcatcggcatccggcagcgggctgagatggtaggttcgggaatcgccgacattgaccacataggtctggtccgagaaatccggggagtcggcgtcgtcaaacggagctgcgctgtgggcattgatggcatctgcgtaaggctggggcaaaaccaggccggagcaggtcgtaccggccacgccgccgagacggtcacccaaatcgagaatgtcgtgctgagcctgtgccagggtgtcgtcgatgtcatggcgggtgcgcgagggcatggaagccagctgcgcgaaatgctgggcagccaactggcttgcttgctcgccgcctttgccgccgcccatgccgtcgcagaccatgaacacaccctgttgggcgaatccggtgtcttggttgttcttgcgcctaagacccacgtcactggtcatcgcgatacggatggagcctgtggtcatgacgtcttccccttcttacgcgcgcgcttgacatgcgtcgtgtgcgacttggctgcgtgtctatttgacagtatagccacgcttttcagggaaagtcgtgtacgtatcctcctgaaacgcggcaaagaagcgagcattgccttgcgcaattggtcgactcctgtccaatatgtggtggcttggcccgattcaatgtcttgccccgagaacgtggcgtagtcggcttcccggccaagctggatcaaagcctggtcatctgtgccgagttgacgggcgatggcaccggcctgatctcgacgagtgcccttggctgtgatgccgctttgctcggcaagcatgcgtatggcattccaacctgctgccacacgggctttcggactgccatgccgccgcgctcgcgccagcagcatggccttgaacatcagaatcagaccgcagacgatgagtagggtccacaatgggctgccgtacagggccaccttgcgggtcactcgccagaaccgcacccagaacaggttggtcggcgaatcatcggcgtcggcgcctgccaatgagctttggcccctggcttgcgtctgatcgcgcagcggatcggtcaacggcaccggtggttgccggaccagcgtctgcggattcggcggcgtcaggttctggttttcatcaggcaccttggtctccttgggcgtcggatagaacgccacccatcccaggccctgcaatttgatttccacccaagcggtgacatcgttgccggtgaattcgattttggtgccattgcccgaggtcttctccgtgcgggcatcggtgatttcgccatcctcgtttttcggcaggaagcccaggaccacacgggagggcagtcccagctcacgagccatcagtgccatggcggaggcatattgctcggagtcgcccaccatggccgtgcctgccagcagcttgttgatacggtagttgccatggccggcatcggagggataatcgccttcgagtccatgagagaaccatccggagtctttcaatgtgtcggccaacgccgtggctgcggcaccgcccgaggactgtccgccggcaatggacgtggccagtttgctggccgaatcgggaacatcctgggcttccggttgggtgatgcgggccgcggccgcactgctgatctgcttatcggtgggcttgcgggcgataatgccggattcggtataggtgaggcttttacgcgtgccggcgggaataatggcggaatcggtatccgtgttgtagtagaacgtgtcattgccgttgtcggcatcgttggcgaagctcacgccagtggccgctcccgccagcggcagccaggtgtcggtcaatccctgatcgacggtgaaggtcgcagtgaaggattcgccctgctcatccgccttgatcgtggtgcccacgcgatgataattcgaggagtccgtggcttcggaagaatcggacaggttccatactgtgccgtcgaatcggtccatcaccgcaagtttgactggtgttccggccggcagattatggacggtcagcaacacgtcttttttgtggtccttgatataggatcgcatgccgctgagcgggctggtgtaatcgtaggggcttaacggcggatcgtagcggtcacgcagcacgaaacggtcctgcggcaccagcaacgtgcctccgaaagcaaggccggcagcgagcacgacgatgatcagcgcggatatccagcgcccccattccagcagttcaagacgccaagacagccagataatcagcagcaaggcaaaggcaatgccgcagatggcacgttgccagccgctgtccgtacccagcagagcacatacggccacggccgccgcaaggggcagcactcccaccagagacaaccatgcgttggcattaatggcaaacacgccggtgaggaacgtaagccacaggccgatggtccataccgccagcagcacgccgtcttgcgtgcccagaggcggatcgacggaaataatgtacttgaacgagccaaacgtcatttcccaacctgaactcaaggtcttcaaggtgggaatcacgtaatgggacgtggtggaactcagcgttaccaccggaccgatgatgaattgggcaaacgccagaaacacgatttgccaccacagtcgcaacgccggcaacatgcccgccagagcgatgatcgcgcccagcaaggtggccggtacggcggcgatcgcccaagtggccacgccgccgtacacgtcgatgagattggcttgcgccagcaacatcatcgccgctatgagtacgaggctggcgattcgtttgccccacggctggcgactgaggcccatgccgcgaagcacattgcctctggtcatccagataaccgaatgtgtggagtcggcccaggagccggtggtggtggaggttccggtgtacgtgccggaggaagtgccggtgtatgtgccgctcgatccggcgtacgcagcggtattggtattggtgatactggactggtcgaaggtcatgcgagcacccccatgatcagtgggagatcatcgagttcgccgatggtggccaatgtgaagttggcgaatcttctgatgccgcgattggcgccggcgctggcctgcaataccacgcagctggccgatcggggcaaggccaaggtcatgcgcttgatttgctcgatgtctttcagcgatccaacagtgaaaaaatagaacgaagcatcaggactgtgcttcagcgtgccctcggcgagattcggattgtcctcacgatcaggctctatggcactggcgttgtcgaggaactccatggcgttgcgcggctggccgtgcgcgttgcccgcgtgacagaacagcgggcgatcctgcagcaggcatttgacgccgatggaggagtggatggacaccgccatctcgaattcctcgccgttgacgtactcatccgggttcacgctgatggtcaccgaggtgtcggtgcggcgcgtggcttcatattggcgaatcatcaacgtgccggttttcgcggagctcagccagtggacgttacgcacgtcgtcgccctgctcgtattcgcgcaatccgtagaagtcgagatcatcatccacgatctggccggatggttggccttccagatcgcggggcacgccggcattcaaggtatcgagacgcacggtacgagggtggatgaatacgatgatgcggtcggccagctccttttcgtgacgcaccaggccgaacgggtctcccttgcggatgcgcaatggtccgatgggcagtattgcgcgcgataccgtacggaactccacatcggtttgcttggattgcccgggagccagcatggggatgttgaatcgttcatgcgcatcgccgattggcagatatccgcgtgccgtggttgtcggcgttctgccggtgttgtcgatgccgacgataacggatatggtgtctcccacggtcacgcgatgatcggatacggcgatggacgcgtggaagcgtgtgttgccgagggaaagcgcgattgccgcgagcatcatcaccatcgccacgatgccgaatacgagcagctcataccagcccagaggcaggaacgcaataagacatgcgatgcctgcgcccgttaccgcccagcccaagggcgagacgtaggatgcgaagaaccgtctgatgcgtcttaccgcgcgcttgaacatgcgttcagcgcgccggcgacggcgtaatgcggcggatgtagatgccatggtcggatacctttccaggccctatcaggaaccgatggtgggggagggaacgtcttcgagcacctgtgcgatcaggctttccggagtcgcgccatcgaaggtggcttccggagtcagcgtgatacggtgtgcgagcacggccactgcaaggtccttgacgtcatccggcaccacgtaggcacggccatcggccgcggcccagatacgggcgcatcgggtcagcgccaaagcgccacgcatggaggagccgactgtgatcttctcgttgtggcgggtcgcctcgacgagcctgacgatgtattcacgaatcgcatcatccacatagatttcggtggccacctgacgcagccgcatgacatcgtcaccgctcagcaccggggaaatggtctgcgcacggtcggtgatatcgacctgcttgaggatatcgacggacacatcatggcccgggtagccaatcgacgtcttgataaggaagcggtccatctgcgcctcaggcagcttataggtaccgagctgctcgatggggttctgggttgcgatcacgatgaacggctgcggtacatcatgggtgacgccgtcaacggtgactttctgctcttccataacctccagaagtgcggactgcgtcttcggcgatgcacggttgatttcatcggccagcacgatggaggcgaaaatcgggccctcgcggaactcgaattctccgcgcttctgatcgtagaaagtcacacccaccacatccgaaggcagcagatcaggcgtgaactgaatacgcttgaaaccggtggaaatggagttggccaagcctcgggccaactgggtcttaccggtgccggggttgtcttcaagcagaatatggccaccgaccatcagtgcggtgacgcattgcttgatgggaatggtcttgccgataaccaccttggagacattctcgaccagcgcattgaaggactgctggaaatcccggacctgagccgtgggctggggcagtagtccggaattgatgctggcgggcagtgccgatgcggctgcttgcgcggctttgctcgactgacgctgcggctgggattgcggctgggattgcgcggcggcctgctgattggctaccggcccgcgaccagccacggtttcggcgttggatgctgcggtcttgccggcggttgtgatcgtccattgacgggaggtctgggtggcgggggcagcattcgcagtagcggcctgcttgccggatttacgtccgaagtgcggaagcgcgactttgggcgtgctggtctttgccggcatgccgacctgctgcgggatggctggcgtcgcgtccttgcgcggcttgagcacggtgctgtcatcgcccgcaggaatggaggcggcatcagtagtaggagacggcttttctgacgacgcttgtgacggccgctgcggcaggttaggcaacgcaacgggttgctgtgccgtctcggtgttcggggtggtgccagtgtgcggttccgatgccagatgtgtggcatcggacaagtgcgtggcgtcggatagctgcgtgctgtcagacagctgcgtcgcgtcgtcgatgttctcgctcatggatgttctcctactgcttgtgaatggtggttgacgatattggggtattaccgaaaccaagaatccaagggttcttggccaaagtggtgacatcggtaccggatttgagcgactcggtcccctccgaggaatcagaggggcgtgtgcccgcgacgctgctgccgtccgccgtattgtcgagaccggagtatcccggcccgccggtgactttgacgctccacgtgtagttgccatcggcggccacggccaagtcggtgacgtccaatggctggccggggttccacgtgaacggttggccattgatgatgatttgtacggtggcctgcttgccatagacctcaaccgaaccgccggtgacgttaatgacgtgagcgttgtctgaccagcgcagctcctgcggtttgttgattacagccttcttctcataggtgtaaggagcgccattgtacgggcctccggtggaggcatcgctggtagcgccgttgaacacctgttgcaccgatgcggtattgcatttggcccaaggactcattcggaagtcgagtgagttccggttagtagctgtaccggaatcgatgccatcggcagtcacgttgtaggactgcgcatgcccctgcttggtccaatgcacggtgcatgtactgccggatccggtggtgtagacgtcagtgggcggctggacattgtactgcgggacaaacctgctcttgcctgtgccggcggaagcatcgcgctgcggcaccacggtggccgttacggtgatttcccgggtgttcaaatcgttctcattgatatcgaacgtagcgccactgtcactgcaatcgatggtgtccttgatgtctcctcccaaggaaattcgccggcagccggcattgcggttgttgccgagagtgactttcgccgttcctgtggtgtcgtcgttcgacagcgcaatggtcggcgcatccgggtctccccagatgtcctttggctgtgatgaggcggactcggcactccaattgattttgttatgggctttgacggtcgccgtaatggcggtgccatcggaaatgtcgttgttgttgaacgtaaacgacagctcggtggccgtgttgccggtttccttggtctgcggagcacctgcaccggtgacggtcactgaatagttgtcgacggcgctgaaatcaccgctcggcgctttccacgtcactttggcggttttattgccacctgtgaccgtaacatcggtgggagcggacggcaccttgtccggtgtggcttcgacggcggtggacggtttggaccaaccgacgtcatttcgcgcggcgacggtgaaggaataggttttgccgttcttcagacccgtgacctggcatgaggtgacggcaccgcaatccttctctccggtggcggcgccggtccaactgaccttgtagttggtgatcgggctgccattggcggcaccgggcgtccatgtgaggctgaccgcgctgtcctgcggttccccggctacgggggagagcagtggcggctcgggcttgtcgatcacggacacggtaatcgatgcggtgacttcacgatccttggacttgctgccgtcttgcacggtgacgagcacggtgttcgtggaagcacccggatcggatgcgacggcgatggtgacgtttccggaggcatcgcatccggcgatagtgagtttggcggcgtcatccgccttgcagctgatgacggtcagcgaggaatcggggaacggattgtacgcgccggtaagcacgttcacggcatcgctggcaccggccttgatcttcagcgtcttgtcgccgacgcgtgccagcggacgtgtggaagacactacgcgcacggtcacaccggcattcacggtgcccgcgccgtatgcgatttgcacgggaatggacgcggtggtgccaggagcggcatccttggtggcggaaacctgcaagctgccggaacgggacaggttagcggtgattcgcccggacgatgagcttccgccggaatacgtgtattgcttctcgtcgtcatacacgccggacggtgcatgggtgagcgccgtcagatcaacggtcttgggggccgcgcccgcctcgacatcaatagtggaggacgagaacgtgggcggcggcacatcgcggcctatcaccgtgatctggagagtgatcactgcggaattgatgatcttggtcttatccgatccctgcttgccatccacagcggtaaaggtaatggaggcggggcctgcgtagtcttttgccgcagtgaacttcagggtcttgtcgttcacgtagaaatcggagttggaagccttggtggcgctgacggaatcagcgctttcgatatacggttccttgccggcaccgacgcgaacatagtcattgatgttgatttcaatggtctcacgcgaattgaccttcaattccggtgccttgggacgcaacgtgggcggaaagacaccataggccggtacctggatgaacgcggtggaggtgatgttgtatttcgtattggtcaccgtgtaaggcacggctcgcgcctgtgacgtcaggtcgacggtgatggtggtcgaatgctcgtcgcccttgacgtgagcgtgagcgctggcggagggatgcacgccgaccttgagctcattggctgtgccggaaggattggcgatccactgggaaacatccacatccacggacttcttatcgatggtggcggcggacggcacacgatagtcgtaggcggtaggcggctcgatggcggcattcggatccacgtttaccgtgagggtggccgtatcggacaagccggccttgtctttgaccgtgtaggcgatataggcggtggtggcgctgccaggcgtagtgaaggagatcatgttgtctttcacgctcaccccgtcgagaccttggacctcgacatgcttgtcgacggtcagattggtgttgtcgccggagatgtcgttctgcgcgaccggcacggttgcggccgtattgggcctcaacgtgatttcgtcatccctggcgtatacgccggagtcggacgatccttggaatacgcccacgcggatctgcgcctgtgcgcgctgaccggtccaatcctccacggcataggagaaggtgtcggtgccggacgaatccggatacgcttcatagaccaagtagtcggaaccgacttcggatatgcggcccagcgtgggtgccttgttgcccagacccaacagctgatcgtcgtcgccatccgtgtctatgccggtcagtgtgatggggatgcggaccttctgtccggcggcaacctgcgcttcggcgtcatgcggggttggcgcggccttgctcgctgcgtcgctcttatgcacggtaatggtgatattggcggaagccacattacccagattgtcttcaaccgtataggtgatggggaagttgccggtctcgctggatgcttggtagcggaccgtgtctccagagacgaaggccagacccttgaacgtctccttgtcgtattgcaggttgttcttgagcttgaccgtggtgccatccgagtaggccacatggtcaagcacatccacggacacgatgccgccggtgcgcacctgggcattgatattgctggccttgggcactgaattcgaggtggtcagagccggtggctgcaacacgatggtgcccttggcggttccggaggcgttggccacggtgtaggtaagggcgacgggtttcgtgggcacctgacgcgcagtgatatacacgcgcttatggctgacgagaccaaccttgatgccggagtcggccggtgcgctcaccgtggtgacggacagcacgccgcccatcggatcgacgtcattggtgagcggctccacaatggcggtattatccgcgccaagcagggcgacatcgttggcggcaaccggtttggcggcctcgccggtggcgggctgtacctcgacgcgagccaatccggtggccggaatcgagccttgagtaatggtgtagggcacataataggtgccgggattggtggccttgaacgtcaacgacatatccgccgcattggtggtcgtcgaagcgccgttgggcgtatccacctgagtcagctgtgccggctgcaaggaagtgccatgcacgtaagaggacagcttgacgacggtatccgtgttgggaacggtggttttcgctaccgggtcgatgaccgcggccaaggtgttcgcgggcttgaccgagaaatacaccatgccggtgccggtcgccgtgccatcggagacggtgacctcgacgcccacgcgtcccgacgccagcgcaccggtgttgaacgtaagctggccgtcggctcgggtggacacctgcacctggtcggtgttctgggccacagcggagaccagagtgagcgggtctccatccggatcgttgaagctgctcagcgcattggcggtataactggctccctgctccacatcgatctcgggaggagtgtcgaactgtacgggagcgtggttgcctccatcattcagggttacggtcaccgtggcggaagaggtctggccgcggccatcggaaatatcgtaagtaaaggtaacggtgcctgcggatgtggcggaggcatcgagttgcagataccggccgtcgtaaatcggcgaaatggtgacgtctttgttgtttggtgcgccaaccttggtgattttaagcacggaacaatcggtctgctcgtcattgcgcagcacgtcgagaatctgttccgaaccggctcgtgcgccgatttcatcatcctcggctttgatttggccggattgtgcggaacaggtcttggagaagtcgtggtggttgttggccgagtcgttgttctgctgttctttctcggtctgctcggtctgtattttgttccactgtattttgatgactttggtggaatcctcagggttccacacattgccgttaaccgtgtcgttgagcaccacaaggcgatggttggtgcggaacaccaattcggaagtagtattgacggattcgagggtttgcggcttgacgctggtatccgcgggggagcaggcgcgaatgtagttgctggccttctggctccaagccgagtacacgcagcccttggacgataccggtcgtgccggattcgccttgcccccgttggctatgaaattcgccttggcattggacttcaacgggataagcgtaaggcctctcggtgatgccgcggccacccaatcggactgtacgtcatcggtgggaggctcctgaagggtgagggtgccggtcgtgtcgacatcgacgcggccgcccttgaatatgacggttttgccggttgcgattaccggcgtgctcccgatgacggtaaagctttcaacggtctgctgcttgccgtcggtcagcgattcgagggttttggccttggcgctgctgggattgtcaagacgcagcaccataccgtcggatggacggtatccgtagaccttgccatcgtgggttactacgatgcgcccgccctcgcccagcttcattttcggatcggaagtggtgggggccacggaatcaaggttttccgacaagccggtccacacattgccggtcttctcgttgatcagggctacggtatccccgccgaccacagtggtggtgttggctttgatgtcagtcttgacaccggtgctgaccgtggatgccttgatggtggaggctttggtcgtttcggtcaggatggtgtcgccattatgctgcgcgatgtcgaatcgtggggcggaggaggagacgccggcgtcggcctccttgttctttacgttgaatcgtgcggccttctggttcttcagcgaagtgacccacacggtgccatcgtccagttgcacatggcggcgcgtgacggtgctcatgatcaccgcgccggcaacaagtcccagaagcagcaggagcgtgattacgggaaccgtccacgtatgccctccggagggcataaggcggcgcaaagccgcgctgatgcgtcggcgacgatcgtatgactgggacgatgcggccatctgaactccctgaaccctggtttctctggttgctagtgtaatgacaacgctttacggttccaatacctgccgttcctgttgtccatttggtgaattcgccactgccggtcgcatgcctgatgcgatacgcaatgccaaggtggtatgcccggcagtggcgagcggatcactcttgcggcttggccgcacaggcgatggcggggctgacggacatctggcggttcttgcgcacaatggacacctgaatgcaggtctgcgagccttcctgcgcgttgacggtcaccgtgggatctgacgttgtgacggtttgcgcgctctggtcggtattgctgccctgcactatggcccacgcataggtatcaccgctttgcgggtctggattcgtccaggtgaacgtcacggatgacccatccgccgcataggtgccgttcagattctccggggaaggaatctgggcgttcgcggtatcggtaatcacgtcatcctgattattgcggttgttgtcatcatccttggtgccgggcgtcgccacctgtttggtatctgatccggtggcgctgtccatgcggggaacgaccacgaaggcgaatatcagtgccgctgcggtgatcgccgcaagtataccgacggtaatacccaccggtttgacccatcgccgtgacgaacgggtggtctgatctcgctggtccgtggcccggcgccgacgctcgatgtctttggggtaggccggcatcccttccacggtaacgggagtggcatgcccgaaatatgcgaattgcacacgctgcatggcgcgtgcgaactccaacgcggagtagtaccgctggtcggggtccttgttcagggcccggcgcagcaccgcttccacatcggccggtacgtcggggcggttgaggcgaggcaatggctgattgacgatcagcgaaatcagttccgattgcgaacgtggatgatattcgtgctggaatggcgagcagccgacgaacatggcgtacagggtggccgccagtgaatagatgtcggcggcttccgaaccattggtcagatgctgaagcacttcaggcggtgcccacggcggcgagaatccggtttcggtacggtcatacacatcggtggagataccgaaatcacccagaacaggcaaaccctgcgaggtgatgagaatgttgctgggcttgatgtcgtgatggatgatattgctgcgatgcgcggtgaacagcgcgcttgacagcttgatgccgaggtcgagtacctgctcgcaggtcatggaccgggccttcatgatgctgttgtaggtgccgcccggcgcatattcgatgacaatgtagccatggccatcggaggtgacgccggcaccatataccggcagaatgtacgggtgggatgacagcttggccatgaagttggcctcgcggttgaacagggcagcggcccgtgggtcaagggttttggcgctgacctttaccgccaccgggcgtgcgggcatacgctggttatataggtacaccgtggcggtggcaccgcttcccaacatctggacgaaatcatatccgggcagcttcggcggcctcatcggaatattggccatctgttccctccctccttggaaaatgcgctctccctgcattcgttctacaggataccgtcaagggtacgattcttcgtcgggttcggtaaaatttttccctctgtgacggtcgggtttaggctggagccatgatgacgagacttgaacctggaacagtgctggacggcatcgaccgtgatggagcggcgaggctgattgtcggcacgcctggaagcggcaaaaccgaattcgccttatcggtgttgatggcggggctgcgccgctacggtggcacgcaggcggtgatggccgtatccggccgtgtggccgccgacgcattgggcaatcgggtgattcgtgagctcgggttttccgtgcaggccaggccggtcaccacgctgggtgccgtggcattccgggccatatcagcttcgcgcgagggaactggattgccgtcgcctcgattgttgaacggtgcggaacaggatgctttgctgcgtcaagtcatggccgtgcatctgcgccatgccgtagcgggagatgattgcggcacctgtgatttgctacgcgtctactttgcccaggatgactgggcgaaactcatacgcgatgccggtgccggcgagatgcccggctcggccgcttccgtacaatcaagcctctcgcaacaagggtcggattcgccgtctccgacgtcggcaggcggctcgaccagcgcggataggttcactcgaggtatttcagatgcgtttatcagccagttgcgcgatatgctggcccgattggatgagctcggtgtaggcgttcacgaagagccacgtctcttggacgccgtgacggaggacgcgcgattgtcggtgcaatggcgtttggctttcgcattgcgccgtgaatatattgcagcccaaagcgcggcatatccggggcaataccgtttggatgcctcgtatttgctggtggcaggagctcgtgtggtgcatgaggcattcgccgccgatcacgcggatgattccgaccggcctatgcgtatggaggcgttgggcttgccccggctgctggttgtggatgatgttcaagacaccacgctggccggcatgcgcttcttggaggagttggggaatgccggcgtcaagttggtgttggtcggcaacccggatgaatcggtgcagaccttccgtggatcgtatccggaatatctgatgcgccgtgccgtggaagggtggctgaaagccaaggaagaacagctggttggcggcagtaccggcgctgatcagtcgcacatgacgatggctgatgtgatcgcgtctcgtatttcgctgtcgattccctcgccggaagacgagccgctgcctccggccgagcgtcccggcaagctgaccgccatgctgggcggagtcgatgcagcgaattatcagtcggacggcacggtgaccgccggcctgtaccgatcctcacgtgaggagctggatgatgtggtctggcgcatcaagcgggcgcatctcgaccggcatattcggtggaacgacatggcggtcatcacccacgacaatgccgccgtgcggctgttcggcgaacgactgcgccgagatggcgtgccggtgcggtattcgtcggtcacccgtcctttgaaggacgagactttcgtgcagggattgttcgcgcttgtggagcttgcccgattgcgtgccgagggaatggcggaatgccagatgacgttggcttcctgcgcggcatatataaggactagagtggccacgttgatgaacggcccgttggtgagtgccgggggcagacccggtcaagggcgtcctgcaaggctcgctccgatcgaatcggccatggggtcgttggagtcgctggcgcatctcgccacggatgatgccatgctgacctctctgacgacggcatgggagacattgcgtgaaacataccatgaaacacggcgtgaaacaggtcgtgaaacatcctcatcagtggttccgtcgccagtgtctgtcgaaatactcggtgaaccgtccgacgatgacttggcctttggcgttgacgcgctgtacgtgatgcttgccgttgatgatgccgccgcgccggcgcaggctgcgctcgcatccatccatgcggtgcttggcaacgaccctcaggcccgcgcttttgcgaacctgtggcatctggtgggcagcgttgcttccggcttggagcggctgccggcaagccagcgcgtacagccgcgttatgcactgtctgttgcctggaacgccaccggtctggcaccggtctggcagcgtgtggcattattcaacacggcagaggggcgcacggccaatgaccggctggacgcggcaatgcgcctgttccagttcgccgatgattccaccgccagccgagacatcacgtcattcatggcacaggttcggggcatggaagtgcaggccgattccttggcccacatagggccggtggaagacgctgtgacattgaccacgccggcaggcgcggccggacgccactggggatatgcgtggataccggtggtccagcaagacgtgtggccgaacctcgccgggcgcaacaccatgttcggtggtgaagaccttgccgagctcgtgctgaggggagcgcttgaagaaagtgacaaaaccgggcatgatccgcagttcgcggctgtgctgtcgggcgagaagaagggtttcctggtcgcgctgacccgtgcacggcgaatcatgatcagcgcggtatggaacgacagcatgagcccctcggactttcttttcgggtatctgccggaatactatccgcgcaaccggcaacaggcgcctttcaccacagtgggggcgcatacaggatccgccgaatatgatctggccggattggacgccgacccacgtgggttggtcagcgccgcccgcgcggttctggccactgctcaaccgcagcaggctgccgcaaaggacgccgcggttgcgttgacactcctgtcggagcatggtgtgcgcgccgcaaatccgcagagctgggcgttcgtggaatcgccggcccaatcggatagcgcgtcatctggcggtgcgtcatctggcggtgcgtcatctggcggtgcctcatccgacagtgcctcatccgacagtgcctcatccgacagcgcgtcatctggcggtgtacagtctgacggtatccaaacggggaaaggcaagacggatgcgcaggccgcacccatggtcaccctgtctccatcggcggtcgacagcctatgggcatgtccggtgtgctggatgctggagaaccggtttgccggtcctcgccccagctccgtggccaccagcttcggaaccctcatccatgcggttgcacagcaaggcagcgaggaagggctggaccatctttcccacaatgcccagacgttggccacactgggcttggactccacggccggcacggaacgccgcatcgaggctgtcacggcacggcttaatgccatctatcagagcaaacgccccgatccgaatgccatagccgacacccggaaccgctatgaggccacccgtaaggacgagtccgcggcagatgccctgcgcaacatcgccgattactttgtgcgcagcgacgccgatccggaaacgtatcttggcaagaactccagcaacttcagcattggcgcattggccggtgccgaatgcgaacgggagtttgccgcacgattcgatgtgcgtgacatactcgacgcatacaatgccgtgcccggcatgcacccgatcgatcggaacatgctggtccgtctgatgggagcactggtcggagggtggccggaaggcatggacgagcatctgaccgtgagactgtccgggcgcatcgaccgtatggaaacccgcgtactcgcagacggcggcgaatgcattcgcctcattgactacaaaacaggcagaacgcccacggtcaaacagattttcaatgatctgcagctcgtgtgctatcagcttggcctcgtgttccccgaagacgggccgcgcggtgccaaggcacttgccgcaatgccgcatatcagccaaagcgcgctgttccatgtcgggcagaatgcggcaccagccagaagctacgccccggaaggtgccttccagccgccgctgttcactgatggttcgttgaatgccgaaccgttcacgccacgatactggtataaagaccccagccgtttcttcgacatacccgccatagatccggctactcctcccgaaggtgtgagtgccgaagcgtgggcgcaattcgccgcgctcgccggtacgcagacgttatggtcgctgaccatgatcgcccgcgtattctatgccgcggcggccagcaggtcggccatcatcgaggcccatccgcaagacacccatatcggattctgccgtatgaagaacgtctgccctgcctgtgcgggccagatcgacacgattttcgaaacgaggcaagcatgagcacgttcactcccagtgcggaacaggccgccatcatcgatgcgccagtcgatgctgacgtactggtggttgccggtgccggttccggcaaaacctttacgatgacccaacgcatcatcgcgcttatcaatcgaggtgtggcacctgaacgcatccttggcctgaccttcacacgcaaggccgcaggcgaactgctggaacgcgtctccgccgcagtggccggtgatatggcgggctctacgaccgccacggtgtctgatcgggcattcctcaagccggccattttcacgtatgacgccttcttccagaccatcgtgcgccaatatggactgcttgtcggattcgatcagaacacgcaaccattgagcgcagccggagcgcttcaactggccaccgaagtcatcgacagtcacatggatctggcgttcagtgaggattttggcgccttctccagtttggcgaaccgtgttctggcgttgtcggatgccattggcagtgccatgatcggtgccggctgcaccagcttcgatgatgcgatcaatcaagtacggcaatgggattcggcattcatcaatcgattgcagcaagccgtcgtagacgaacccatgcccgaggacgagccgaaaatccccaagatcaaacgactgaagaaagataccgacgccagctggcaagccaagctcgatgaccgtgccgaacatttgcacgcccgctgcgcctatcattgcggtgcgctgctggagaccacacgcaaacgcgatattctgctccagctggtggaggcctatgcccaagccaagcgggaacgcaatatggccgaattctccgacttcaccattgccgcgtatcagcttatcgagcgcttcccctccatcggagagcgcacgcgccgcaggtacagccatgtgctgctcgacgaatatcaggacacctccaccacgcaggccgctctgctggcagcactgttccatgtggatgcgtcacggaggtccgccgtcaacgcggtgggtgatccgttccagtcgatttacgcatggcgtggtgccagccctggtgcattccgtatgttccagcaagatttccacctgcctgccggatacaagccattcccgttgtccgtcaccaggcgcaacagccgtatagtgctcgaagccgccaataatctcacgctgccgttgcgctccaatccgtcgcgtccctccagctcattgatgcgtgaggtcgatgtctcatcgctcgaccccatgcctgatgcccccgaaggaacattgggagtactgggcttcgccacggccgggcaggagatcgacgccgtagtgcgtttctgcaagacggccatcgcacggcaccgttccgcagccgaacaacaggaacagatgccgggcgaacagaaagcgccggtcgccgtgctgtttcggtccaaatcacatatgcccgaatatcaggcggcattggaacaggccggattgaccacattcgtggtcggctattccgcgctgctggaacgtccggaaatccgcgatctgatggcgttgctgcacgtggccgccgaccacaccgatacgggatcgctgatgcgcttgctggccacgccacgattcaccatgtccgcagcggatttgactatgttggcccgttttgctgaagaacagaacatggaacaacgcttccaagcattggtgcaggccggccttgcccaaccggatacaccagcgaatgaatgggcggctgtggtgcgtgagtaccgcgatcaggtggccaatgcggtattcctgccagacgtattgctacgcggcgacctggtaaaactgcttgaacggttgagcgcacacgggcgcaacgccataacccgggccgcggtgatgctccgtcaggtgcatgatgccgtcgggcggccactgggcgacgtgattcgcgccggcatagaagcgttggatcttgacatcgacaccgtattggccggtgtgctgcataatccgcagcaccgcgccaatcccgctttggcgcatatgcctatggatgcgattgtggatttggtggatacgtacacgcaagagattgccgctgagcaaactccctcgttgcatgggttcatcacatgggtggatcatctggcttcggtggaggatgaagccgccagtctccccgacgctccggtggatgtggaactgatgaccgtacaccagtccaaagggttggaatgggatgccgttgcggtagtggggcttaccgccggcggattccccagcaatcagggcgaccatctcaagatcgtgctggacgaacaccatacgggaggcaccgagcaaggtcactggaccgcacccgaatatcatgagaccgccgactcctggctcaccaaccccaccgccgtgcccgtgcctatgcgcgccgatgccggcattttgccgcgattcccccatgatgccgatgtggaagccgaccccgtcgcatcgttggcggctttggatgatgtggagcttatcgatgatgaagtgttcggctccatgcgcgaattcggcgatggcgtggaagaagtggatgcatccggttggtatttgacgcaggcggaggaatatgggcgtcggctgcatgccgacgaacgtcgattgatgtatgtggcgcttacccgtgcgcgggaagatgccctgatgacctattgcgcctatacgggcgaatccgggcgggacccgtcagtggtgcccaaaggctctcgcgccgctcagccatccaatttctggcttgaagtgcatgacgcgctccaagcccgtgaacatgcgatatcggctcaggactgtgtggaacggctgcaagccgccaatgccgggaagcccatgctgatctcggcgcaaggcgaagcgattgcccctcccgaagggttctttatcggagagcatgccgcggcatacagtgacgccgtggtgggggaggcgtggcaaacgccgattacgcagacgaatgccgccgccgaattgccgtggccggctaccctcagcgacgcggtgcatgaacagctgtcacgcggcatcgatggcatcgccgcagattcctcgtcacttgagcagcaccaagacgccggcccactcctgcaacgggcacaattgctggtggacgacgccgatttgatggccgatgccgccagcggccagtcgcttgatgaggcagtcaaagccaaggcgcaacgcgttctggctgcaggacgccagaacgtgacaagcctgcaagcccgcgtaggtggcatgaacgaacgggaggagcgcctctactggcgtagcattatccgcccgattccgcgcatatcgtctccggcggccgaggccggcacgcagttccatgcgtgggctgagcaattcatcaatgccggtaagccggatgaagcggtactggcatatgaagccgaaccaagcatgccgcatacaggtcaggatgcgggattcgtttcccgggaagccatgttggccgatttggccgaacgggagcggcaatgccgcaagcc

SEQ ID NO: 606 - DNA, 8914 bp, Unknown
  R14_15m  MAG No. k141_3354
cgcccggcgcacgagatgccagccggccccatccgtcacctcagtgccgtaccgggccaggcatggccttgagcaacgggatgaatccggcgcacagtaccagggccacgacggcgagtatctgccagtgggcggagccgagccagccgccccacgtgccgacggcaccgccgatcgcatacgcgaacctggcacggccgctgaatttggccaggtcaccaccgctcagcagcagttgtcgcgatacgatcacgccatgcgccagcaggccatagccgaggttgttgatgagccatccgacgcacaccgcggcaaactcgggaaccagtacggaggcaagggaaatcgccgtggcgattgccccgatggcggacacggcgcgcatgccgagttttgcggagagccgcatgtagacaaacgatccgatgatgctgcccacgccgccgaatgcgtagaccacggtcagcatatcgctgccgtaccgggagccgatgcccagcaacgcatagcttgcccacagcgacggaatcagcgcaagcagcagcgatgcgatcagcagtctgacccgggtcaagcgggtgaccggagtgcgctgcggcgcgtgtgacgtgtcggccgccgtggattcgtcggcggagccgtcgccgtcatcgccgcccgcaccatcgttgccgaatcccggcatgaactcgcgggtgcggaatcgcgtcagcgcgcaggcaaatgacagtgccgacgaggtgagcagcatggccatgatggaggcgttggccaaggccgatccggcaacctggcccagcaacgtaccggccacgctggcaatcacggcgacgtagccgctgtacttgacgagcatgtcatcgtcgtcgccggccgcatccacctcgaacacttcggaggccacgtcgatgacctgcccggtcatcagcagcaggcatgacagggccagcagcagccacttccaatacgtccaaccgttgggcaccagcgcgaccgccaggcacagtacgccttccacgccctccgtggtcgcaagcgaacggaacgagccgaaccgctgcacgatccatgcggataccggagaagcgaagtcgatgaccagattgaacgtcttgcggaacgcgatcacccatgccggcagtccgacgatcagaatcgaaggaatcaccgacccctcgaaaatcgcgttggacagcatcgaaaacgtcatacccaccaacgcccatcgcaacgccctgctcaataccgacaatccgcgcataccttagttccttgtccttgccagtgtaacggaattatgacttctcaatcgtcccccccgctgtctaaatgaaagtgcaacaccctttcactggttatctggacaatctccaatctaaagggtgttgcactttcatttagacagcgccccccatatccgcatgtcactgctgccatcataatgagccagtagacgcctttaagcgttctgacaaccatggaatcgaaaatcgctatgcacatcatagaacagcactgccaaggcaagaggtctgaccagtcgctcaatgaggacaggctgatcatcaccgatggtttcgcggcagtggtggatggagtgaccagcaaaagtgtgcaccaccctgccggccttgttcttggccgcgtccagcaccggcgcgaggccggcggcccattcgcgcaccgaacggccggcgagtatgtcgttgccgcccacgcacacgatcagcacatccggccggtcgttgatatcgccgatcatccggtagcgcacgcgccgggcggtcgcgccgagcttgccgaccgtacgccaggccaccggccgaccggtacgcttgcgacgcgcgcggcaagcagcggcataatgcctttcgactggtcgtccacgccacatccggccaccaatgaatcgccgaccatgacggcaagaatcggcttcacgccgttcgcgcctttccaatcggggccgatcggcgccttgatatccaccacgcgacccttggcatcgaacaaaccgaaccgtttgcccttcggctcggacgccaacttcacccggcccttggcccacataccctcaatcggagcaacggcagcatcaaatcacacgcaagattcccacgccacccaacatagtccgccctcctcgacctcgttagcggccagtagcaacccatattcgaaaactcgataaccatcgtcaattcgcatagtttgaacgttttaggcgttttggtcgctttggacgttttatactgtgatagataaaaaggaggtcaccatggcagaatccgacaaactcaccattccacgaacaatccttccatccatcaacattgacgacatgacgacattggaggcattcaccgcacgatttcttgatgagcggatcttcatcaaagatgccagcggcgtggagactcccctaccttcgcagctttgcgacgccgtcaggcagacggccatccttctcgccgaaggcaaaagtgtaatgatcagtgccaccgaacaagatctgactaccgaacaggcggcggcaatgctcggcatttcgcggcaaacactgataagactgcttgataaaggacttattcctttttcacgtccgtccaatcaccgtcgcatccggctggaagacctgcttgaatacaagcgagcctcgaaacacaccaaggattgcgccctgagccaaatgatcggcgtcggggaagacgccgaattgtacgacctgcccgagccgaccccgcaggaagccatgcatgcggtatcggaggtaaggagagtacgggccgatgctgtcggtgtttcttgatgccaatgtcatctattccatcaccttgaccgatgttctgctcaccttggccgagcatgacctttttcttcccctgtggtcgcctaacgtattacaagaagcacaggaagccgcctcccgaacactgcctgacgccgcacaacaagccttccgaaaaagactgataatgatggaccaggcattccccgaatcctccatacatgttgaggaatcggaatggagccaattcgatctgcctgacccggatgatcgtcatgtacttgcggctgcggcacagggacaagcagacgcactggccacgcgcaatatcaaggattttccccagaaactgcttgactctttctccattcaggtcatcacgccagatgatttgctctgtgtattacttagacgaaatccggaagccacagctagcgccatacgtgagcttatcgattctcgacatcggccaccgataaacattcccgactttgctaaaagacttgaacgctctggcgcaacacagtttgcagccgctattgcgcatatacgacagcctttcggcaatcattcgtactttgaccagtaacccatgaattctggatgaattggggtgaaccggcggggctggaggcgagcgggcggcggattatggggcacaatggtgtcaaggaggccgccatggtcgatgactatactgccaaaatgactgagctgatcgaactcatgcgtctgatcggcaacgatacgcagcagtgcgaggtcaaggaatgcaagcgcaagatctcctcgaccatcaccgatacgctgtccgcgttctccaacggctccggcggctggatcatccttggcctgtccgaaaagaacgggttcacgccggtcgagggattcgacgcgcgcgccatgcaggaggcgctgagccaggcgtgcgagaagatgacgccggtggtgcggcccgtgatcgtcacctgcccgttcgaaggcgcgaatctggtgttcgcgcgcatcgacgaaatgctgccgcgcgacaagccctgcttcaccaccgcgctcggaccgcacggcggctcgttcatccgcaccggcgacggcgaccggcgcatgacctcctatgaggtcgaccggctcatcgaggagcatctgcagcccacgtacgatctggatatcgtgcccggcgccacgaccgatgacctcgacccgcagcttgttgccggattgttggcgcgcgtgcgcgaacagcatccgcgcgtgttcgccgaccgggacggcatcgatgtgctgctggatctgcaggtgttgcgccatgatgattccgacgaatcggaggtcggcggaatactgcgccccaccttggccggactgctggcgttgggccgctatccgcagaagttctatccgcggctcggcatttcgatagccgtgtttccggggacgagccgggacgatgtgttccggggcgacgaacgattggtcgcctcgaagtcggtggtcggttcgattccggtgatgatcgacgatgcggtcgactcgctgatgcgttggattggcgcgaagaagcccgattatccgccgctcgtgttgcgcgaggcgattgcgaacgcgctcacccaccgtgattattcgcccgatgcgcgcggcacgcaggtgcatatcagcgtgttcaccgatcgcatcgagatcaccaatccgggtggtctgtatggcatggtgacacatgatgtgctggcgagtccgcatccggtgacgggtgcaccgttcgtctccacccgaaaccagttcctgttcacgctgctggagtccacgccgtatccgggcggcgggtttgtgaacccagaaggcggcgacggctaccagcgcatcgccgccgcgttgcgcgaggccggcatcgaaccggcgaccacgcgcaacgacatcaacacgttcacgatgaccatcaccaagcagcgcacgatggcgaacagttcaccgggtgacgtggtcaaggcgattatgaccgtactggaacggcattcggcgatgagcgtcaaggagatcatgcgcgaactgcagttgactccgctggccgccacgtccggcatgcgcgagctgatgaaggaagggcgggttgcccgagtcaagttcgccgatgacccggtgcagcggtatcggttgaaaggctgattttctcactcggccagctgcgtggtggcaggcgcggccaaggtgggacgggatcggcggaagcggccggcggccaggccaatgcagatgaacatcacgccgaacagtgcgaccaatcccagcgagccggcccagccggcgacgctcacgccgctctccgcagccgtgccgaagccgagcgcgttgtcgattgctcggcaataccaccagccaggcaggaacttggctatggtcaccatcacggcgggcatcatgtcaatcggcaatgcaactcccgacgtgaacatgatgagcaggccgaagatattggcgaatccgttggcagccatctccgaaagcccgaattcgctgagcatgaatccacaggcgacggtcatcagcgcatatacgcaggttgcgcagaacgtcatcagcactccttcggcgctcaatgtcaacggatcaagtcctgccgcgaccatcagaccgaccgccagcaccagataaccgacgcatacgacgagcgcgaatccgctgagcgtcagcaaccgctggagtcccatcgacgacatgtgttgtggggatgcggtgagacgacggcgaacttccccggtggtgaatatgcccagaatcattgacccgcagacggtcatcgccaaaaacagcggatacagcgcggttttcatggtgttgccaaatctgctggccgccatgtccgaagcactttccgcgtccgcgcttgccgtgtcgatcacagcgaccttatggttcgcgtccatgtcactcgccgatgcggcagccgctttcgatgcctcgaacagatcgccgacgctgggtttctcaatctgaccggccggcagcatatcaagtatgtcctgattcgagaattcaccaaacccgcccatgccatcttcagacgaatcacctgcagtgtctccaatgtcgataccggccatagctgcgagcgccgcactatcgaccgtcgtatgcgagccaatcagtgccgtacgtgtgagtgaaaggaacccgatgacgttcatccgggccatcgagcctgcgccggacgtatagctggtgaccgtgtccacgcttggtggattctcgcctgtcgccgcggcatcaatgaaatcgtcggcgaaaccatcggggatgatgacgatcagatccacccagttcgaggcgacggcttgttgcagagtttcactagcatcgtcaacgttcaccagttcgctggaatccgacaggtatgtgcgcatcgatgacgcgatgccgcccctgtccgagtctcgatcgatgacggcgacacgcattttggccggctcgaatgccgcggctgcggaatcggatgtgccagacagcatcgaccagctgatagacagcatcatgatgcccacgaacacgaggtaaatcaacaggtaggccctgtgcgagaacagtacacgcaatgtggctttacaggtgttcatagcgttgcctcctcagcattgcgatgccggccaagaggaataccgcgctcatcgccagcaaaatggcacaagtggtgatgaacggctggtagctgtcgtagtacaaaatgtcgtaaaacaggttcgtcacctgttgcgcggggttgatggtgccgaggatgggcgcgttgcgtgctatccagtcactgatctgcatggcgaagctgccgtacagtccggtgaacagcgacaatgtgcaggcgattccgctcgacaaaccgtatttcgtgtcgtaggaaagcttcggtaccgcgccgagcaaagtaccggctgaactggtcatgaatgcggcgatgattaccgcgaccaccgtcaccggttctcgccctccaaacgaaatgtcgcaaatgaagcgaatataggccaatgcgataagcaatgcgaccgatgcgcacaaccagcaggcaaggaaaccggcaataagctgtctggcatggctcaatggcgccacggtgcggcgaatgcccaatgcggacaggttggcttgtgctgtggagaccgtgctgattgagtaccccatggcaatcatgcaggacatggccagcaacgcgtaatagtatctggcgatggcattgggctggaaatgcgtgagcgttgtttcgtgagtcacatcgacgctttgcccgatgctattccagaagttgcggctgagcgcagcctgtggattgtcggcgatggtttgtcgggtgacggcgtcggtgcggttgtacaggtcgatggcgctgcgcaatgccgataggctgatatccagtccgacgcttcctgtggtgtcattggccgcggtcaccgtttcccgactgatggttatcgccaaacgcccgttgccgtcagcagccaggtagccgcggactgtgccatcggcgagcagctgttcggctttccgcacggtgtcggctgcggtgatggtcagcaattgctgattgatatcggcgtatgccgtgccgtccaaagactccgacgatgaggccgtctctccagacaaggcatccacaaacgtacgcgctccgtccgcctgctgccagcggctatcttcgacgacggccattggtatcggtttgagctcgtatccctcggacagtccgccgaagaacccgttgaacatggttgccagcacgatcggaaacacaatcatccagaacagtgcctgacgattgcgcaggttcgctttcaatgcgaccaaaaatgtggtccacatgatgtctccttacctgctcccgctggcgggagctgtcggcgaagccgactgagggtggttactacgggaccgcccccgcccgcttcgcgggagcccccgccagcgggggcaagattgttagtcccttaacgccttgccggtgagttccaggaatacgtcattcagggtgggcgggcgactggtcaggtggccgatgttggcgccggagcgtttcaccgcgtcgagcacgtcggtcaggttgtgttcgccgcgccggcatcgcacgtcgagttccttgccgtcgtaggtggcttcgatcacgcacggcagcgcacggacctcggccatcgccgaatccgccagatcgagcgtttcgatggtgatgcgctcgcccgtgtcgatcatgttcttgagctcgtcggcggttccgagcgccaggtgccggccgtggtccatgatgaggatgcggtcgcagatctgctcgacctcctccatgtagtggctggtgtagatcaccgtggcgccggcctggttgagccgctggatgccttccagaatcgaattgcggctttgcgggtcgacggcgaccgtgggttcgtcgaagaagatcaggtcaggcttgtgcgcgatgccgcaggcgatgttcaggcgtcgcagcagtccgccggacagtttgccgggccggaacttgcggaagtcctggagaccgacgaattcgatggcctcctcgaccagcggcgcacggtcagttttcttcggcacgtacagcgagcagaagtagtcgatgttttcggtgacggtcagttcattgaacacggccacgttctgcggcacgatgccgatacggtgcttcagcgcgtaggaggtcggcgtcatcggctggccgaacacgcgaatcgtgcccgaatcgtaggtgagcagcgcgaggatgcagttgatcgcggtggttttgccggacccgttcggtccaagcagcccgaaaatctcgccctggttcacgtcaaggtcaaagtagtcgagcgccaccatgtcgccgtagcgtttgaccagttggctgacgtgcacggccagggccgggttggttgtcgagtcgtgttcggaagctctgttgtcggttgccatagccactcccttccttggtgattccatcatcccaagaaggggccagacgccgccacaggcaaacgtcacgacttggccgcacaggcgtgacatttgtcattacagtccttcggcgtcggtctgcatggccttgtacaccttatcgaccggcatcaggctgatctcgtccatcgaatagttggacgc

SEQ ID NO: 607 - DNA, 4824 bp, Unknown
  R14_15m  MAG No. k141_3380
agatttgcggcggccatggcccaggagagacgcccggtcccattccgaacccggaagctaaggcctggcacggcgatggtactgcacccgacagggtgtgggagagtagcacgccgccgcaccacacgtacaggaagcccctcggagcacacgccccaaggggcttcccctatatccgaaaccaacaagacataggctctcgcacctagggtgtggccgaatcgaaagcatatagaagagggaaccctcaaatgacggagagttccctctttgcgtatctggacctataaaggtctagaaattgaaattgtcaggatcagcaccgttgcgcttgccggtgttgatggcggagatggcggtcatatcatcgactgataggttgaagtcgaagacctcgaagttctgcttgatacgctcggcatgagtggatttcggcagcacgacgataccgcgctggatgtgccagcgaatcaccacttgggcaggtgacttgccgtacttggcactgatctcggccaatactgggttgctcagcaggttgccgccggtaccgccgagcggactccaagcctcggttgcgatgcccttggcacgcagctggccaatgagctcttgattggtgaattgtggggaagactcaatctggtctacggcaggtaccatatcgctgtgggtcagcagctcatcaatatgatgcttttggaagttactgacgccaatggccttggcacggccagaggcataaatctcctgcaagtcatcccaggcctgctgccagccgtctgccggccagtgaatcagatacagatccacataatccacgcccaagcggtcgaggctttcttggaatgcatccttgccgtggcgtgcgcgaatatcgtcattccacagcttggtggtcaagaagaaatcgctgcgcggcacaccagcacggcgaataccttcacctactgaggcttcgttgcggtaaatcattgcggtatcgatatggcggtagccattctccagagccgtctgcaccgcgttcactgtagtatcaccatccggtgtctggaatacgcccaagcccacctgcgggatgacagtgccgttgttcagcataattgtcgattgaattgccataatgcctcactattcgtagtgttcattcaatttcctattttagaaacaagacgatgcaatgagccgcgtttcgcgggcaaagaattgcgtaatgatggcgtgattctcgttcattaggtcattattgcattcattaggtcaatgggtccagggtcttcggcatcagaacccagtcattacgccattcctgaagagccgtcttacggcataccgacctaatgaacgtgaaatcgacctaatgaatgcaacgagtaagcggctacgataataaccagtagaatcacaacccagattgaaggggagagcacgtggcagaggaatatgtggctgcattcgatgcagggaccacggcgttgaagggtgccttggttgataggcaaggccgtatcgtagccagtgcgagtagtgagcttaaccttattatcaacggcgactatcgggaacagagccccgatcaatggtggcaagctttctgctcggcctccaggcacatgattgagcaggcgcggcaatccgagtcagaattcaatgtgactcgcattcgtggcatcattttcagcggtcagatgcaggatgttattgctttgaacggcgagctcaatcccgtccgcaatgccattctgtattcggatggccgagccgaggaacaggccaagcaactcgccaagacatatcagggtggagtagaacgtttcctgaacaccgttggcaaccggctcgaaggctgcttgccgttgcccaagttgatgtggctgcgtgaacacgagccggaaacgtacgcgcgcattcgtcatgtattgatcagttccaaggactacttgatcgcccaattgaccggcgaatgcgtgggcgatgtggcggcttgttccacagccggtgccatgaatatccgtaatggccaatgggatgccgaattgtgcgaggccgcaggaatcgacatgaccatgttgccacacctgcacaatccgcaagacaacattggcacagtgacggaatccgctgcacaacgcaccggtttctccgccggaactgcggtatacgcgggcattggcgatgcgggtgccaccacgctggccagcggtgtcagccgccccggccaatacaacatcaatatcggcacctcaggttggatcgccaccgtttcgcccgaaccgttcaccgacaagccaggtgctgcgaatctggcatctggtgtggaagaagtcttcgtgaatgccgtgccattcctcaacgccggtgacgtgcataaatgggttaccggcgtattcgctgatggcgattacgcggaagcacatcagcttatcgaaacatccaaacccggctccaacggtgtgatgtgcctgccatatctggtgggggagcggttccccgtaatgaacccgaatattcgcggggcctatgtaggcctcgatccagacaccaccaaggcagacatgatgcgtgccgcgcttgagggcgtggccttctccattcgtcaaggtatggaaagctttgatgctgagcctaccgagatttccctgattggcggcggggccagagaaaatgcgtggtgccagattctggccgatgtgttggagcatcccatcgaagtgttcgccaatgccgatattctgccagcagtggcaatggcctcgttggtattcaatgtaccagacctgctgcaatcagtatgcgaatgcactgtataccagccgaatcctgacaccgcacgcacatatgccgacgcataccggcgattcctgagcctctacccgatgctgcgaacgatggattaggaactgagcatcatgaggcaatcagcgaatttggtccgcaaacatatagcggtcactggactggtgcaaggcgtgggattccgttattttacggtgactcaggcacgtcgacttggtgtacagggctgggtgcgcaattgccgcgatggctcggttgagctggaagcacaaggcagtagcgacgcagtgcaagccttggttgagcaattagccattggtccgcgatggtccgaagtgagtcacgtcgccgtacatgacatgccgattatcgatgagaccgctcgggcatttggcgtgcgtcaataacctgcatcacgaatccacatcacgcacgataatctcacgatacgggtgaacatgggcgttcctcgacgcttaggaccctcacattggtacgatggggctttatgagtgagaacatcatgcgaatcattgacctgcgtggtcagaaactgtcccgtgccgaactgctcgccgcgatgccgcgtgccgcaatgggtacttccgaagccaccgatctggtgcgtccgattctggacgatgtcaaggaacgcggtgccgcggccctgcgcgacttcgaggagaagttcgaccacgttcgtccgaagaacctgcgcgtgccggccgaagcgatccagaatgccctgaccacgctcgaccccgaagtgcgcgccgccatcgaggaatccgtgcgccgcgcccgcgccgtggcggccaaccaggtgccgaaggacttctacaccgatctggccgaaggcgctcgcgtcgccgaacgttggattccgatccagcgcgtcggcctgtatgtgcccggaggcaaggccgtctacccatcttccgtgattatgaacgccgtgccggctcaggccgcgggcgtcgaatccctggccatcgccaccccgcctgcgcgcgatgatgcggagggtctgccgaacaagaccattctcgccacctgcgccatcctcggcgtcgacgaggtgtacgcggtcggcggcgctcaggccatcgccatgttcgcctacggcgccaagggcagcgagccgcagaacggcgacgtgctgtgcgacccggtcgacaagatcaccggcccgggcaacatcttcgtggccaccgccaagtcgctcgtctccgcattcgtgggcatcgacgcggtcgccggcccgaccgaaatcggcatcatcgccgacaagaccgccaacccgagcctgctggcagccgacctgattggccaggccgaacacgatgagcttgccggctccgtgctgttcaccgactccaccggcatcgcggacaaggtacaggagaacctcaactatcgcgtgccgaagaccgagcacgccgaacgcgtccacacatccctgtccggcacccagtccgccattgtgctgaccgacggccttgaccagtcgatcgacgcggccaacgcctacgcggccgaacacctcgagatccagaccgaggatgcggatgcggtcgtcaagcgcatcaagaacgccggcgccatcttccgcggcccgttctccccggtgccgctgggcgactacatgtccggctccaaccacgtgctgcccaccggcggcaccgcccgcttcgccgcaggcctcggcgtgcacacgttcatgaagccggtcgaagtcatcgaatacgacgaggagggtctgaaggccctggccgcccgtatcaatgcgttcgccgtttccgaggacctgcccgcccacggcgagtgcgtgctctcccgcttcgtcaaggatccgtatgacaaggccaccctgcgcgagcaggagaagggagccggtctgcgatgagctcgattcccgaaaacctgccgctgcgcaacgacctgatcggtgaggagccgtacggcgctccccagctggacgtgccggtgtgcctgaacgtcaacgagaacccgtatgcgccggacccg

SEQ ID NO: 608 - DNA, 13675 bp, Unknown
  R14_15m  MAG No. k141_3831
cgttgccggtcagggacgtggtggtggccactaggaaggtgccgatgatcgaggcggtcttgccgaagatatcgtagaagccgtagtactcgttggcgtgatctttgggaatgatcttgccgtagtacgagcgggagagcgcctggatgccgccttggaacatgccgaccagaatcgccagaatccagaactccacggccgatttcatgaagaacgcggcgaagagcacgatgcacatgtatgctacgaccgccgccgtgatcatcactttgcagccgagccggccggccagacggccgtagagaatcgcgcaggggaaggccacgaactgcgtgacgagcagtgccaccaccagctgggtggagtcgatgccaagctcggcaccgtaggaggtactcatcgaaatcaccgtgttcacggcgtcgatgtagaagaagaacgcgatcatgaacatccacaacggcttgttcttcacgatcttgccgaacgtgcccgccagttcgctgaacgtgccgcgcacggccgagcccagctggtcgcgggtggcacggtagtgcacctggcggtagctggtaagcagcgggatggtgaacgccacccaccagatggcggtgatgatgaatgaggcgcgcgtgcaagccaccgtggaccagtcgaagagcgacgggccgccgaaaatcagcgcgatgcagaagatgaacggcacggtggagccgatgtagccccagccgtagccgtgcgaggagaccttgtccatgcgctcgttcgaggtggtgtcgatgagcatcgaatcgtagaacgtcagcgagccgttgaggccgatggtcgccagaatgtagacgaccaggaacggcagccaggtcaggggcagggccattgcgcagcatgtgaccacgccggtgccgaagaagcccaggaagaacttgattttcatgccttgcacgtcggcgatggagccgagcaacggcatgagcagcgctatgaccaaggaggcaatggtttgcgcgtagccccaggcggacacgatgttgccgtccgccggcatcagcgatttggcgtagatggggatgacggcggtggacagcagcacgaatgccgagttgccgacgtcgtagatgatccacttcttctcgcgggcggtcagtttggcgctttgcggcaccggttcgtggacatttgcgggatcagtcatatgcactcctcgacagtattcaactcaatctatcgtagaagcgcggactagggtagaaaaccgccaaagttgaacggcgggtgaataatgccgggcccctttctaaggggagccagagcaaaaaaatagctcccctcgctgaggggagctggccgcgaagcggactgaagggagccgatcgtggattcccccagatgaggaaatccactcaatcgtccggaaactattcaccgatcagcgcgatggcctcgtcataatcggggcattgcggcacgccgttgaggctgcgctggatggcgatggatgccgccgcgttggcgatctttaccgattcggccagactatggccctttgccagcatcgcgcacatcacgccggtgtggcaaccgcccgccgaacgggtgtgtacggccttggtcgggtatccctcgatatgaatcgtctcgccacctggctcacgaatccaagcgccgcgggcgccgacacgcaccaccagcggcgcgcgcagtgtagtgcccaagccgtcacacaactggtgcatgaagtcgtcgagtccaccgccgatggtgaccttgctgtcgtcgatcggcgcgccgagtcgctcggccagcgtcatggcctcctgacggttgcaggaccagaccgggcgtgcgagcaccaggtcctcaagcatatggtcattgaccagacgcaacgtattggtgggattgatcaccagcgtgtagtcgcgtgcagccgggtcggtaccggccttgagtaggaatccgtccacgccggtggccgtgtggtccatcagtgtgttgccgctgatgtgcaccacgtctttgggctgcggctccagcgtgttgaacgtgtccgcgtcgccatgagcctcggcgccataggaagcgatgaacgtcttcttcggcgcgccggagctcagcaccacgcggaagccggaatcctcatcaagacgatcctggccgatatgcgtgatgccgttgtcctggaatgactggcggatgaaatgcgcccacaggccgttgcccagaatgccggcgtgctcggtcggcacgcccatgcggctggccgcctgcagcacgcgatagctgccgccaatggagggcttcggatgatcggccacggcgaatccgccctgtgccggcacctcgtccacattgagcataatgtccacccagacttgacccagtgaaatcacgctgggctcgtgagtgccgatacctcgcctgagattcaacatgacagcctccttcgtcgtaagttgcacgaggaccccttcgtcccttgccgtctcttataccgagattatatgagagtttgctggatgcggaataggcagtccggcgtgttttatcgggtaaacgctacgatttgcagcgtaattcgccgctggcgaaccgctggcgaactgctggcgaactacttgcggaccgctggcgaaccaatgccgaaccgctcgcgaaccgctgatggcccactcgcaagttacgctcgaaccgcgcgtgaaccgccgaagttcgcccatgatacacgcaagagttgcggttgtcggtattgggctatatatttgtgaagttgtgtgttcggcatgtcgggtgaaaccggcggtcgaatgcgtgaaagacttgacacatcaaggttaagggagtccatcatggcagctcgttgcgcagtgtgcggcaagggaccgcagaccggtttcaccgtttcccattcgcaccgtcgtaccaagcgtagcttccgcccgaacctgcagtctgtacgcaccacgattgatggcgagaacactcgtctgcgcgtgtgcgtcaagtgcctcaaggccggcaaggttcagcgcgtggccgcgtgaatcgcgtactaacgtggagcaaaacccgtttgagcttcggctcagcgggttttgttgtttctgcggcctaaagaggccgtgcgaatagaataggccaatatgagcatcactatggacaccactctcgcttcgctggtcaccaacaagcgtcgcgtgtccgcgctcaaatcgctgggaatcgtcactgtcggcgacgccctgacctactatcccttccgcgtcaccgaaccggtgccgcttcgcgccatccgcgaggccgcacccggccagcagatggcatttgccgccgtgatacgagacatgcgcgtggtgccgatgaacgctcgccgcggctaccgactcgaggcgacggtcgatgacgccgacttcgcccggtctcgtcgcgtacccggcagcacggcccggctcacgttcttttcgtatcgtaaatcgtatgtggattgggtcagcatgcggctgcgcgccggcacgtctgtggtggtctccggtatgcccagcgaatacatggggcagctgcaattcacgcaccccgaaatcctcactgtcgcgcccgggtcggccggagcaggagcggggcttgagggttacgctcggggtgcggcatccggcaatggtgcgtttgcgggaagtaccgatccgtatgccagtgtgcagtccgcgtatccgccggccgcggctgcctcttccggggccgcgctgaaatacgacgccgataccgtgcaagaggcgcttacccgcgtctgccggccccgcccggtatatcacgccagttcgcgtatctcgtccgaacatattcatgagacgattctgggattgctgtggatgatgggggcccgcacgtcatccacgcctgacgggcaactcgctggcgctgggtcagccggcattgtggctcccacgaccgacaccatcgccgtccaaaacggggaagagaattccggcacgaccgccgaatccggtgctgaggcgctctcccaatccatcccagatgtgctgcccgaatcggtgcgcaaggccaagaacctcatgcatcgggctgaggcgttcctggccattcatgatccggcctccacggtccggttcaaggaggccatcgaaaccctgcgctatgaagaggctttcgtttcgcagacctcgctgcttaaagccaggtcgcacgcccataaatccgcggctcactcttgcccgttggtaaccgacagtctgcgcgatcagttcatcgcatccctgccgttctccctcactgcagggcagcagcaggttattcatgatattgccgccgatttggctcatgactggccaatgcagcgtctgctgcaaggcgaggtgggctccggcaaaaccgtagtggcgctcgctgccatgctccaagccgtagacgccggctatcaggccgtgcttgttgccccgactcaggtgctggccgagcagcatgccgaaaccattggccggatggtggagcaactcaagccagcgattccagtcacgttgttgacgggcggcatgaagcttgctgcgcgacgtaaagcacttgctgcggcgtccagtggcgagccgggcattatcgtggccacgcacgcggcgttttccaagaccttccaagccccgcacttggccttggtggtaatcgacgagcagcaccggttcggtgtggaacagcgcgaaagtctcaacgccaaaaccgatgacggcaccacgccgcatctattggtgatgaccgccacgcccatcccgcgcaccgccgccatgacttggtttggcgatctcgatatttcctggctcaccgaattgcctggcggccgcaaaccgattcgcaccgtggtggtcaatgaggccgacgccgccaccatgggccgtatgttcgcgcacattcgcgcgcgagtcgacgcgggggagcgggcctatatcgtgtgcccgcgcattgatgcggatgatgaggggaacgaaggcggttccggcgtttcggcagcagccggttctgcccgcggacgcgccgcagcatctggttccagtgcccgcacagctgcgggcggccgtgcaacgcgcgcggcggccgacgccatcggcatcgacgacccctacgaaaccttcgacgaaaacggcgaaaccgtggctcgcccgccattgcatgcggtggccgaaatcgccgaccggttgcagaaactcccgcaattccaaggcattcggtttgcgactctgaccggccgcgacaaggatgacgtcaaaacccaggtcatggccgattttgccggcggcgagactccgattctggtgtccaccacggtgatcgaagtcggtgtggatgtgaaacaggccagctgcatcgtgatctttgatgccgaccgatacggcctctctcagttgcatcagctgcgcggccgcgtggggcgtggcggcaccaactcgtgggcgttccttatttcccgtgcggaacccggctccccggccgagcaacggctcgaagtgattcaccactcgctcgacggtgccgaaatcgcccaagccgacttggaattccgcggtgccggcgatgtgctcggcgacgcccaatccggcggcaagtccagcctgaagctcctgcgcgtggtcaaggacgccgacatgatcgccgacgcccgcacccgtgccgagcagcttctggctgccgaccccgaactggcagacgaggtccaactcgccggtgccgtcctcgacttcacccgaggcaacgaaaccttcctgacctccagctgaggctagggctgcgccccccgtaatcgcacgatattgtattttcatctggtaaacagaagtaaatgcttgtgccagagacggattgcatatgcatgggtgcttcgtggaagctgattctgtgttccgttgctgagttacggacgtgctggcgatacgcagctttcgcgttcgacaagctgcgtgggaaaaatgaagtaattctgttccacctttccttcccgcgcttcgagaatcaggttgatgcattgtctggcgatgaggtcgaatggctgcctgatggtcgtcagggatggacacatgcttgccgcaggatagacatcgtcgaaaccgatgatcgataattgttcgggcagactgatgccgtgctgtcgggcggcgcgatagacgttgatcgcgccgagatcgttgaacgcgaagatggcggtcggtcggtcctgctccctcatttccaggagatcgcatgccgccttgtatgccttgtcagatacgtagtcgccaaccttgatgagatgtggatccgcgctgatgccgtttttctgcagcgccgccatgtatccgctcagtcgcgcctgcgaggactgtgaattagtagggccagtgatgacggcgattcgtcgatgccccaatgatatgaaatattgcgtggcgagcattcccccggtccagttatcaatgcccactcccaatgcgtcagcggagacctggccgaccggatcgacaattacatatgggatgttcctcgtctgcagcagcgattcctcggccgatgagatattcgataaaagaagtatgacgcctagtgggttgcgttcgatggcgttacggaggcagctgctggcctcgtttcttgttgcgtattctccggaatccggtccggcgcagcttacggtgatgccgaggccaaaatctctggcgtatgaagctgtctccttgaccatttccacggtgccgttgttggtcatttcgctgacgaccagttcgattgaccgcatggtttttgttgtgggaagttttttgcggaatccggcttcttcgaggagcagttccaccctatcgcgggtctcgtcggagactccatcacggccgttgatgaccttggacacggtagcgggggatactcccgccgcttgggcgatgtcggagaccttcggtctgtttgttgttttgattgtggccatgactcttctcttttcgtatgcgacgctgcaaaaaaagcgttatatatagagtagcgaaattttcgctactctaaaacagcttttttatcggcgtattgctgtctatatagcggaaatgggtgttgtagacatggattggctgctgtttcttcgatgagtacgatttgtgcatatcgttgcaataaagcccttttaaggcgaaaaacaagataaagaaaatttcgccacgcgcaacgaagttttatttgctcttttttgtaaaaccttgtatattgaacgtaccgatgaatgaaacggcaatggcaacgatgttgttggcgggctcattcagacgggttaagaagaaagagaaaaactatgacaaatgcaacggcgaaaccggatacttccgggatgcgcaagccgaagcgcgagtacataggcatgttatattgtcttccatacgtggtggtcttcctattcggcatgatcatcccgatgttctacgcgctttatctcagcttcttcaagcagtcccttcttggcggcaccacattcgcaggcttcgacaacttcatagctgcatttaaggatgaagcgctgtggagcggtttcagaagagtgctgatttatgcggcgattcagattcctctcaatttgatcctttcccttgtggcggcgctcattctggattcccagagaatccgccatatcgcagtgccgcgaatcctgctgttcctgccttatgccgtcccaggcgtcatcgcagcactgatgtggggatatatctacggcgacaagtatggccttgtcggccagattgcgtctatgatcggggccactgcgccgaacatgctttctgaaaagctcatgctgttcgccatcgcaaacatctgcacttggtgttctcttggctacaacatgctgatttattattctgcactgatcggtattccgaacgagctgtacgaatccgctcgtatcgatggcgcatccgagctgcgtatcgcatggtcggtaaagattccgcagattaagggatccattatgatgaccgtgctcttctcggtgatcggcacgcttcagttgttcaacgaaccgagcatcttgatgaattccgcgccgaatgtgatcaccagtaactacacgccgaatctctacgcatataaccttgcgttcaacggccagaacctcaactatgctgcagcggtctccttggtgattggtgtcatcgttatgggtcttgtcgcagtcgtgaaggtcattggcaataagtgggagaacaagtgatgagtgaagcaatcgcaaaaccacgttccaagtcgctgcagcgcagagacgccaagctggcgctcaaggcgagccaacgctataagcgtatgcagcagcgtgaggcagctccaaagctgaccggcaagcagcgtgtgcttaactggctgctgcacattatcatgggcctgatggtcatctactgtctcgtgccgttgctgtgggtgttcttctctgcgacaaagaccaacgagggcatgtttagctcctttggtctgtggttcgatgacaagaatgtgttctggcagaatgttcaggaaactcttgcatatcagcatggtacatacgcacggtggttgcttaacacagtgatgtatgcagttgtcgccggatttggtgccactatcatcgccacacttgcaggctacgccattgccacaatgcggttccccggacgtaatagtctgttggcgatcaccttggcattcatgtccattccggccacggtcatctctgtcccgctgttcctcatgtactcgaagattggtctggtcggtaccccatgggcagtgattattccacagctggccacgccgttcggactgtacctgatgattatttatgcgcagacatcggtgcctacttctctccttgaagcggctaagctcgatggtgcaaattcgtggaccatcttctggaaggttgccttcccgctgctgtctccaggtttcgtcaccgtactgctgttcacgctggtcggtgtctggaacaactacttcctgccgctgatcatgctctcggacaccaacgactacccgatgacggtcggtttgaacatgtggttgaagatgggtgccgaaggtaccgcggacggtcagattccgaacaactacattgtcaccggatgcctcattgcagttgccccgttgatcatcgcattcatgttcctgcagaagtactggcagtctggcctttcggctggtgcagtcaagcagtgaatcctcgccgcacggttattggcgatcacccattcgttgctctaatgaccgtgcggcatccacatccatttgaagaacaacaataagacagtgattcatgacacacaaaggagtaatcatgaagaagatgaccaaaatcgtcagtgcgctggcggcgcttactatggtagccagcgttgcggcttgtggctcaagtactggtgccaaggacactaaaactgcagtcactgtagaagacattaacaacgctctcaccgatacttccaaaaaaatcgagctgaacgtatggggattctccggaaagcagatggcaggaccgattgaagctttccagaagaagtacccgcacatcaaaattaaattcaccaacaccggcgcggcaagcgaccatttcaccaagttccagaatgtcgttgctgccaataaagatgttccggatgtcgtgcagatgagtgctgaccgattcgaacagtacgctatctctggagctctgctgaatttcgccaacgatgatatcgaaaaggcgtggagcaagctttatgcaaagaccgcttggagccaggtgcattatgctggtggtctgtggggcgtgccgactgacgccactcctttggccatgtatgtgcgtaaggacattctcgacgagcataatctcaaggtgccaaccacttggcaggaattctatgaagaaggcgtcaaacttcacaaggaagatcccagcaagtacatgggcgtcctcatcaataacgatatctcctgctttacggatttgctgcgttcggctggtgcgcgcccttggaaggtcaattctgttgatgacatcagcttgagcatgacttctggcactaccaaggagttcattgaattcctgcaaaagtgccttcaagatggggtcatggaggccgctccaggctggaccgatgcgttcaaccgtgccacgaatgagggtacctatgccacttatatttctcagaactggcaaggcaactcctacaagggacagaatccatctcttaagggtctgattcaggtaacgctgccacctgcattcggcgattctgccgatgatttcaagtcttcttccgtcggctccatgatgagtgtttccgcggcatgccctaaggacaagcaggctgcagcccttgccttcatcaattggcttgattccgacaaggaagcaattcagtcttggcaggataacaaccacggcaactacttcatggcagcttctgcttaccaaaatagcgaagacatccgcaacatgaaggaaacagatggatactttgtcaatactgacgtgaactccgtctacttcgagtccatggacaaggtcaatactgattgggagtatcttccgttcatgtctcaggttggagtcgtatataaggatgtcatcactcctgaaatgaaggttggcggtgacatggtcggcgctatggccaaggctcagcagaagctcaagacctacgcaaaggacaacggcttcaaggtcaccaccgacgccgactgacatccggcccgccactgctagggagggcggccgaatggccgtcctccctttttgagattaaccattttccaaagaaggaagcgcatcgtgagcgttattaccaaagtcaccacctatgatttccgattcccgacgtcggccaccttctccggctccgacgccatgaaccctgatccggattattcctccgcctatgttgtcatcagcacggatgccggtgattccggcaacggattcgtcttcaccatcggccgcggcaatgatgtcgtcgtccgagccatcgactccatgtccgaaacccttatcggacgtaacgtcgaggaactgctcgacaacatgcgtctcgcatgggatctgttcgtgcgcgattcgcagctgcgctggctcggccctgagaagggcgtcgagcatatggccattggcgccgtgctttcggctttgtgggacctcaaagccaagcgcgccggcaagccgctctggctgctcctttccgagatggagcctgaagagctcgttgcgacgcttgacttccgttacctgaccgacgccctcactccgcaggaggccatcgatatcctgcgcgccgcccaggaaggcaaggcggagcgtatcgcccacctcaaggaagtcggttatccgggatattcgaccgccgccggatggcttggctattccgacgagaagatggtccgcctggccaagcaggagaccgaggtcatgggcttcaagcagatcaagctcaaggtcggccagaacctcgaggatgacctgcgcaggctcaagctcgcccgtgaagcggtcggcccggacatcgccatcgccgtagacgccaaccaggtctgggatgtgccgcaggccatcgaatggatcggcaaattcaaggactacgacctcgcatgggtcgaagagcccacctgcccggacgatgtgctcggccatgccgcgattcagaaggccatcgaccccattccggtggccaccggcgaacagatgcagaaccgagtcatgtacaagcagtacctgcaggccggcagcttcaaggtcatgcagatcgacgccacccgagtcgccggtccccaggagatcgtcctcgaatacctgctcgccaagaagtttggcgtcaaggtctgccctcacgcgggcggcgtcggcctgtgcgaagccgtcagccagctcgcgatgttcgactatgtgtccgtctccggcgagatggaggaccgcgtcgtcgaatacgtggacaaccagcatgaatacttcgtgcatccgaccgtcatcaagaacggacgatacgtcgctccgctcactccgggcaacggcacggagatgaagatcgacgaatgcatgaagtacctgcacaaggactgaccggtcgggaggacctgagatggacctgcatcttaaagacaaggtgatcattgtcaccggaggcttcaaaggcatcggcaagggcataacgctgcgcttggccgaggagggcgccattcctgtggtgctgaaccgtgatgacggcgccggcgacgaattccgacaggacattgaacgaatcaccgactcgtatgacacgtatctgatcgacctgaacaacaccgacgacatcgcccccatcgtcaagtcggtcatggagaagcacggccatatcgatggcgtggtcaacaacgccggaaggaacgacaatctcgcgctcgagaccacgtcgtggcgtcagtttgaggagtcgattcacggcaacctgacccactactacgagctggtccatcagtgcgtgccggcgctcaaggccagcaagggctcggtggtcaatatcggttccaagaccgcattgaccggtcagggcaagaccagcgcctacgccgccgcgaagggcgcgattctgggactgacccgcgaatgggccgccgccctcgccccggacgaggtccgggtcaatgccgtcgttgtggccgaagcatggacaccgctgtacgcgcaatggatcaagacgttcggcgacgagcaggcacagcgcgcgcagcttgagaagatcaccagcaagatcccgctcggccaccgcatgaccgagacgtcggagatcgccgacaccgtggcgttcctgctgtccgacaggtcgtcgcacaccaccggacaatgggtcttccccgacggcggatacgtccacctcgatcgggcactcggctaggagataccgcacgggggatcatcggttcgcgttcgcgtgtccggatcccctgttttcgattcatcgctccaacaccgctcggcccgcggacatattcgccaccgcacgcggaacgcctaccatatcgtcgaaaggaaaaaatcatgacttgcaacgcccaattcgaaggcgtgttctgcccttccatcaccatcacgaacgcggatgggaccattgactacgataattggggcaagcacctcgatcatctcatcgacgcaggcatcgacggtgtgttgctgttcggcagtatcggagaattctacgccatcgacgtcaagacgaaggcagaagcggtgcgtttcgccgtctcgaaagtcgctggacgcatgaaggtgctcgttggcgtgggagacaccaacttggacaatgtgagaacattggcggcggaaagcgaaacagccggagccgatgcattggttgcagtatccccgtactatttcggaccatcaccggattgcgcgaagcgctacttctctgcggtggccaaggcgacgacgctgccggtcattctttacaacttcccagccaggacgggcaacgacctcacgcccgaactggtggcggacctcgcagcggagaaccagaacatcatcggcatcaaagacaccgtcgacaccatcagccacaccaggaaggtcatcgctgccgttcgtaaggtgaatccatcgttcagcgtgctgtccggattcgacgagtactacaccgtcaaccgaatcagcggcggcaatggcgtgctgtgcggattgacc

SEQ ID NO: 609 - DNA, 49952 bp, Unknown
  R14_15m  MAG No. k141_3922
cagcaatcgcggccttgagctcctcgaccttgtcggtcttctcccacgggaactcaacgtccgtgcggccgaagtgaccatacgcggcggtcttcagataaatcggacgtttcagatccagctcgtcgataatcgcagcggggcgcaggtcgaagaccttgcgcacggcggcggcaatctggcctcgcgtcacaccctgctcggtgccgaaagtctccacattaatggacaccgggtcggcaacaccaatggcataggcgacctgaatctcgaccttgtgtgccaagccggcagcaacgatgttcttcgcaacccaacgagtcgcatacgcggcggaacggtcgaccttggacgggtccttgccggagaacgcgccaccgccgtggtgggcggcgccaccgtaggtgtcgacgatgatcttgcggccggtcagaccggcgtcggccgccgggccgcccaggatgaacgaaccggtcgggttgaccagctggcggtagttgtcatgcggcaccttggaacccagcacctcatcaagcaccgggtcaatcacgtgcttcttcagctcaacagcaagccaatcctgcgtaacctcaggatcatgctgggtggagatcagcacggtgtccagacgaacgggcttatcgttatcgtcatactcaatggttacctgggtcttgccgtccgggcgcaggtgcggcacttcaccggacttgcggacctcggtcagacggaaggcgaggcgatgtgccaaatagatcggaagcggcatcagcgtcggagtctcgtcggtggcgtagccgaacatcacgccctgatcgccggcaccctgtgcttcgtaacgttcttcgcggctggcggcggtctcctgatcgccagtcagacgggcaacgccctggttgatttcggcgctttgctcggtgatggccaccacaacgccgcaggaatcggcgtcaaggccgacttcggaggaggtgtagccgatgttgcgcagggtttcgcggaccttggactgcacgtcgcagtaccccttggacgtgacttcgccgaagaccaggaacacgccggtggcggcggaggtctccacggccacatggctggacggatcctgggccagcagatcatcaagaatggcgtcggagatttgatcgcagaccttgtcagggtggccctcggtcacggattcggcggaaataagccgatgttcttctgtcatatcatccctttcttcaggacttatcgccccgcgggatgcgaggcacaatgatacggtgtcaatttttacttgtcactgcggaagcgggcataaataaaggctcgtgccaaccagcgcggtggctcgagccttacgtcttgttcgctcctgatgatgagttatagctgattgcgataactcaggcaagcgtgtcgctcaaaatcagttgtgagagaactctcacaccatcattcggcgacgaactgtccaaacaatccaaacgaatcgtctgaatcgatcagttgccctcgttggcgtcgtcctcgcccaaggtctcctcaagcagaccctcgtcgatctcgcggaaggcgatggacagaggcttctcgttgttctggtattcgaccagtgggccgacgttctgcagcaggccctcgttgagctgcgtgaagtaggagttgatctggcgtgcgcgcttagcggcgaaaatggccagcgcgtacttggaatcggcgtgcttcatcagatcgtcgatcggcgggttcgcaagaccgtcgggtgtcgggtcagtaccaaaagccattgttcttatctccaaacattggaaaatctatctcaaccgaagcaagtgtagccgtttggggggacttctgtcagccctataccggactctcgccagaggaatgtattccaaaaaatatgtgtaagaaacgttacgtttttgcagattccattattcgactcttgacaagtggcgtgtccctcgcaaaggcttgaatagagccatgactgaaatgcgatctgcaaaaattatgtcagggcgcgtctttgcaggcgcccgagccctctaccgtgctgcgggcgtcagcggagacgacatgggcaagaagcccatcatcgccatcgccaactcgttcgatgagttcctgcccggccacgtccacctcaacaaggtcggccgcatcgtttccgaggctatcaaggaagccggcggcattccgcgcgagttcaacacgatggccgtggatgacggcatcgccatgggccacactggcatgctctactccctgccttcccgcgacatcatcgccgacaccgtcgaatatcagtgcaacgcgcactgcgccgacgccctcatctgcatcccgaactgcgacaaggtcgtgccgggcatgctgatggcagccctgcgcctcaacattccgaccgtgttcgtctccggtggcccgatggaggccggcaccacggtgctcgccgacggcacagtcaagagcaccgaccttatcgacgtgatgtacgccaccgctgacgacagcgtctccgatgaggaactgctcaactatgagaagaccgtctgcccgacctgcggctcctgcgccggcatgttcaccgccaactcgatgaactgcctgaccgaggccatcggcctggctctgcccggcaacggcaccatcctcgcctcccactcctaccgcaaggacctgttcaagcgtgccgccaagcaagtcgtcaagatcgctcaccagtactacgacgattccgacgattccgtgctgccgcgctccatcgccaccaaggaagccttcgagaacgccatgaccatggatgtggccatgggcggttccaccaacaccgtgctgcacatcctcgccatggcccagtccgccgacgtggacttcaccctggacgacatcgagcgtatttcccacaccgtgccgtgcatctgcaaggcctcgccgtccggcaagtgggagatttccgacgtgcatcgcgccggcggcatcaccggcatcctcggcgagctcgaccgcgccggcaagctgcacaccaacgtgcattccatcgactacccgacgctggaagccaagctggccgattgggacatcatgcgcccgacctgcaccgaggaagcccagcagatgtacaaggccgctcctggccacatcatctccccggagccgtggacgcacaccaccctgttcgactcgctcgaccgcgaccgcaccaacggcgccatccacgacatcagccacccggagattcacgaaggcggcctcgccgtgctgcgcggcaacctggcccccgacggctgcgtggtcaagaccgccggtgttccgccggagatctggaagttccgtggaccggctctggtggtcgactcccaggagcaggccatcgaggtcattctgaacgacaccctgaagcctggcatggcgcttgtgattcgttacgagggtccgaagggcggcccgggtatgcaggaaatgctgtacccgacctccttcgtcaagggcaagggcatcggcaaacaggtcgccatgctcaccgacggtcgctactccggcggttcctccggtctggccatcggccacatggcgcctgaggctgccaacaagggcccggtggcgctcatcaagaacggcgacatcatcgatatcgatatcgaagcccgttccgtgaacgtcgaactgactgacgagcagctggacgagcgtcgtcgcgagcttgaggctggcgacggctacgtggctcaccgcaaccgccacgtctcccaggcgctgaaggcgtacgccgccttcgcccgctcggccgacaagggtgcgacgcgtgacccggagctgatcaacaagctctccggtctcaactgatcgccgattgcatagctgaaaggcccggcatcttctttatgaagatgccgggcctttactgtgcttccgaaggcgggggcgatattgcttgttatcgcacgcaggcggcgggggagaggcgtgcgcctcgggcccagtcggcggcgcgcatggccttcttgccttgcgccttgacttgggtgagttccagcggcgtgctgccggtaccaacccacacgttcttcttgcccaccttcagctcgccgggctgaagctcggccggagtgttgggattggactggtcggccggttgtgcggcgagaatatgcagggcgagggatttagcggttgactcgtcattatcggcgattggcccttccgcaaacagttcggtccatgccccgggatgtggcgtgcaggcgcgaatctgacggtcgatggcctcggcctcgtccgtccaactgatgcgggcgtccttcaccgtgatcttgtgcgcgtattccaggctctcggccggctgcgcggtgaatgtggcggtgccttcacctacggcggccagcgcatccacatacatgggcgcgccttcctcggccagacggtcaagcagttcgccggaagtctcacggccggtcagttcgatggtcagggaagcgacgatcgggccatcatccaaaccctcgcccaccttgaacacgtcggcgccggtggtcgggtcgcccgcccaaatcgcacgctgggcgggagcggcgccacgccacttcggcaggttggagaaatgcaggttgtaccagcccatgggcaccgcatcaagcacgttcttgggcaggatattgccataggcgatgacagcggcgatatccgcatgcaggtcgttcaacgcctccatgaattcgggggagcggggtttgagatcgatgacgggcaacccgagctccagagccgtcgccttgaccgggctgggcgtgagcttgcggccgcgaccggtaggcgcatcggggcgggtaatgacgccgaccacatcaaaacgtggatcggtggcaaaggccttgagcgagggcaccgccacgtcgggggtgccggcgaacacgagtttgagcatggtcctccttgaaatgtcgatgctcactgcacggccggaatgttcacgccattggcgatgagcagttcacgcagcttgaccggatcctggaaacgtacgccacggatgccggccgcattcgagccgacgatgttcatggccttgtcgtcgatgaacaacgcgccatcggccttgatgccgaactggttcaacgcggcctcgtagatttccttgtgtggcttgcgcagcttgacaaaaccggagacgagcttgccatcaagctgctgcaaaatatcgcactgttcctcggccacgtggaacagactggattcccagttgctcaggccccacacgccgatgccggcagccttcaggtcattgaccagcacgcgcgcgcccggcacgatgccggtcagggagtcgcggaagttcttgatgtagtagtcgaggatgtccgcccacttatcgcccttgtcacggcgcatgatggcgatggcctcgtcggtgctggtgccgccgtccatcaggtcgttgacatcgtagaagccggagatgtcgttgtcgaggaattcgtcgatggtcttctggctgtagcgggggatgagtacggcgaccggatcccagtaaatcagcacattgccgaaatcgaagatcacgtcggtgatcggcttgccggcgttcgcagcggcctcgccatccgcgaccagcacgtcgtaatccatatccggctctccaggccaacccttcatagtgtcctccttctagcgatgttcattctgtaattatcgtttcacgtgttgaagacgattagatcaggtccttgggatctactcggaagcgaagctcgccgggttcgcgggacgccacatgacgagcggtttcccggtgcagtcgggccgccagctcggctcgccgactctgcggcacacggattactgccttcacccggtcggccgtggcttcgagctcccgggcgtcgaccgtgtccggttgcgcgatcggcaccgggcccaacatgccgggcagctcgccgcaggccgtccaatcgccgcccagcgcgccgatacgctgcatcagcgtcatcaccgcatcacggcgtccccatacgcaggcggcggccacggccggcggcataccggtctccacacgctcctcaagatccttggctgcaagaatcctcgaatcccagagcatcagcgattgggcgatggccgggtcggtttcgccgagaatcaacgcctggccgccacgggaacgcggcgcgcacaacgacaccgcacgcatccacgcggtcaatgtatccaagcgagcatccacgcccaacgcatacaagctggtccaagcgtcgagcacggccacggcacgatactcatggccagccgatccctgctcggcactgaccggacgcacgcgcggttcgaaaccgggagtggcgatgacgatcatcggctgacaagccacatcgcgcaccagaccctgcgtcttgctggacaaaactactggcacgccacggaacaatccggccagctccgccgcagtgcctgcagcacccacgcgcaccacgcgcatacgttcatgcccacagcccggacacttccagttgatggcggcagccccacaccagcggcatcgcggtgtggagtcccggcggtcggccggtagttgcaatggtccggaacacttggcgcagcgcacctgacgatggcatttcgcacaactcagagtctcactgacgctgtcttgcggaatggacagcagcacggggccgctctccaaagccttagatagcacgcggacggccgtatgcggcacgcgcgccccgatggacgggtcggcaagacgcgcaagttcatcgcgattgagccaacgcacccaaggagtggcgtccttcagcggcgaggcgagcggatgaattgtggtggaatagccgctcactggggtctccactgtacctggaccggtgttttcccactggctttgcggggtgcgcgcattggccatggccacgaacacgccgccatgggacttggcgcgcagccgcatcacgccacgggcctgtggatatggcatcataccgtccatgttctgataggcggcatcctccagaatggcgaacagcgccgggccttcaaccggcgcatacatcaccgcacgggtgccgatcaccaccttcacctgtcccaacgccacagccagataggtgcgataccggtcggccgcgggcatggtctccgcgttaagcacggcgacgtcgcccacccagccgccggccggagcaggggcgaacggtttgagcccataattgcgcagcataggcatcaggtcttcgacctcgcgcatggtgggcaattcaaccacggcagctttaccggcactcagcgcagtggccaccatccatgccatgttccgttgccactcctgtgcaccgggcagcgaatcaaacacaaaagattggaaacgctgaccggtaagcgcatcatgaagcacattgacgtcggcgtaattggcggtcagacgacgatacccctgcgcagccccctccgaaacggtactggcaacggcaaaggtagagccagcaggcatggtcccatcgggattggtgccacgcccggcaaaaccaccctgcgtattatctggtagggagccgccgaccggtcggcggaacgacgcggccaaccgctgttcggcctccaccttggccacgcgcggtggcacagcgaaacgcagaatattggcccgtgtgccgccataggctttggcaatcagaccgatatcctcacgcatcgatgcgggaaccagcacatcggggctcaatacccgttcgatatagcgaatcgaagagcgcggggtatcgctggtatcggtgcgtgcccagatcacgccgctgaccctttgaccgccaaaccgcacgcgcaccagcacacccggttgtgcggcctcgctgtctttttcatcaatgaagtaatcgaatgtctggccgaggtggagcgcctgcacatccaacacgacttgcgctatgggatgctgctcggccggcgtatgctccgcaggcgcacgtttacgccgcttgcggggagccagccccgcaagcgtcaactgttctgcgcctgaagtagtcatggctcaactataagtgccggagccgaggtcggtaaaattttaccggcgcagataatcgagcacgtgggttaggtcgcggtcgttgatggctttgtcggcggcgagctgggtctttggcttggcacagaacgcgagacccagaccggcggcctgaatcatcggaatgtcgttggcgccatcgcccacagccacggtctggctcatcggaatacccaaacggtccgcccacgcttgcaaggcgtgcagcttcacggtcttgctcacgatttcgccgagcaccttgccggtcaagcacccatcggcaacctcaagccggttggcaatccaatagtcgatatggccctcggccgccaacatgtcaaccacttcatggaagcctccggacaccacgccgatcttccaaccgtgttcatgcagcgtgtcgataagctccagcgcacccttggtgaaatgcagcttgtcatgcaccgtgtcgaacacggagatcggcaggccctccaacagggccactcgtgcgcgcagcgcatcgcagaactccagttcgccgcgcatggcgcgtgcggtcactccggcaatctcctcaccgcagccagccaccacgcccaactcgtcgataacctcttcgtcaatgagcgtggagtccacatccataaccagcaggccgggcttgctcaacgtcggcacagaaaccgcagaatcagccgggctcccaacttcgctctcggcggacttgtcaacaaaatgcacatcttcttgcgtcatgcttctgattctgggaaaaccttgggacaatgccctctatgaatttttccatggcagccgccactattcttgcaaccgaccccacacccatctgcaccaccaccgaacccggcctgatcggcaccatcaccgactggctgatcatgctgatggaaaccatcggcggtatcggcgtggccttggccatcgccctcgaatccatcttcccgcccatcccgtccgaagtcatccttccgctctccggcttcaccgccgcacgcggcaccctgagtctgccgggcgcaatcatctgggccaccatcggctccgtactgggtgcctggaccttgtacggcatctcccgctgggtgggcctgcatcgcatcaatctcgcggcagacagaatccccggcgtcagccgcaaagacgtgagcaaagccaacgactggttcaccaaatacggcacatggtcagtgctcatcggccgcgtgattcccgtggtacgctcgctgatttcgattcccgccggattcaaccgcatgaacttcctgcacttcaccggctggaccctgctcggctcggccgtgtggaacaccatcctcgtttccgccggttacctgctcggcgaccagtggtgctcgattcaaggcgcgctcggcgtgttcgaggacgtggtcatcgcggccgtgattgtggtcatcgtatggttcgtggtgcgaaaagtgcgtactgttatacgtaacaggaaatccgccgacggcaacgaatagggtctgccgactgccataagttgccgaaaatcccggatagaagggaagcgaagaacccgcatgagcgacaccgaagatctcgccgcgctgaacgatcgcctgatggccaagaaccatgcgctcgccgaagcgctgagccgcgccggcaaggaactgaccaaggcgaagtcacagctcgcccagctcgctcagccgccgctcaccttcgccaccatggtcaaggtcgattccacccgcaccgatgaagacggcatccagcacgcgtcggccgaagtcatttccggcacccgccgcatggtggtgcctgtggcctccaacgtcaacgccgcccgcctgaccgccggggccaccgtgatgctcaacgagaagctcgtgctggtcgagcagcgcgatgctgacaccgtgggccagattcgcagtgtcaagcaggtacttgacgacggtcgactgatcgttaccgacgcctccggcaatcccgtgctcatccgccgttccggcgcgctcgcgtatgcgggcatcaatcagggcgaccgtattatcgtcgatccgtccgtccgcctcgccatcgaagtgctgcccgccgagggcgacaaggatctggtgctggaggagaccccggatgtcacgttcgccgacatcggcggcctggatagtgagatcggtcgtatcagggacgccgtccaactgccgttccagcatcgtgcgctgtttgagcgctacgatttgaagccgccaaagggcgtgctgctgtacggtccgcccggcaacggcaagacgatgattgccaaggccgtggcgaacgccctatgcgagggtggctacgattcgaatggcgacggcgcaatcagtccggccgaaacccatgtcaagggcgtgttcctgtccgtcaagggcccggaactgctcaacaaatacgtcggtgaatccgaacgactgattcgcctgattttccagcgcgcccgtgaacgcgccgcggacggcaatccggtggtcgtgttcatcgatgagatggattcgctgctacgcacccgcggctccggcgtctcctccgatgtggagaccacgattgtgccccagttcctctccgaactcgacggcgtggaatcactcgacaatgtgatggtaatcggtgcctccaaccgcgtggacatgatcgatccggctgtgttgcgaccggggcgtctcgacgtcaagattcgcgtcggccggcccaaaaccaatcaggccatcgccatcgtggaccattacctcaccgacgacctgcctctggaagatggcgtcgacgcgcacgccttgtccgccgtgctggtgcatgacatctacggaacctccgaacgccgccatctatgcgacgtgcaggaggagaacggccagtggcatgcgttgttcctggccgacgtggtctccggcgcgatgctcaagaacatcgtggaccgggccaagacccgagcggtcaaggaatccatcgaaaccggcttggacgtggcactcaccgtgccgctgctcgctgccgccgtggaagacgaataccgcgagacccgcgattccatggccgacgtggaccccgaacaatggtcgcgcatcaacggcatggacccgatccgccgcatccgcaccgccgaatagctcaagctcaaggagcactacatgaccgttaaacgagtgatgggcaccgaaaccgaatacgcggtatccctgaacaccccggaccgctacaatccggtgcaactgtccttcgacgtggtgaacggcgccgcggacagccacagcaaatccatccgctgggactaccggcaggaggacccggtcaacgacgcgcgcggcacccgtctcgaacgcgccgccgcccgcccggacatgctcaccgacgcaccgcagctcaacatcaccaacgtgatcgcccccaacggcggccgcgtctatgtggaccacgcccaccccgaatactcggcgccggaaaccaccgacccgttcgaagcggtccgatacgaccacgccggagacctcatcatgcaggccgccaccgaacgcgcccgcaaacagactggcactcccattgccctgcatcgcaacaatgtggatggcaagggctcctgctggggcacgcacgagaactatatgatggcccgcgcggtgccattcgacttggtcacacgcctgatgaccctccacttcgtcacccgccagatctacgccggctccggccgcgtagggattggcgagaacagcgagatcccgggctaccagctcagccagcgcgccgactacatccacgccaaagtcggcctgcaaaccaccttcgaacgcccgatcatcaatacgcgcgacgaatcccactccaccgatgcataccgccgtctgcacgtcatcgtcggcgacgccaatcgcatggaggtgccgcaggcactgaaactcggcaccacgagcatgctgctgtggctgctcgaacatgcggacgaggccggattcgacctgaacgccttcctcgacgaactcgaactgtctgacccagtcgaggccatacacaccgtttcccgcgacctgacgctgggggcaatcttgccgctggccaacggcggcgaaaccaacgcatggcttatccagctcaaactgcgccaagccgtctaccaggttgccgcactggtcgaaggtaccgacaccgccggcgaacccgcctggccggacaaatccaccacatccattatggcgatgtggcagcaggcgctcatcgactgcgcctccatccgccatgccgccgacgatgatgaacgtctggccatgaccggcgaggccagccgcatcgaatggctgctcaaatggcagctgctcgaaaaactgcgccgcaaaatcaccacaacgtccgcacccggcgtggccaacggatggaatgatccgcgactgaaggtcatcgacctgaaatgggcggcgctcgaccccgcggacagcatcttcaccaaactcgaaccccgcaccgaacgggtggtgagcgccgccgacatcgcacgcgccaccaccgaaccgccggaagacacccgcgcctggctcagggcaaaactcgtggcgcaattcggcgatgaggtggccgccgccagctggtcccgactcactgttcgcgacccgcgcgccgcagacgagggcgaggcggtcgaattctacggcaatgccggccatatggccgctaccgaccatcacctgttctccctcgacatctccaatccgctcgccttcaccaaggcgcactgcgaaaccgaactcaattcagccgaacacgccatcgatctgctgaagtcgctggccatcaacgccgaacgatagacttggtaactatggaagaaacacgcgaagagaccccacaggacctgcgcaaccttgcgctcaaagtcgccggcctgctcgaagaagccggccagcatgccctccacgaccaactcaatccgcgtaacctcgcccagccgagcaccgagaacgcggaccgtggcccccgctacaagcttgaagtggacaacaagatcatgcgcttcatgagcgccagaatcgccgacatcgcccacttcgacggcttctggaccacccgccccgccgaaagccgccctggccagcgttactggtacatcggcaagatcgacggtgtgatcaactacgtacgtcgcatgagcgaatggacggtgaccgccgctctgttcgaattcggcccggacaacgagcccaagccgatcatcggcatcgtgcacgccccggccctcggcctgacctacctggccgccaggggagcgggtgccgtgcgcatccacaaaaccgcggtcggcgagaagcgcgacaaggtcgtgccgtcgatgacctcctcgctggatggttctgtgctgagctacggcatgtccttcatccccagcgaatcgcagcgtgcgctcgacgtggcctcctcgctcgccggacgcccggccgacatcaagcgcgtgggccccgtctcgctcgacctgtgcaaagtggccgacggcacctatgacgcctacttcgagccgatgctgcacgtgtgggatatcgcgggcatcgccgccggcaccgtagtggtctgggaggcacagggcacgctgagccgttgggacggcgaacgcatccactggcgtcacgataacgatgtagtggcctccaatggactcatcatccgcgaactgcagcattacctgcagcagtatccgtggctcgactccatcaaccagcgataattttttgactcctccggctcccctcgggtgaggggagccgtcggccgaaggctgactgaggggagtttgacagcccaaaaagaagacaacatgccacaacaattcgaacaacctcaagcacagcaggccgcgacccaggaagacgacgccctcgccaccacgcaggccgccgcccaaaccgagtccaccgaccaagccgacgtgttggacgacatcctcgacgacatcgaatccgccttggaaaccaacgccgaggaatacgtcaacagcttcgtgcaaaaaggcggcgagtgatgccccaactgcgtgacagcggcacccgctccctgcacgccacggaacccgtaccatccgccgagatggacgggttctgccgtattttcggcgtcgaaaccgaatacggcgtggcggtcaccggtgccgaacgccccgtggacgccggccaggtggcgatgaccatgttccagcccatcgtctcccgttcccgctccaccaacacgtatctggccaatggctcacgtctgtatctggacgtcggatcccaccccgaatacgccaccgccgaagcgcgcgacccgcgcgaggccctggcccaggacctcgccggcgaacacgtgatgcgcaacctagccctgaaggcccagcgcaagctgcgcgaatcctacggcgcacacgccacgatccatgtgttcaaaaacaacgtcgactccgccggccacgccttcggctgccacgaaaactacctggtccgccgcttcgtgccgttggagaccatcgaacaccagctgctgccgttcctcatcacccgccagctgtacaccggtgccggccgcatgaccccggacggcttccagatcacccagcgcgcggacttcctggacgaggccgtctcctcgtccaccacccgctcccgcccgatggtcaacacgcgcgacgaaccgcacgccgaccccgactccttccgccggctgcatgtgatcatcggcgactcgaaccgttcgcaatggtccacatggatgaagcttgccgtcacgcaccttgtgctgtgcgcgatcgaagacgccttccgccatggcgttccgtccggattcgagcagtatgcctttgctgatccggctgccgccaatcgcacggtcagtcgattccttgacgatccgcgcgccgaactgacgctcgaatcaggcgaatccgtgtccgcactgggtctgcagcgccggtattatgcggcggtcaaggccttcatcgaaacccatggcgatgcgctggcaagttcgctgccggccaccacgatcgacacgattatgggggagtggagccgcgttctggacgcgctggagcgtggtgcatacgatgcgctcgccgaccgcgtggactgggccgccaagaagcgtctgttcgacgcgctcaaacgccgtcgcccggacgtcaccttcgcccagatggaacagcttgagctcgactaccacgacatcgccaacggtcgcctgtacggttcgctcgtagcccgcaaccagatgcgtgagctgctgacaggagacaacgtggaatacgccgtgcacaatccgccgaccgacacccgtgccgccctgcgtggccggttcgtggacgcggccctgaacgtcggagcccagttctccgccgactggacccacctgaccctgaccgcccccgaacgccgggaagccatactcctcgatcccttcgaggccgagcccaccctgggattcgagcagcttatggaagcgctgaactagtccggaataatacggttggacaacacgtcacagcaccacaacaaaaagaccccgaccatctcggtcggggtctttgtcgtcagtaatgctcgaagtaatcgctacgagcagaaggtcactcggtgacggccttcttcagcagggagccagcggagatacgaacgccgtaggaagccggaatgtcaatctgctcgccagtgcgcgggttgcggccggtgcgagcggcgcgcttgacgcgctcagcggagaacaggccggtgagcttcaggccttcgccggacttcatggcctcgacgaacacatcctggaaggcgttaacagcagcctcggcctgagccttggtcaggttggacttctgggcgatcttcgaaacgaggtcagacttgttgtatgccataaagcatccttcttgggtcaggggacaagcacttttgcttagtccatgttgtcatcaatgatactagcgcatgtttctgcgaaaacccgcgttttataagggttttcacatctatttccccgaagggggtatgaaaatagacgaatcagacaagattatgcttgtcaagccacttcatggccgccgcgcccagcggaatgcgcagccagtagaacaccacgcggtgcagcaaagtggcggaaagcgccacgccctgcggcactccgaccgccacgaacgcgaatgtcagcgccgcttccacaccgcccagaccgcctggagtgggcactgcggaacccaatgcataggccagcaggaagacgaacgtcgtttcgatcggattcgatgaatggccgaacgcttgcagggccgcccagaaagcgagcccagtggtcgcgttctggaacagcgcgcccaggcagctgactgtgagctgtcggggctgggaaagcacgtccagcagctggttgatatacgtcttggccagcggcataagacgacgggtcacccagtggcgcaacggtggaatcatcatcgcaatggacagcaccacgaccacaacgcccagcacgataaccaacgtgtttgtcgggattgcgccggagaacatgttgcggccggtgaacaggccgatgatgaccagcatggagaagtacacggcgtaatacaccacgagcacggcgctcataattgcggtcgcctgggtgttgcgatagccggatttgcgcaggaactgcaggttgacgaacgaggggcccacgccggctggcatggatacggtggcgaagccgcctgccacctggctcatgaagacgcccatattgtcacgcttgtgccgcgccatcagggaaccgagcgaaatcgacgagccgatccagccgcagacaccgaacgcgagcgtcaccaccgccatcaacgggttggcgttggtcagcgcggtgatgatctcctcgggcttcagttgggtgaagaccacgaccacggccacgatgaccagcagcatggtgatcatcgaacgccaggagaatcgggccagcgtcaccggttcggcggattccaccgtctcctcgtcagccagcgcggtgatacgactcctcaggcccttgagcagctgcttgtcccaggattccagcgcgcgcgtgggggaggggaccgcgaccttctgaatgaacggggccaaggccgtcagagtcgtgtctccccacgcctcgcgggcggcctccaccgccggttccacgccgatcagcgcggcgaacagcactagcagctgaactttgtcgagcgcggtgttggccggaccggaagcgttgtcgccgttgagccagccggcaatcacggcggtgccgtcttcaagccgggcgagcgtgtccggcgtgatgcgccggtgcgtatagccgcgccggctcgccacggacaggtagcgcatgtaggccacggcatccgccttggtaagcgtgttcaggttggcgggcagttcgatggtgtgtgcatccagcaccagaatcgcggattcgtcggtatcggcgatgccgtagggtgcgggcgcgggcagtttgatattgtgcagacccagcagcatggcgaaatgatgctggacggcgtcacgcacggaacggtcacgtcggatggacacactggtgaaacgcacccagtcccacaactgcttcagatagccgacggtatgggtctgcgcgtcgatgacggaaacgatgaaacgacggttgtccgtggtatccagatcgtagatgcgcgagccttcggccagatcgtcgtccagcgtgacggccagtgaaccgtggccgacgccgggctcctgatgccgaatcagcgaggcggtgtccagtccgatgcctttcagggcggcgaccagatcttggccccacacgcccttgttctgcgtgccgaccacgaatcggatcagcatgcccactgtgcggccggcggccatcgacaccagcatgccggtgaccgaatgccacgacagcaccaccatcaccgcagcgatggcatacaggatattccagctccatttgaccgtggagcgggtgcggcgtggcccggcggcggtcaggaaggacgccatgccggcgtagatgtcgggcaacagcccggagccgtatgaggtggcggctgagactagtgccattggcagggtgaaatcgttcagactgctgattgccgtcgatacgacccacaccatgccgtagccggcgaacatggccagcgcggacaccgcggcctgcagccattcccgggccagtagcaattgagcgagcacgatgatcacgatgacgatggtggccagctgcgtcagcacggtggaggggaagtcagccaaccagttgatgacctgggctgcggtgtgtgcgtcggattcgacgccgcgcgtcatgccgcccagatacacggcgaacaccatgaccacggcggccatcaacagcgacagaccggcccgggtcagatcgccgaagtcgcgcgtgcggcgcggagcgatgtcgtcgatgtacggtccggaatcattgctgtcgtcggttgccgggctgtccggtccgctgacagcaaaactggccgaccggccgtcaccagaggcgatcggccggtcggtagtggaggaggtcgccttgtccgggcgatcttccgtagtggactgctcctgttcagtagtcatgaaatggttacctgacgcctgtccttgttcggttcagtttgtggtttggtttgtgactcagcgcagtagtgtggtggatgcgatgggctcgagggactcgcatcgcacctatttcagcggtcgaaagcgacgagctggctggccacaccggtgtaggtggcgggggtcagagccttcaagcgagcggcggtttccgggtcgaaggactgctggtcgatgaactgctcgacctgttccttgttgatggtgtggccgcgcataagctccttgaccttctcgtacggcttgtccatgcccggcaggcccttgagctcgcaggcgcgcatggcggtttggatcggctcgccaagcacctcccagttctcatcaagctcacgctcgatgacgtgggtgttcgggtggatggactcaaggccgcccatgaggttggtcagggcgagcaaggagtagccgagcgcggaaccgatgttgcgctgggtggtcgaatcggtcagatcgcgctgccaacgggattccaccagcgtggcggagagggtgtcgagcagcgagcagctgatttcgaagttggcttcggcgttctcgaaacgaatcgggttgaccttgtgcggcatggtggaggaaccagtggcacccttgaccggcacctgggcgaacactccacgggagatgtacatccacacgtccacacacaggttgtgcatgatgcggttggcgtgggagacggtggagtacagctcggcctgccagtcgtggctttcgatctgcgtggtcagcgggttccaggtcaggcccatgcggttggtgacgaattcgcgggagacggcgacccagtcgacatccgggcatgcggccaggtgggcgccgaacgtgccggtcgcgccgttgatcttgcccaagtactcctggttttcgatgtgcttgagttgacggttcagacggtagacgtagacggcgagctccttgccgagcgtggtcggcgtggccggctggccgtgggtgagggagagcagcggcatatccttgaattcctcggccttgccggcgaggtggtcgatgatgcgcttgaactccggggtccacacgttttccatcgcgttcttgacgcaacgggcgatggagaggttgttaatgtcttcggacgtgcaggcgaagtgcacgagggtcttcagctcgtcgttgatgttggccagctcggccggagccttgtcgatctgatcatcgatgtagtactccacggccttcacatcgtggtgggtgatggcctcatgagcggcgtgctgcttgatgccttcggcgccgaagtcctcgggaatggcgcgcaggaaggcctgctcttcggcagtgaacggcttgacgccgtcaacgattggctggttgccgttgccctcaaagccgttggccagaagaatcatccattcgacttcgacacgcatgcgttcgcggttcagggcaggttcgctcatgtattcgacgagcggggcggtggccttgtggtaacggccgtcgagcggggtcaatgcgattgcgggggaaatatcggtaagcttcataacctccaagggtacttccagccgtgaaccgagcggctacactgtggtgtggcgttcccgcccgagccgcacaggtcaaggaacgcccgtgattcgattactgtgtgcggcctttaaggctaggagatcaccatgcctgcaaccaccattcatactcttccgaaacgttcggtcgccgtatcgtcgctgaaatggcagccgttggacatcgcggtcggtgccacactgggcgcggcctgcggcgtgatcttctggggattcaacttcgcgtacatgccgatctcttcggtgtttggtgcggttctgcccggtttcgccagcatcgtgcacgccgtctggtatttctccggtacgctggcggtgctgattctgcgcaaacccggagcggcgctgtacgtgaaccttatcggcacgctggtcgaaacggtgattggtagccagttcgatttgggcttcgtgattatctcggcgctgctgcagggtgttttcgctgagattccgttcgctttgacccgttaccgcatgttcaatctgccgatttccattgcatccggtgcgttggtcgccttggaatacggcacatatctgatgctgtttcgctacgtgggtgtgtcattcgtcagcccgcgtggcatcgtgcacatgatttccgaggtcaccggcggcgtgcttatcagcggcgtgatggcctggtatctgatgctggccatcgccaaaaccggtgtgctcgaccgcctcgcatccggccgcgcactcatcgagcgacgcgcctgacactctttgcgcgccactttcccggggatgttgcgctgatagagggggtttcgggcatgctagcgcaacaatcccgggaaagtggcgctagccgcgtctctgcggtgattgcattgtggggggtagccgattgatgctaagcattgacagcattgacaagttgatgtgcccgttgccgtgagaccccgagtatatcgcctatttgctgtagggcgagacccatgccatgtagttcttgtgccgcggcgcgagtttcccgcgctgcgttcgatctgcattccgcttcttccttgcgcagtcgccgagcttcatcaaggtgctcttgtacggattgcggcagttttgtctctatggtgagtgcgaaatcagcatcttgcgtcatgacggtgataaggtcgcgtgccatactttcaatctctgctgttgttcttgcctgcgtgaaaccgataccgggaatctcaagaatccagtatttttcgccaggacgaacgatgacctgatatgttttcactgctgataccagcctttcccgagtttggcttctgcttccttacaaatgatgttcgcgaggtcgttgtcgatttcgttatggcgtgggatgggaatcatgagtccatcgagttggaatatctcatgactccctctttgcctgatactctcaaacgtaatattcttgcgtttcgccgcttgcttcatcagtttgatgagccatctcctactcgtcattatattgttaactcctttcttgacaactctgtcaagtgtggtatttacttttaaccgccgaacgtgctgaactcggtggtgcgctcgccgggagcaatggttgtggactgggtcatgcggccttggtaatagcgggtttccttgagttctccgttgatgacttcctgaaaatgcgtttcgtggcgctgcacggcgggggagccgaggtcggtggcgttctgataagcggcctgatggtatttgagccaatgcgacaactccctgccgttggtcgaaccagccacggaagcggcgtcatatggggtcagaccgttgatgggcgttgcgccgggagtgcatgagacgtccgaatgcactgtggatggtgttgccgcgggcgcgggcgatacatgcccttgcacggtgagccaattatcggtgaccgggttggcggcaccatccagcgcggcgaccagttcatcatcgatctccacgctggtgacccacgtgcgttgcggaatcggatgattggccaccggcgatccggctgtcaccacatgctcgatggtatattcctctgcccaatccgaggcaagcgtggcggcaacgatgccaccttgggagtggccgatcagtgccacgggctcgtccttgccgataccagcctgacgcatcgcctcggcaaccgtgcgagcgctgtccgctttcctgcggcgctcctgatcggcgctcatcagttccacgttctgcgcccagccgaatggtgagtcaggttgtccatcggtacccgggatggtgaccagccaggagttggttccatcagcccgttcatagcgttgaatggcgatggtcccatattcgagtccgctgttcagctcgattttgccgagccgttcttcggcgagcctgcgcagattctccattgactcggccaccgatctgcttgcacggacgacgtcggcattcgcctgcacctcgcgcacgttcagatgattgccttggacgacgtctttcgccgggccggagaaattggcgattttccccgcagccttgttgacctcatcggtgtgcgcaatgctcttgccaataggtacgccgccaatgattccgcccgcgccgctgagcactccttcctggaacggataggtgaacgtggacatccatgctgggttcggtttgccgtcaatagcccagccggccagaaagccgcccgccgccacagcggcaacacccaccgcggcatatcccggtttggcctgtgtaccggcctgcaataattcggtaaacatgcgccgagccgtcatctccgcctgagaatacagagagtgtgcgcgaatcagcagatcggccgcgccacgcaggtcatcgctcaaccgctgacatgccgttgcatggtcataacaccgattgcccagcgcggcatatggtgcagtgacatggccgggaacaacggcgctcggatcgcccgactgcaaggtgacgcacatcggcgcactatgccgatgtgactgcaactgtaatgcggccgattcccaagccgtggctatggccgcaaatcctgccgcctcgtcatcgagagccttggctatggcggcatattcttcaagagtggctggcgcatatcccactccgccgtaaacggacgattccacctgccagtaatcgtgctcgctcatgatgacccccaagccaatcggtgggtggtctccatgtcttgcgcgagactggccgaatactgtgcggtgcgactgagccgcgatcggaataggtcggcggctttaccggtccacacgatgttgcgagagcggttcacggccaccgccatctggtccgattgcgccagtgtggccgcacgttggacggacacgaggtcgcgactacgctgtaccgccgcatggcaagggcaagtgccgtaatcgaacggcgtcaccgtattgccggcaaagccgccggcgggatcgatgggtgctggggtgctggtgtaggtattcatatatccagctaaaaggacaggactcatgcttgtccagccggaacgaccaatgtggttctagcttgccgattttgggcgaagttattcacaagtgttgtgtatagccgtaacgattatccacaaatagcctgtttgggcacaccttggatcagccatgggctatcgggatcagacaaacgccaaagccgacagccgaaaccgggaaacagccgcgataaggccatgacccgtgaggatgtgagaaaaagagcaaccgtgaacgactgcttaccacggcttggtggccccggtacccttgttctgcgtcgccttctgctcggattgggtggtgttcgactgggtatcggtggattgctgattggccttcatcagctcctcgacctgcttcttctgctcgtcggtcaacgcgccgccctttttggcattggctgaggaactctcggattgctgcgccgactgggcttgcccggaatcggaaccgctgttctgcgcctcggcctgtttcagggtgatcttcgtcagctcggaagaaatcgaagcattggtgtcgatggcgtccttgacttgcggcaacagaagcgtacgcattcgcccggcctcggcgaattgcgcatcggtctgctgctgttgcgccttgagcgtggtgatatcagtcgactcatcctgagccgctttgatattggcattcaatgatgcggtggcctgattgaacgtaatcgaagcggacaggtttactgccgccacgccggcaaccagcagcagcaatacggtgccacaagccaggacgatacgtgcccaaagcgggcatttcgcccgcatccgaatattcgccgagccatcgttctcgtggatttcgttactgttcctcacagcagcctccttgaggtcgcgatccatgcaccgacttccatggcaagcaatatcgccaacgcaatggccaacggccataccaccggcgtggtgcgtgtgcgctccttgaccgtggtggtcatgcgccactgcttcgacgacctggccgaaaccgaatccgccaaagtctgtgaagcgtccacggccacatatgtgccgctgatctcgtcggcaatgtctttaaggttcttctcatccatcttggagatgccgggttcgccggtatccgggtcgaccacccagtggtccgtggtgttggaatcgccggcactgacgccatcggcgatgacgggaatcttgccgccctcggtcgagccgacgcccacggtaaacccatcattgagatactgtcgcagtgacgagaacgtacgacgcgtcacattcgaggtctgttcgccgtcagtgatgaggtacagcacaatcgcatcatccgggtgcgcttcacgaatcgacttcgcggtcagcagcaattgatcgatcggagcatccagactggatcccgccgacacggatgtggcttccaccgccaacgtgttggcccaattatcgatggccggcgcatccggggtcagcggcacatcaagtgttcccgaagcaccgaaccgtaacgccgcgaaactggcgtccgggtaagcagcggtcacatcatgcacggcctgacgcgcggcatcgatgcgggtaatggtcttctcggacccgtatgtggcatcagccaccgccatcgacccggtggtatccaccgccacgatgacgtcggtggcattgatgacctgtgaggtggtagacgataccacgctgggagtcagtaccatcaccgcgacaatgagcagcataagcgtacgtcgtatgcaagcccacacggtctcgtcactggaagcacggcggcgaacaaacaatacgatttcgagaatggccagtacggcgagcccggccgccagcagtccgtcggcgacccagcccaaggcgggggagaaggtgaatccgttcatcgcctcaacctccatgcacatacgatccagataatgagtatcacggccagagcaagcgtccacagactgggagcgtccaccattgaggatttcgccttgttctccacatccgtatctctacgcgactgaatatcccgtaccagctcatctatcgacgcgccgttcgattgggtgaggaagatgcctccatgcgactcgatcgcggacttcatatccgttgtggtttggtccgattcactggctttcggcccggaatacaggccgtccacggtgattttggtctgctgggtcaagtccaacgcttcggtcagcgaataggtgggtttgcctgacacgacgttgtcggtggccagcacgatggatgccgcacgctgacggtcggcattcgcatgattggcttcgccataagcgaaaccggggagcatcgccgcgcaagacaccacgccgtcgccaatcaaggaggtggcgtccttgcggttctgcgtgccttcgagccaattggcgatgtcctgatattcggcatcggacatcttatcgatgtcatcctgcgactcgacgcctttcagcgccttgctggcggaggtcaactgtttggtgaccagttcgtagtcgtcggtcagcgggaacaccgtgcgtgaggtcgagttgaagatactcaaaccgatacgttccccctcgaaatgcttgaccagttccaaataggtatcgatgacctcgcgatcataggggagcgtggatcccgacacatccagacacaggacgatatctcggctggaagcgcgttcgtcaccggcatccacttggctggggcgagccaccagcacaatggccagcgccagcgcaagcaccagcacgctgatggcgagacggcccaaagcgcgccattgacggaacagacgggaagcgtgctcggtattgagatcgtcgtccatcgagaacacaggggtgtcgtcggcggcgttacggcgggcgaacacgacaatcagcacgataatcgccatcgctgccaagacgccggccagagcggcccaaggccaatgccatgccagcatcatgaacgccacctttccaccagattcgccacccactcggcggcctgctgcacgctggtcgtctgggcgattcggttgcgggcatcatcggcaaattccggtggatacaacgcgctaatggtctgcttcaatgcgtccaatccttggcgattcgcgggcgtgcgattcaggtacgccaaatcggtcagcgtactggaactaagctccttgcctgatgcggcaccggcgaaatcacgggcgatgacggccaattcgacgaaagcctcatgccggggcagtgctccggattcatgacgggccaccacatcgtcgatgcgggcacgccactcggccttggagctggcattgctatgagtgccacgcgcacggtcgctgttccgaggtttgcgtgcggggcgagccagcatgatgatcaacgcgatcagacctaccgccagcaacaggcatgcgacgatggccatcaccaggggagtggtcaaggccaacgactccacgggcctgagatcgccgggatcagtggcgagcgggatgatggggaacatgctgtgcatcatagatcacccgccaaagtcagtccgaccagttcgggtgcagtgcccagtctattgcgtgtggtgcgggccaatgcccgggacaccagggcgacgaaacgatcgaacatggattcgctggatgcggctcgaatgatatgggaaccggcacgggtgagctcctgttccaaagccgcggccatatacgcgcgatgagtatcgacctcggccgctgccttggcgttgcgcaggaatgccggcacacgccgtgcactcaagccgtcggcgggagcgtggcgggatgagacggccttgaacggattcatcgtcgccacatcgatcagcaccatcggatgggtgcgggtaatacgacggatcgtggtgatatgccgctcctccatcgcatgctcatcggtggccaatacgatcaatgcctcacgatccttgatacggcgcgcatattccagcagcgcgtcgatattacggtgatgatcccaatcacgatcaagcgccttgtccagcgtgcgttcgaactgcgcgaacccaccgttgaacggcacgcgggtgatgctggactcatcgccgaacaccagcgaaatatcgtccgaccggcgcaacgacagtgcggcgaacatacgcagcgcattggcggcaacctgccatgcgcgttctccggaagggcatacgccagtcatctccaggccaacgtccatcagcaaccagacccgtgacgtcgacaggcgctcgcgctcgaccaccatggggcggccttggcgggcgctggtcttccaatcgataagacgggattcgtcgcctggctcataggcatgcacatccatcgcatcgccgctgccgccacgacgcccggatgcgtgttcgccctccagcacgcccaaagccttccttacggtaggcaggctcagctgagtgccaagggcctcgattttcttgcgaacggaatcggaactcacggaacaggaaccgtttcgacgatcttgtcgacgatctgatcgctgaccacgccatcggccagtgcctcgaacgtcagcataatacggtggcgcagcacctcatgagcgaacgccttgaggtcctcgggcaccacatagtcgcgcccggacagcaacgccttcgcctggccgatacgggtcaaggcgatggtggcgcgcggcgaggcacccaaacgcaccaaggacgacagtcccttgatggggcgggagccggcacctcgtgacgtggcggtgatatcgaccgcataacgcatgatcgcgtcggaaacatgcacgcggcgtgccgccttgcgcagaaaatcaacgtcagacacggaaatgcgttcgccggtgatggtgtcgggaccgatcatatcggagccacggtgggtgagcatggccagcatgcgagcctcttcgtcgggcgaaggataggtcatgacggccttcatcatgaaacgatccatctgggcttcgggcaggttgaacgtgccctcctcctcaatcggattctcggtggcgatcaccatgaacggcttgggcaaggcgatacgctgcccgccgatggtcgtggcaccctcggccatggcctcaagcatggcggactgggttttggcattcgaacggttgatctcgtccagcagtacgaaattggcgtgaatcgggccgatctgcgtggtgaacttctgcgacgcaaaatcgaagacctgcgtgcccaccagatcggatggcatgagatcaggagtgcactgcacgcgtttgaacgagccggatacgcaggtggcgagcgtctgggcggccgtggtcttggccaagcccggcacggattcgataagaatatgcccgccggccaccaaggtcacgataagcgattcgcgtagattatcctgacccaccagtgtctgggcgaacctcgcccgaatggcgtcggccaggatacgtgcgcgtttggcgtcatcggcacccagcggagccgacacgccgggcgtgggaacggtgaccggtcgtgcggcggtggtcggcgaaggtatgttcggttgcgtggggaacaaagtcatgccctcactgtaactactcacaatgactgttggtctgtctaaagagtccaatccaccgggtcggcacccatggtgactagggcttgattggctctggagaatggtttggagccgaagaatccgcgggaagcggacagcggactcggatgaggcgatttgataatgaaggcattggtcagcaatggctcgaggctttgcgcattacgcccccagagaatcgccaccagcggcttgggcttgccgtcggcgtccgtgcgcgcgttcaacgcacgaatcgcggcctcggtgacttcctcccagcctttgccctgatgcgaattcggccgcccgacgccgacggtcagacatctgttgagcaacatcacctcacgttccgtccacggtgtcagatcgccgttggtgggcatgggcaccccaaggtcgtcaaccaattccttataaatattgaccaggcttttcggcagcgggtgaacattcggcgccacgcagaagctcaaacccaccgggtgacccggggtcgggtaggggtcctggccgacaatcagcaccttgatggaatcgaacgggatggtgaacgcgcgcagaatattgtggcttgccggcagccacgggcgcccggcggcgttttccgcacgaagaaaatcgcccatatggtggatggcgggctccacgtcggccaaggcatgggcccaccccggctctaccagttcgctcaatggtttgatcatgactcaccactgtagtcaaacgtgcatatccggtgcacgaggcgtggtgtggtggactgatgagttgtttgccgattacactcatgggtagttttgacaggaagaaagggcgattatggcacgcgacatgatgacctacgaatcctatgaaccggattccttcgacaatcctccgaagggaccggtgggagttcaccgtggcgctcgttcggcagtggcccgcctctgcccgttcatcgtcgttattctggtggccgcactgtgcggtgtcggggtctgggcatggatttccggggaatgcaggaatgcaataggaggatcgtcccagactgcgaccacgtccgggactgcttccaagtccgattcgtccagcaaggctgagaccaaaaacagcaccaaggatgattcctcgtccacttcgaccgatccgtccaaggactcgacttcggattcggcaaaatccgataccaacagtgatacgacatcctcgaatgagaatcaagactccgatcagcagtctcagcagtccggagccaccgcgactgtgaataaggccacgcaggtgcgtgtggtcaacgccacaggaatccaaggatatgcaggtcagcaggccgatgtgctgcagaccgccggttacaccagcgtcgaggcgaccaatccgcgcggcacattgccggcttcttccgtggtatggtatcagaatgaagccgataaagccaccgccgaagatgtggcgaccacgcttggcatttcggctgtggagcaggtgcaaggactcgccgttcccattacggtggtgctgctcaactagcgttgttgatgcgcccctgatatcggcgtggaatacatcgaaaaccgtgagcgttctcacgtctatgaaataattcgtaccgaaaatgtgccactgcggttgggattgttccctcgtcgctgtacaatcgtcatctagtcgcgaggtagggggagcgcgatgaggttctttctacgttccctataggttttgtgtcgcgacgcctaagggaacaaaggaaagaccagatatggcacaaggtaccgtgaagttcttccttgccaagaaggggttcgggttcatccagccggacgacggcggcgaggacgttttcgtgcactacgcggaaatcaaggacgacggcagcaccaataagttcaagatgctgtacgagggcgatcgcgtggagtatacgcccgcttcgtccggcaaaggcacgcaggcaaaggatgttgtcaagctgtcttcgggtgaagcccgctccgagtgagcaacacgcacgcaaggatgtgcattgaaggccctgaccgtttcgacggttggggccttttcatgcccaaagcgcaatcgccgccgatgatgttggcactcggcggtcgcgagtgctaatgtctgggttagcactcggaggtcgagagtgataatcggcagctgacggctggtcgtcacgactcgacgcttgcgagtgataaccggtatacctagccatttggaggaatacgcaaccatggcaaagatcatctcttatgatgaggaagcccgtcagggcatgctggagggccttgacaagctcgccaacaccgtcaaggtcaccttgggcccgaagggccgcaacgtcgtgctcgacaagacctacggcgctccgaccatcaccaacgatggtgtgtccatcgccaaggaaatcgaccttgaagacccgtacgagcgcatcggcgccgagctggtcaaggaagtcgccaagaagaccgacgacgtcgccggtgacggcaccaccactgcgaccgtgcttgctcagtccctggttcacgagggtctgaagaacgtggtcgccggctccaacccgatcgccctgcgtcgcggcatcgagaaggccaccgaggtcatcgtcaaggaactcgtcgccgccgccaaggacgtcgagaccaaggaccagatcgctgctaccgccaccatctccgccgccgaccctgaggtcggcgagaagatcgctgaggctctggacaaggtcggccaggacggcgttgtgaccgttgaagacaacaaccgcttcggcctggacctcgacttcaccgagggcatgcgtttcgacaagggctacattgccccgtacttcgtcaccaacgctgacgaccagaccgcagtgctcgaagatccgtacattctgctgacctccggcaaggtctcctcccagcaggacatcgtgcacgtggccgagctggtcatgaagaccggtaagccgctgctgatcatcgctgaggacgtcgacggcgaagcactgccgaccctgatcctgaacaacatccgtggcaccttcaagtcctgcgccgtcaaggccccgggctttggcgaccgtcgcaaggccatgctgcaggatatggccatcctgaccggtgctcaggttgtctccgacgaactgggcctgaagctcgagtccgtcgacacctccgtgctcggccacgccaagaaggtcatcgtctccaaggacgagaccaccatcgttcagggcgctggctccaaggaagacatcgacgctcgcgtggcccagatccgcgctgagatcgagaacaccgactccgattacgaccgtgagaagctgcaggagcgtctggccaagctggccggcggcgtggctgtcatcaaggtcggcgctgccaccgaggttgaggccaaggagcgcaagcaccgcatcgaagatgccgtgcgtaacgccaaggccgccatcgaggaaggcctgctgcccggcggtggcgtggccctcgttcaggctgctgccaaggccgagaaggccgaggccgtcgcctccctgaccggcgaagaggctaccggtgccgccatcgtgttccgcgccatcgaagccccgatcaagcagatcgccgagaacgccggcgtgtccggtgacgtggtcatcaacaccgtccgctccctgcctgatggcgaaggcttcaacgccgccaccgacacctacgaagacctgctggccgccggtgtgaccgacccggtcaaggtgacccgctccgctctgcagaacgccgcctccatcgctggtctgttcctgaccaccgaggccgtcgttgccaacaagccggagccgaagcctgctgccccggccgccggtgccgacatgggctactgatccgcaagcgatcgctagctgattgagctgaaaggggactccttcgggagtccccttttttgtattctggctcccctctttggggggagctgtcgaacgcagtgagactaaggggagctgcggtgtagggatactccctcagtttcgcttcgcgatcgagctcccctcagggaggagagccaagaaactagctggcgaacaggcgcgaagcttggatttcggcgtcagcgtacacggtggaggcttgcgtcagcgagcgttggatggactcgagtgaggcctccatctgctgttgggccgcacgccactgttcggctaccgcggtgaactgggtggccgccgaacctcgccatgcgtcctgcaaggcattgagattggtgtacatgccgcccacggcctgcctgatctgcgagatcgaagtggccactgcggccgaggatgattggattcgctcggaatctacctgatattggggcatcgttgctccttttctagagggttaatggtatgtatggcggccgcttgccaataccggccgctaaggtggaggatatgtcaacaacgaatcgggaagacggaaaaacaactattgtggtcctatcttcggagccgtcctgttcggccttcgggaatatggtccgaaaatggcttgtttgtgccatttgcgcccttgctgcagtagcgatgaacgcaatgtggataaccgcaaatgcctatggggataactcgggcgacagctctgacagctccagcagcagcaccgacagcggcgtgaccatcaccgagaacatcacggatacggaaaatctcctgggctcccatgcggccgaagtcgcggatgccatcgccaaaaccgagaaggaaaccggtgtacacgtgcatctgctgtatctttccagtttcaatagtcaacagaaaccggaagactgggcggcaaccgtgatggagtccatgaatcccaagccgaacacagtgatgcttgccgtggcctcgaatgacggcaacctggtggtcgtcgtgtccaagaactccgataagtggcttctcgataacaaaaccgtcgataagctatccgaagccgcacagcagccgttactggaaaacccgccgagctggtctggcgcggcaacggcaatgatggatcaaatcgtgaaatccaaaaaagcctccacctcatcatccacggtgaccgtaggcataatcatcatgggtgtggtgttggtggcgctggtcatcatcatcgtggtcatggtggtgattcgtcggcgcaaggagatcaagaaggattccaaggccgaactccaagatgacattcaggaaacgcccagaagagcgcgacactctaggaagcatgagtaagcctattgaagcatcgattgttgttgtcgacgacgagccgtccatccgagaactgctggtcgcttccctacacttcgccggattcgaggtaaacaccgccgcttccggttccgaagccattgaggttatcgaaaaagtgcagcctgatctcatcgtgttggacgtcatgctgcctgacatcgatggatttaccgtcacccgccgcatccgccaggaaggcattaacgcccctgtgctgttcctcaccgctcgtgacgacacccaagacaagatcatgggcctgaccgtcggcggtgacgattacgtcaccaagccgttcagcctcgaggaagtcgtggctcgcatccgcgccattctgcgccgtacccgcgaacaggtggaagacgacccgattattcgcgtcgccgacttggaaatcaacgaggactcccacgatgtgacccgtgcagggcagccggttgacctgagccccaccgaatacaagctgcttcgctacctgatggacaatgagggccgagtactgtccaaggcacagattctcgaccatgtctggcaatacgactggggcggcgacgcagccatcgtcgaatcgtacatctcctacctgcgcaagaaagtcgacggcatcgaggtcgacgacggcgaaggcggcaagcgcaaggtgacttcgctgattgaaaccaagcgcggcatcggatatatgattcgcgaaccgaagaactagtcgccccatccataacgcatcgcaatctcatgagtatccccgataagcagtcaggcggcgtaccgccgagcagcacgccgaacgccgccccgaacacgaatcccatgcctgcaatgccgccgttcgccgcccatttccaagagcggcacgaacgtaagaaaaacatgctgatgcggcatatcgaccgtatctcgttgagcagcaagctggtggcctgcaccatcgccgtgctgcttatcggcgtgtcggtgatttccttctccatccgcgcgttggtgaacaactacatgctgcagaaaaccgacacccagttaagctcgcaaagccagctggtggtcaacaatatcgatctgctgtcaaaaaatgactcatcggggccgaactcgtactttctgcagattcaatataccgacggcaccaaagacaaagagggcaatcctctggtcgtgaccccgctgatgccgcagatgcaggacggtatcgtatcggtgccgattcttcctacctatggtgataccagtggcatcacgctcggccaggcattcactacgcaggcagtggccaagcagatcatcacggtgcagtccgacagtgcggacagccagaacgatccggccaacggaaactccaattcctctgacaccatcaccaaggtactggccaaccccactgtcaatgccaaccatgccgccatcgtcacggcgagggcaccatggcgtattctgccggtgaccttccagcaaaacggcaaagaccgtgccgtggtgtacatcggcttgtcactggccgaccagatcgacaccgtcaacacactcacccgatactgcattgtggtcggcatcgccgtggtgctgctcggcggctccctgtccacgctgatcatccagcacacgatgacgccgctgaagcgcatcgagaaaaccgctgcaaagattgccgccggcgacctgagccaacgtattccttccgcgccggaaaacaccgaggtcggctccctggccgcctcgctgaactccatgctcacccgaatagaatccagtttccatgaacaggaggagaccaccgacaagatgaaacggttcgtctccgacgccagccatgagctgcgcaccccgttggccgccatccatggctatgcggagctgtataagatgcagcgcgatatgcctggtgccttggagcgtgcggacgagtccatcgaacatatcgaacggtccagccagcgcatgactgttcttgttgaggatctgctgtctttggcccgtctcgatgaggggcgcggcatcgatgtgaccggcacggtgaaactctcgtcgctggtcaccgacgccgtcgacgacttgcatgcgctcgacccggaccgtgccgttcgccgcatgcagatttccctcgaaccggcgcgcgatttgaaccatcccgccgaattcaaccttgccgaaggcgattggcccgaggtcgtgctgcccggcgacgcctctcgactgcgccaggtggtgaccaacatcgtgggcaacatccaccgctacacgcctgccgattcgcctgccgaggccgcgctcggtgtgatgccggccgccatcgatccaagacagctcgctcgcatgcccgccagcgacgcatcgatgcggcggttcatcgacgccgccgaagtaggtgcctcgatgcagaccggctatcgatacgccgtattgcgtttcgtggaccatggccccggcgtgccgcctgaatcgcgctcgaagattttcgaacgcttctacaccgcggacccatcccgtgcccgcgaaaagggtggtaccggtttgggcatggccatcgcgcaatccgtggtcaaagcacatcacggctttatctgcgccaccggcaccgatgggggaggcctgaccttcaccgtggtgctgccgattgagcagatcgtcgctcctgagcccaagcggcccaccggcaaaaccaaggacgccaaacagaagacttcttggttcagctctgagcgtaagactcaggcgactcagcccaaagcgtgaggtcaagccctgtgaggtaaactgtaccttcggtttactatttccattgaggattaaggaaggttcgcaatgcccaccggtcgagttcgttggtttgacgcagccaagggttatggcttcatcaccagtgaggaaggcaaggacgtgttcctgccggctcaggccctacccactggcgccaccacgttgcgcaagggggccaaggtggagtattccgtggtggacggccgtcgtgggccgcaggccatggatgttcgcctgatcgcctccactcccagcttggtcaaggccacccgcccgaaggcggatgacatggccgccatctgcgaggaccttatcaagatgcttgatgcggccggcaatacgttgcgccgtcaccgttacccatctgctgccgacagcaaaaagctggccacgttgctgcgtgcggtggcggatcaattcgatgtacaggactgatctgatctatgactgataccaccgaaaccatcgtgacaccggaccctcacgccatcgcgcgcgccgtgctgctcgaagtggccgacgagagcgatcaggtgggggatttcgttacctcatatgatcttgaggatcacgtcactgacttccgcttcgccgcgaatatccgtggctacgaaggatggcaatggtcggtgacgctgtatcacgacgaggagatcgactcctggaccgtcaacgaatcctccttgatccccactgagggcgcgttgatgccgcccaagtggattccttggaaagatcgccttgagcccacagatctggctcccaccgattcgatcggtaccgatccggatgacgagcgcatcgaggaaggcgaagtcgaggaatcctcgctgcaggatgtcaacgatgccgtcgagaccttccgactgacccgccgtcacgtgctgacctcgttgggtcgtgcgcaggctgccaagcgctggtatgaaggtccgcgaggccccaaagcgttgagcaccaaaaccgccgaaggcaacctgtgctccacctgtggtttcttcgtgccgctcgcgggcgaactcgaccgtatgttcggcgtgtgcgccaacaagtggagtccggatgacggccgcgtggtctccctggaccacggctgcggtgagcattccgaaatcgaacctcccgagccaagccagctgtgggtgcagtccaagccagcctttgacgatctgcatatcgacgtggttgccaaccgtccgtgcaagcaggagcaggttgcccaggacgaggccgaaggcgaaaccgacaagacaggcgagcctgccggtgatgatatcgaagcacagaagactgttgacgggaacgccgtcgatactgagcccgctgaggaggcggcaggcgacgggacctcgcaatcccagtctgccggtgatgagtctgttgcacagaatgcatccgattccgttgtggatgttgatgcagctgattccagcgacgagtccaagtctgatgctgacgacgaggccaccgaagaggacatcctcaacaacaccgttgccgatgatgatgaggatgatgagatggacgacgaagaggataacgttcgtccttcagacgatgtgactcctgaactcgaaaccgtcatcgatctcattgagcagctgcgccagaacagggcggacgaggaataaaataaacgccaatcctgctccccaacagcagaatgtactctcggatcaacttataggtctcagcgaagatgtttcctaaaaagtagatggtgatggggttgcaggaataaagaattcctccctgcaagcccatcaccgagacgtgcgttagcactccatgccgatttcggtgcatcagtgcaccacagtcaccgtgcattcggcgaagttcacgatctgacgggacaccgatcccaggaagtgcgcgtccagaccggacaggccgcgcgaaccgaccaccagatggctggcgtaccgagatgccgcaatcagccccttggacgcgggaatatggaaggcattcgcgctgaccttgacaccatcgggaatctcggccttggccatcagcccggcgagaatctcctcggcgcggcgctgaccgaccttcaccggtgccacggcgttctcatagcccggaataacgcccaaatccttgagctgccagcagaacatcacatgcagcggcgcgtcgtgcagtcgtgccttttccagcgcgaagtcgaacgcgcggcgggaagtctcggaaccatccacaccaaccaccaccgggcggcgagccacctcgaccacgggctgtggctgcgtgtagtggaccggctggtctcctggcgtcagggcattggcgatggcatcggtcacggtctcatcctcgctgccggcgatgcgcaccacggtcaccggcacttcggcggcctcggccagcgaagcggacagggaccccatgaaccagcgggccacacggctcagcgagcggcggccgaccacgatctgctgcgcatcatggccgatctgcagcagggccgaagtgccggaggccttcaccgaggtgagcttcagattcgccggatcgaagtcgatgcctgcagcggccttgtcgacccacacacgcagctcgttggcgatgtcgtggcggaccttggcccaggcctcgtcgctgtccggttcggaacccatatcccaggaatgcgtccagccaaacacggcgttgacgctctgaccggttaacgaagcctcctcaagcgcccacttcagcgcggcaaaggattcatcggaaccatccacgccgacaacgatgtcgggcttggttgtcgcttcactcatttcgagcctccttgtaatcgactacgggtgaatctagaaccagcatatcgttttcttatcctcttacggcgcaattcatggaatccgatgaataaacgtcatcgtgaatcggtagagtaagacggaatgtcaattgaggaaggacaagcatgttcgaacggtttaccgaccgtgcacggcgcgtgatcgtgttggcgcaggaagaggcgagggcccttcagcacaactacatcggcaccgaacacctgctgctcggcctgatccgcgaaggtgagggcgtggccgccaaggcgctcgcctcgaagggcgtggagctggatgccactcgcaagcaggttgaagaaatgatcggcaagggcaacgcggctccgaacgggcacatcccctttactccgcacgccaagcaggtgttggagttctcgctgcgcgaagccctgcagctgggccacagctacatcggcaccgagcacatcctgctcggcctgattcgcgaaggcgaaggcgtgggcacccaggtgctcatcaagatggacgtcgacctgggtgagctcaggagcgcgaccatcgatatgattcgcggcaactccggcaccggcaccggtgacggcaagggcgatctggccaacgccggcggcgtgacagacaagcagaacaagtccggttccgccattctcgatcagttcggccgcaacctgaccgtcgaagccgctgaaggcaagctggacccggtcatcggccgcaccaacgagatcgagcgcgttatggtcgtgctctcccgccgcaccaagaacaacccggtgctgatcggcgagcccggcgtgggtaagaccgccgtggtcgaaggcttggcccagaagattcaggccggcgacgtgccggaaaccctgaagggcaagcaggtctactcgctggacctcggttccatggtggccggctcccgctaccgtggtgatttcgaggagcgcctgaagaaggtgctgaaggaaatcaagacccgtggtgatatcgtgctgttcatcgatgagatccacaccatcgtgggcgccggctccgccgacggcgcgctgggtgcctccgacatgttgaagccgatgctggctcgtggcgagctccagaccatcggtgccaccactaccgacgagtaccgcaagtacatcgaaaaggatgcggctctggaacgccgtttccagccgattcaggtgcacgagccgaccatcgccgagaccatcgagatcctgaagggcctgcgttcccgttacgagaaccaccaccacgtgaccatcaccgatggcgcgctgcagtccgccgccgagctgtccagccggtacatccaggaccgcaacctgcccgacaaggccatcgacctgatcgatgaggccggtgcacgcctgcgcatcaagcgcctgaccgccccgcctgagctcaaggaactcgacgagaagatcgccaagatcgccgccgacaaggacgaggccatcaagggtcaggacttcgagaaggccgccgaactgcgcgacaagcaggagaagctggaagccgatcgcaagcagaaggaagactcctggcgcgaaggcgagtccgacgtcaagatggtcgtggacgaggacgtgatcgccgaggtcatcagctccaccaccggtatcccggtgttcaagctgactcaggccgagtccaagaaactgctcaacatggaagccgaactgcacaagcgcatcatcggccaggacgaggcggtttccgccctgtcccgctctatccgccgtactcgcgtgggtctgaaggacccgaagcgcccgtccggttcgttcatcttcgccggccccaccggcgtgggcaagaccgagctggccaagacgctcgccgaattcctgttcgacgatgaggacgcgctgattcgcgtggatatgtccgagttctccgagaagtacgcggcttcgcgactcttcggcgcgcctccgggatacgtcggctacgaggagggcggcgagcttaccgaaaaggtgcgccgcaagccgttctccgtggtgctgttcgacgagatcgaaaaggctcatccggacatcttcaacacgctgctgcaggtgctcgatgacggccacctgaccgacggtcagggccgcaaggtggacttcaagaacaccatcatcatcctgaccaccaacctcggtacgcgagacatcgccaaggccgccaacacgggcttcaacctgggtgccaacaacgagtccagctaccagcgcatgaaggaccaggtcagctccgaattgaagcagcagttccgcccggagttcctgaaccgtctggacgacatcatcgtcttcaagcagctcaccgagccgcaggtgcgccagatcgtggatctggacgtcaagcagctcaacgaccgcctgttcgaccgtcacatgtcgctcgaactcaccgacgccgccaaggacctgctcgcgcagaagggcttcgacccgctgctaggtgcccgtccgctgcgccgcgtgattcagcgcgacatcgaggacgccatctccgagaagattctgatgggcgatctcgaagacggtcagcgcgtgattgtggatgcggaaggcgagggtatcctcggcgaattcaccttcaagggggagaagttcgaggagccggccgccgccgataagcccgccgaagacggtgccgccaccgatgccgaaacttcgtccgaagccggtgcctccactgatggcgagactccagccgacgccactccggccactgaaccagccgaatccgctcccgccgattccggtgacgctccgcagaagtagtccgtttcgatagcgtagctagcgcataccagcaaagctccccttgacaggggagctgtcagcgaagctgactgaggggtagacctacgcacacataatgtgcacgtttttggtctacccctcagttgcctctggcgatagctcccctgtcaaggggaactactgtttgttgtcgggttattgcagcagggcgagtccggtgtcgatggtctcctcgcgggtaaacagcgtgcggccggcgcgcaccgaacgcaataccgagcagcgctcatacacggcgttgaacacactatcggcgtccagcacaatgaagtttgctggcttgcccgtttccaagccgtacatatcgcgcaggcccaacgtagtggcaccgttgacggtcaggaacttcaacgcatcgtcgatttcttcaaagctcatcatctgtgccaaatgcagcacataatcaagaatgagcatcatattgccattgcccagcgggtaccacgggtcctgcattgaatcctggcccaatgacacattgacacccgcctcagtgagctccttgactcgcgtgatgccacggcgcttggggaaggtatcctgacggccctgcaaatacaggttctcggtgggggcgcaggcgaagttgatatgcgccgccttaagcagcttggtcaggtggaagaagtaggcgttgtccgccgatcccagcgaacaggtgtggctggcggtgaccttcgggccaatgccagccttatatgccaacgccgaaagcagctccacgtaacgggaattcggatcatccgtctcatcgcaatgcacgtcgatgagcttgtcgtatttcgaagccaactcaactaccgtgtgcatggaatgctcgccaaactcacggcactgttcgaaatgggggatgccgcccacgcagtcggcacccatcttgagtccttcctccaccagctcggcccccgattcgccatgcgggccctcgtaggagtacatgccctcctgcgggaagctgacgatctggagagtgaccgtatccttcaattcctccttaagctccagcagcgcctttaatgaggtcaggttcgggtcggtcacatcggcatgggagcgaatgagctgcacgccatgcagcatttctttcttaatgccgattttcgcgcgctgcttgatctcgtcgaccgtcaagtcggacttggtctcactccatcgctggatgccctcaaacaaggttccgctttcattcaccgcaccgggcttgcgggccgtgaatacgtaatcaaggtgcagatgcgtatcgcagaacggtgggcagacaagtttgccgcccagatcgaccacctcaatggccgccagatcaccaccctgagcctcatattgttgcgcgagtccggggccgaatgcggtgaacacgccatccgtgacgagaatgtcctgcaatggcagggtgcttgcagccgtgctgccgggttctccggtggcgatatgtgcgttggtgaacagtgtggtagtcatcgtcgctccttcaactggtgtgttgccgaacggttacgtgaaccgactgcccgcgtaaccaactgaggttattgtcaacagcacgctttgcggtgaggttaaccggaacgaccggtgttccgcgggggaatggacagattgtatgactgtatcgattcgcagtgcgcttcataacacgcagttcaaacgagccgatcctgtggtggaggtcgaaggcaaagacctcgatacgccagtgcgatgggtgtttaccaacgagcgagaggatgtctccagtttcctttcgggcggtgagatgctgattatcgagggtaacgctctgctcgccgccgattggcacggcacgttaggacaatatgtagcaagcctggcacaggctggtgtcgccgctctggtggtcgaactggtggagggtgtggtgcggatgccggacgaactggtgtctgcggccaggctgcatgggttgacgttgattggtctgaaatctcgcgtaccttttgtcgacatctgtcagagtgtcaataccgctatcgtgcacgaacagatgcacttgcaattggaggtggacacaatgtccacttcattacgtgagggattgtcccgtaccggcaatatcgaggctgtggccgaaaccattgcgtcgctgttcggcgaaagcgtcgccattttcgatggtgacggtctgttggccgctcgagcgggtcgtgcgttcgatgccggcaacgaatcgagcgccgtcatcgcccttgaaagtcgctcccggccggtgggagcattggagatcacgcaacgcaccatgactttcgacgccacgatgcgtcgggccatcgccaccatcgtgtctccggtggccgccctctatattgacggcggcgcgcgcatgggcatgatgcatcatctgagtatgggcccggccgacggcgtgcacgtcaatacatttgaggcgcaggaagcgcacgcgatgctcgacgcgctgggttttgccggatcatgcatctatatgccattcgcttttcggttcagatcggtggtggaaggcatcaaccatgtatcgacgatggtcgaacggttcgaagaacggtcgggatgcgccgtctcctgcatgctggaaggtgacttgatggtcggatggtgctccaccaccgattcctcagacggtgcggccgcattcggacgccattgcatggatgcgcttgccgtactggaaggcgacggtgtgtacgtggtgcatggccgagtggcattggacacggtgacgctggtcgacgggttcgcggtattgcgtgacatcgccaatcaggaaccggcatacgggcgaatcgtaagtaccatgtccgcactcgtcgaccgtttcgtcgcatcctctgatatggacaaggcgatgcgcatgctcgtggtacagaccatcggattcgaggtcgccgcctctccgttgttgctggacacactgtgcgtctgcttcgacaacctcgatagcaaaaccggcgcgtgcgagcaattgggtatcagacggcaaaccctgtacaaccgactggacaaagtgacacaaatggtcggcgtcgactataacgacaaaccgaactggtcgatgctgctattcgccgccaaactcacgaaatcatggcaagaacagcatggtgaataatgcgccagcaccactgggcaacctgtccacttctacgccgaacgggttaatcgacgattcacgtttcagcaaatactcaagggcatagtcgaggctatcgcggcgctggtcgacctgctgcgaaacgaattcccacttgaatcccattcagtcacacgaacagcacatccttgaaaggacggtgacatcatgagttccgcaacgattactacatctgcacgactgatgaatttcacccctcaaactgaagaacaggccatggtcaggaaagtcgcggtatcttccttccttggcaacttcatcgagtggttcgactacgcctcctattcgtacttcgccaccaccatcgccctggtgttcttcccaaccgacaatcacaccgtcgccatgctgcagaccttcggcgtgttcgcgctatccttcatcctgcgtccaatcggcgcactgttctggggtagctacggagataagaaaggccgtaaagccgcattggcccactcgattatgttcatgtccggtgcgagcttcctgattggctgcctgccgtcttactcggtgatcggcgttggcgcgccgattctgcttctgctgctgcgcatggtgcaaggcttctccgcttccggtgaatatgccggtgcggccacattcctcggcgaatatgcacccacctcaaagcgtggcatctactgctcgctgattccggcgtccaccgccatcggtctgctcgctggttccacgctggccacgctgatgaccgccaacatgaactccagcgcgatggtcggttggggatggcgtgtgccgttcctgctggccggcccgctcggcctgattgtgctgtacatccgtaccaagctctccgattcccccgtgtaccagtcaatgaacgatgctcttgagtccaagagcgccgcctccgctgacggccaagtcgtttccaagagcggcatgttcgccccgctcgccgaactcttccacaaccatctcaaggccctgatcatcagcttcggagcctgcgtgctgaatgcggtcggcttctacaccgtgctcacctacctgccgacctatctgtctgacaccgtcggcatggacgccacccagtccggcaccatcaccaccatctgcttggtcgcctacgtgttcatggtgttcggcatgggccacatctccgacaaattcggccgcaagaaggtgctcatcggtgcttgcgtggcgttcatcgtcctcaccgttcctgccttcctcatcctcaacacctcccagttctggcccgtgctgctggttgagctggcaatgtgcgccaccctgaccgccaacgacggtaccctgtccagctacctgaccgagacgttccccacctccgtgcgcttcaccggattcgcgttcagcttcaatctggccaatgccatcttcggtggtacggcctcgttcatcgccactggcctgattgccctaaccggttcatccatcgccccggcctggtacatggtgggtgttgcggccatcgccttggtcgcgatgattctttcccatgaaaacaccgacaaggatctgagtcacatctgatctcctcagctccggctcctttcccgagggagccgggcgcattcattgaccatccaatccaccaccaacccaaaggagtactgcaatgggtagcaaccgccgtatggaccacatgacctggccggaattcaaggaggtgaagactcatcccgtcatcgtgccgatcggttcgaccgaacagcacggccagcatctgcccatcggtaccgacgcggtactcgccacgcgggtcgccgaagatctggcggaacgcatcgacggcaccgtgctgcccaccctgagctacggatacaagtccaagccgctctccggtggcgggccgctgttcccgggtactatcgacatgaacggcgtgacagtgatcacccaaatgcacgacgtgctgagcgaactcatcgccgatggcttcaccaagatcgtcgtcatgaacgcgcattttgaaaacgaggcgttcatcgtcgaggccatcgacctggtcacccgcgaaaccgggggagtggccaccatcgtggaaaccaattggtgggacccggttccgcagtcggttatcgacaaggtgttcgatggattggtgttccccggctgggcattggagcatgcggccgtcaccgaaacttcgttgatgctccactacgcgccggaactggtgcacatggaccgtatggtcgaggaagccggtgccacggcgaaatcctatgtacgctacccggtgcgccaaggtgacgttcccgctcacggcggactcgccaatccggccggctcaagcgccgaacgcggccgcctgattgccgaggcgtgcgtggatgcggtagctgagatctgcgtcgaggaatttgccgagtaatctccccttgccgacgcattcgtagtgacacgggttgcaaaggcctgaccctgatagtacggggtcaggcctttcccatcccaagacgccgctaagaattcacctgagagtcgccttcctaggcatggccgttcaatcgacgatcctagcgtgactggtgtgagcaggaatatgaagaaccggcggtgggccggcaagcgatcggggatcgcttttggtgcagtagcgcttatccttacggctctggtggttccttatgcttgtgcgggaaccacgggagccgttcctttttccggcgataatccatcttccggcacccgtacggtgaccatcgccgacatcactgattttcacgggcatatcgaacgtggtgcggacaacgccaccgccttcaccgtggccgacagccataatcccggcaatatgatcccggtatcgaccggcgatttggtgggaggttccccgtatgagtcggcggtggagaaggaccaacccacgctggacatggccaaagcgtggggattgacgatttcggcggtaggcaaccatgagttcgaccgcggtgtcgccgatttcaacaatcgcatcgctgatcccagcaatggcatcgactggctgtgcgccaacacgtctgccgccagtaagtcgcctgacggactgctgagccatgtacgtgactctacgattcgaacggtgaacggcaagcggatcggtttcgtgggcgcccttactgatgcgctcggctcggtagccactccgcagattacgcgtgatgccgatcttgacgaacgggcggtggacgcgatcaatcgcgtggcccgtgaactcaaacgctccggaaaggtggatgcggtggtggccttgctgcacgccgatgcctcagccgccgccgatattgggcgagatgttgatgtggtatacaccggccacaatcacgcgatcaagcgtggtacgaccgctggtggtgcgcctatttacgaggcgggcagcttcgggcggaatatggccgtgcaggatttgatcatcaccggtgccgggcgtcgcgccacggtgcgagtggccgatgtggacctcggcaatggcaccagccatacggcggttgacggcgtgctgggcgtggaagggcttaatgcgcatccggcgcaagccgcttggatgtctgccggtgctgaggcgaacgatgaggtatcgcgcgctcagcatatttaccaggcggcggcaacatattcgaatcatgccggcaacgcggtgattggcaccttggcctccggcgtgaatttcgacaaacaaggttcggataagcacgggaatacggtcggtgtgctggtggcggacgcgaaccgcgagtcaatcatgaagcatgtgtatgccggaaatcgtttgccggtaatcggattttcgaataatggcagtctgcggactccacggcttgatatgaatggcgatggcaaagtcaccgtgcgcgaggtggatagtctcatggccttgcagttcaaggccgcgcatgagacgctcaccgggcgcgatgtgaagagagtgctcgccgagcaattccaccgtgacgatgggcgactggagcggcgctggctcggcatctcctcgaacgtgacgtatcggtatgccgaatgcggtacgaccggtgggagcggcaatgccgatgccgccgctgatacc

SEQ ID NO: 610 - DNA, 3291 bp, Unknown
  R14_15m  MAG No. k141_4145
atccgcgttcgcggtggcgactccgccgaacagtgtgcacgcggccacggccaacgcggccatggccttaccgaaacgcctcatggcattcccttctcctagagattcttcaccgcaagagacgaagcgggtctcctgctcctcaaaaacgctaccccccccccgcggacttagcaccccgactctcgtcttgctagtagtcgaagcccgtttcggggatggcgtcggccatcatgtggccgtagcgctggagcgtgaaggcggcgtccttgtggccgagttcccgcgcgacgatgggcaacggcacccctgcttggattctgctcgaggccgcgtagtgtctgagcgcgtgatgggtccagcctttacgggtcttgctgttgacgcggttgatgggccattcgccgtggatctgcgccacgtagtcgtagatcagggcggagtgcttcatgtagttggatggatgctggtagccgcctgtgccctcgggaatcgatgcgtcatacggccagttggggtttatggcgaactcgctcttggaggggatgcccctgccgaccgaggggaacagcaataggttcatgaacgcgtcgatctcctcctgcatggaaggcttgccggtacggggcatggtggtccagagttcgtctaggtgacgccagtagagccagccgagtggtgtgaaacccgcttgccagagggtgcggacctcctcgtccgtggcggtccagagactgacttgggggtccgcgaagcggggtatgaccccggcgatctgggtgcggtgcgtcccgagcccgaaaccgttccagttggggaggaaggcgggtatgtggacgattctatcgtggtcgtacttcggggtggtcaggcgcatctgtcccgccccgcctcgtgtgatctgctcgcatacgtgggtttctccacgccaggcggattcctcgcgtggctggccgagctggtagcgcagggtgacctgctctctggtgagaatgtgtctgactcgcagggcgaggacctcgccgatgcgcagtccgccaccggcgcctaaagcggtgatgagtcccacgcggcggcagatcatggccttgcggttcatgaaggccaatcgggtggcgtggcgattggcgtcatccttgatttcctccggtttttgataatccgggtagatggtctcgaacgggactccgttcctgaagcaggtgtcgtccggctgggtgaggccgagccccggagcgaacgccatgcgacgcgcggaccgtttgtgggtggcggattcgggatcccagacggccacggctgggtcgtccagcggattctgctggagcgtgccgtaggcggtgatgatgaacgaggcgacgagcttggaggacgggatgtcgcctctggcgacgtagtccctgcgtttttcgttgcggctggatctgatgacgatgcagtcggcgtaatggtcggccggacgatgggtccagttttcggcctgttcgaagacgcccttgatgatgcgcttgacgagtattgggaactcgacgccgctgacttggatggcgcggatggatctttgcccgatggcggtgatggactgttcgccgatttccggcttgatgaagcgctggtagacgtagacgtagttggcggccgtctgctcggcgatctggggcttcttggcgtccatccacgaatggaagcactcatcgaaagtcggagggcgcacgccggactccgaatccggaacgtagtcgcccagtatctcggcggccttggccttggcgctgtcgaggctgtctccgccactggtctgccgacgcttgccggtaaccgggtcggtccatatcacgcgccatctcgggaatttctcggtaggcggcaacgcgttcgctctgccgttcaggatcttgatgcttttccgtgccataccaaccgccatctgtgtaacatgaatgtgtaacacagccagaataacacagcagaagccttgtatttcaacgattctagctattcttatgatagttttatcaaaaccgcgagcatcctgggcacgttcctcgtggccaccaccacgtcgatcaccggcaacgcctccctcggcgtgctttccatcgccgtcctgctggtgttggcgttcgtgttcctcctcctgcagaaggacccaacgcaagcgtaatgtcacccatcaatcagcaacaggaacgccgaagcagcaataaaacggcagatcctaccgcccgagccgcgacctgaaacaatttagccctgcacaacgcacatattttgacagggcggtagttgttgcaaattctgcgacaactaccgttggtaaatcgaacgctataatcagaagctttcagatgctgagttccatgcagtgccccctgtgaccgcaatgcgggcaggtaagcttgcgtgtcttgggcgtgtgtgcggcgaatacgaactctcgcatacccggctggaaggtctcatggcaagccggacataggtactgcacgcgggagcgatagtacttcgtcgccgcaacggcgagcgcaatcgccagcagaacggcgaccggcagcggccaccatacgtctgtcatcacaccgatgacgaggcatgcaatttgcaacaaagtcgtgggcaatccgattgccagcatgaccaaatatgtggtgcgcagggaatgagtggttgtggtgttcataacggttgccatgtcggttaatgttggcgatacgaagtcagacgccgagaccgtcagtgctttgcgcagctgcaagcagtcatcaagacgttgcttctgctcggcgatacccgactgcaaggatgccgtctgctgatccagcaaatcaaccagcacccgttccggccgctcgtccgacagaatcgagcgaatccgctccagcttgaagccgagtcctttgagaaaaaggatgacccgcatccgctcgacctctgcagtcccatacagccttcggccgccgtcgctgatctcattgggaatcaacagacctttggcgtcgtagtactgcacggttcgcacactcacaccagtgagtttggcgatgtcccctgtggtgtatcggctgtccgtttcatcgtccatcgacatggctcaacctcctttcaccaagcaatatgccgcattacgcaacgtcacaagcaacatatgatgcaacgtcgaccacaaaaccttcacatataagcggactgtagaaagacatccgaccatcgcaattgtgcactggttcacagtgaataccccgaaccagttagacggcagaacagaattacagccacacctgttcttcaggc

SEQ ID NO: 611 - DNA, 18489 bp, Unknown
  R14_15m  MAG No. k141_4359
aaccctcccgggtacccgaccaccacgacaggcaatcaggcgaggaatgaactggcaatcattgactataaagaagtagtacaaacacgctcttgagttctcaaaccaccaccacaccagcaagacaggaaaccaaccagaagaaggaacccgccgcgctgagcggcaacaggtgaataacttacacgcatgtttggattcgcgcaaatcaaggcgcgcaaaagcctcaggaatcgttgcaatcacacggttccttcggcgtgtcgcaaacagcctatttgcgctgttctgataccagaataatccgttttgcattgccgatgcgtaacaaattcatgcgttcaccggcgtgttgcaagaattcgattgcgtgaccatccaggttcaccttctcgcaaccggtcatcgcatatgcaaaaagggacttccctttacgggaagtccctttcagtagctattgaagctcgctagcctcaggccaaggtgttcgggtcaaccggaacgcccgggttcatcgtggaggtgatggtcgccttggtcaggtaacggcccttcacggtggacggcttcagacgcttgacttcgtcggccacagccttgaagttctcgtccagagcggactcatcgaagctcatcttaccgatgaggaagctcaggttgccgttcttgtcgacacggaactcgatcttgccgcccttgatgtccttgacagccttggtgacatccatggtcacggtgccggtcttggggttcggcatcaggccacgcggaccgagcacacggcccagacggccgaccttgcccatcatgtccggagtagcaaccacggcgtcgaagtcgaggaagccgccctgaacctttgcgatcaggtcgtcatcaccgacgatgtcggcgccagcctcggtggcctcggtggccttcgggccacgggcgaacacgaggaccttggcggtcttaccagtgccgtgaggcaggttgacggtaccgcgcacgagctggtcggccttacgcgggtcgacgctcagacggaacacggcctcgacggtctggtcgaagttgtaggcaggcatgctcttgagcagagcgatggcctcgttggcggtgtagaggttgttgcgatcgacgcgctcagcggcttcgcggtacttcttggaacgctttaccatctgtccttctccttatcagtccgtaaccgtgatgcccatcgagcgagcggtgccctcgatgatcttcatgccggcctcgatatcgcgagcagacagatcttccatcttggtctcagcgatttcgcgaacctgcgccttggtgacagagccgaccttgtgggtcagcgggttctcggtacccttctcaatgccagcagccttcttcagcagagctgcagccggcggggtcttgagaacgaaggtgaaggaacgatcttcgtaaacggtgatctcgacagggatgacctgacccatcttgtcctgcgtctgggcattgtatgccttgcagaagtccatgatgttcacgccatgcgaacccagagccgggcccagcggcggggccgggttggccttgccagcctggatctggagcttgatcagcgccgagactttcttcttgggagccatattatggttcttctttctataacgcggttcgaatggtcgccgtcctcagatccgcttgcctgctatcacgctcggtcttgactcgttatttatccgtgcatgctgtaggcaatcggcctgtggtcggtctcctcccgcaacttatattgctgtgctgtgctagcgggtcttccctccagacacaagctttcccattatgcaaatccacccggacaacgcaaaaagcccgaccacgatggtcgggctctgcaaagtttggggttaatccagcttctgaacctggtggaagccaagctccaccggcgtatcacggccgaagatggacacgagcacggtgagcttttgggtggtgggctccacgtcggaaacaacggcggccatggtggcgaaaggtccatcggtgacggtgacctgatcaccaacggcgtaggagacttcgaccttgcgcttcttggcggcggcgggcttgtcgccagcggccttgagtgcctcggaagcgatcatcggagccatcattgccacgacttccttgcgggagagcggggctggatccttggtcgggccgacgaagccggtcacgccttcggtttcgcgaacgatacggcgagcgttctcatccggccacatacgaatcagcacatagccaggaacacgtacgcgggtgatgatcttcttacccttttcggtgtgcttctcgacttcttccatcggcacctcgacctggaagatctgatcttccatgccgaaggaggcgacgcgggactcgatgttggtcttcacgcgcttctcatagccagagtaggtgtgcagcacataccacttgccatcaagggaacgcagggacttggagaattcgtcaacggcctgctgaccggcatcggtttcctcggcctgctcggattcgttgacttcttcctcgtcctcatccagagaaacggtctcggtctgagtggaagcaacgggagcggattcagtcgcggccggagcggcggactcaacatctgcattgtcgacggatgcgtcagattctgcggaaaggtcagcaaccggttcagccggggcagctgcctcatcggcagcagcttcggaagcctcgacaacaggctcctcagccggcacggcgtcgagattctcgagattcagttcatcactcatgcgttgttattcaccttaggttgtgcggatcagccgaacacccacagcacgagcttgcccagaccgaagtccatgcccgtgacgagggccatcagcagcagcacgaagataaacacagccagagaccagaagaacagttccttggcagtaggggttacgaccttgcgaagctcgtcgatgatctgcttgataaacagaccgatacgcatgaagacattcggcttgactaccttttcgctgttgttcgtcttagccattctgtacctcgcgtcagctgcttgattattgaaaacttggcagggaaggcgggactcgaacccacaacctacggttttggagaccgttgcgctaccaattgcgccacttccctaggtgaaaatccacctcggcgtgcattccgtagagaacgcttcgccacggcgaaaccgccaagttgttatagtaacggctccggtggattatcgcaaatcgcgtgtcgcgcgcgtggcatgtgcgcggcacacgactcttctcagttagcccattccttgaatcgacgcatgccttcggctaggtcttcgtcggccagtgcgtaggagaaacgcaggtaaccgggagcaccgaaggcctcaccagggacggcggccacgtgggcctcatccaacagtgcggcggcaaaatcagcggacgtatcggacacagtgccgttgggccccagcggcttgccaagcaaagcggtgatgtccgcaaaagcgtagaacgcaccggtcggagtcgggcagttgacgccctcgatatcgttcagagcagccacgatcgcgcggcgacgtgcatcgaacgccttgcgcatctcatgcacctcgtccagcgggccagccacggcggccagagccgcacgctgggagatgttggccacattggaggtcatatgcccctgcagcttggtggcggccttggccacctcaagcggcgcgaccatccagcccacgcgccagccaggcatcgcataggtcttagccacgccgttcagcaccagcagctgcccgcggcattccggcacggcggcaccaatgtaggtggtgcgcgcgtcgtcgtagttcaggtgctcgtagatctcgtcggagataacccagatgtggtgctcgacggcccaacgaccgatcgcttccacggtttccggcttccagacggctccggtcgggttgttcggggagttgacgatgattgccttcgtacgctcggtacgggccgcttccagcgcctcaagcgagggctcgaagttcacgtcggcaccggcgaatacttcgaccggcacgccacccgccaatttgacggcttcaggatagctggtccagtacggagcggggatgatgacctcatcgccatcgttgagcaagatctggaaggattcatacacggcctgcttgccaccgttggtcaccacaacctggtcggcggacacctcgtagccggaatcgcgcagcaccttagccgcaatcgcttcgcgcagctcgggcaggcccggcgtaggcgtgtacttgtaattctttgggtcaaggcaggcatctgccgcagccttgaccacgtttgcgggggtcgggaaattcggttcacctgcgccgaagccgataacgtcaagtccggcggccttcatggccttggccttggaatcgacggcgagcgtagcgctcggtgccacagtgttgatacggtcggaaagagtctgccattgcgccatagtcatggcttccatgctaaacctacagcacgaaaaatcgccagagccgcactatggtgatgggatctgtcgtgtgacagatcccatcagtcacacaagtacaagattgtcgcgatgaaccagtgggtgggcgtactgggggccgaggaaacgcttgagttgggcggtgttacgcccgagcatctgcggaatttcttcggaatcgaagccggcgaggcctcgggccaggtgttcgccgctttcggcatcgatccagaccggatcgccggcggaaaaatcgccatgcacttcgagcgcgccggccgccagcagcgaggcacgcccgccgcgaatcgcctggccggcacccgcatcgaccacaatagtgccgcgcgggtcggcggcgaagccaatccacagacggcgtgatgaaccgcgggccttaaccggtgcgaacacggtgcccaccggatcgcccatcatcgcagggcccgcgttcgaggcgcaggtgagcaccgtggggatgccggagactgccgccacgcgcgcggcctcaagcttggtgaccatgccaccggtgccgaccttggagccggagccggaaacctggatgtcgccaagtgcatcgataacgttcggcacatattccacacggcgggagccgggctgcgagggcggtgcagtgtacagcgcgtccacgtcggtcagtagcaccaaggcttcggcccgcaccagattggctaccaatgcggacagacggtcgttatcgccgaatcgaatctcgttggacgccagcgaatcgttttcgttgataatggggaccacaccaaggtccagcaatcggtccagcgtgcgttccacattgcggtactgggtggcacgaatcgtatcttcggcagtgatcagaatctggccgacgcgaataccgaaacggccaaaagcagtctcgtagcgagccataagcaaaccttggccgaccgctgcggtggcctgctgagtagccacgtcggccgggcgttcgtcaaagcccagcgggccgaagccggccgcaatagcaccagaggaaaccagtactacacgcccgcccatcagtcgtatttgggcaagggcggcggccagagcgtcgagcttgcctggatcgaggtgaccgctcggctgcgtcagcgaactggaaccgaccttaacgacgatggttccagcggatgcgacggctcgccgcacctcggcctgactcggagtgctcatttattcctcggtttcaccatcttcgctggactcaccgtggccgaacagactggtttcgtcatggcgatcgtcgtcaacggtcgggtcggcccagtggccggccttgcgttcggccatcatcgcatcgcgcacggcggcacgggcgtccatcatctcgtgatattgggcacgacgttcggcgttggagcggcggtgcgtgcgcgggtcctgctcttcgagacgcagatccttgcctcgggcaccgaggttggagccgtcgagcatttcggcaccggcggagatggtcggatcccaatcgaattcgaccatacgggcaccacgaccgatgcgcacctcgtcaccagggtgggcacccttgcggcgcagctcgtcctccacgcccagcttggccaagcggtcggccaggtagcccacggcctcgtcgttgtcgaagttggtctgcatgacccagcgctccggcttgacgccacgcacctcgaagaacacttcgccattgccgagttcgcggcgctcgaccgtgaactcaagcgcactgccgccctcgtcagcgcgacgcggacggcggcccttggtctccaatggcttgataaccacgcgcgtctcctcttcggcctgctcgcggttggccacttcctcacgcatctcatgcaccagcgcagacaacgcgaagttgagctccttcagcccctcatgagaggcggtggagatctcaaagaccttcagcccgagtttctcgaactccggacgcacgaactcggccaattccttggcctcgggcacatcgatcttgttcagaatcacgatgcgcgggcgttcgggaatcgggatggcacccaatggcagttcgagcttgtcggcgtagagcgccaactcgttttccagcgcgtggtagtcggacatcgggtcgcggtccggttcaagcgtggcgcaatcaatcacgtgggcgatgatttcggtacgttcgatgtggcgcaggaactccagtcccaggcccttgccttcagaggcgccaggaatcaggcccggcacgtcggcgatggtgtatcgagagtcgccggcgatgacgacgccgagattcggcaccagcgtggtgaatgggtagtcggcgatcttcggcttggcggaactcatcgccgcaatcagggacgactttccggccgaggggaaaccgaccagcgccacgtcggcgatggacttcagttccagaatcacgtcgcgttcctcgccgagttcgccgagcagggcgaagccgggggcgcgtcgggtcttgttggccagggcgatgttgccgaggccgccggcaccgccctgggcgacgacgcagcggtcgccctcgtgacgcaagtcggcgagctgtgcgccgggatgcttggatttgccctgttcgccgcgcgcctcaaagacgacggtgccgcagggcacgggcagaatcaggtcctcgcccttggagccgtccttattgtcgcccaaacccatggtgccgctgccggcgacacgatgcggcatgaaacgatagtcgagcaggctggtggcgttacggtcggccacgaacaccacggaaccaccgtcgccgccattgccgccgttcggaccggccaacggcttgtatttctcacgacggatgccggccgaaccgttgcccccatcgccgcccttgacatggacggttactcgatccacaaaatcactcatattgattaccttacaaaaaagccgcgtccttacgggcgcggcttgaaaaagcttgacgctatatcgctcaggcgatgacgtcgacaaccttgcggtcgcgacgcacaccgaacttcacggagccatcggtgagggcgaacagcgtgtggtccttgcccatgccgacgttgtggcccgggtggaagttggtgccacgctggcgaacgatgatgttgccggccacgacggcttcgccgccgaacttcttcacgccgaggtattgcgggttagaatcgcgaccgttgcgagagctggacgcacccttcttatgtgccatgattcatggtcctttctataactcaggcaatcgccgtgatcttgacgatagtcagcttctggcgatgacccttacggcgagcaacaccagtcttgttcttgtacttctgaatgtcaatcttcgggcccttggcttcatcgttcacaacctcagccttgacggacaccttggccagatcggcggcggcgagggtgaccttgtcaccatcgacaacgagggagaccgggaattccacggtatcgcccttcttggcgtcgagacggttcacgaggatgacgtcgccaacctcgaccttttcctgatggccaccggccttcacaatcgcgtacattatcgttccttttatgttttggaaagctaccttgcctaacacgcaccgagcctgcggtcagacaccgagtttcaaatctacaccaccatgcggactaaatcaaatgatttttgtccgcgtgtcaagcacgacacacctgttactcttccgccgtattgttggcggcgacggcagcggcggcaatctgagccagtttggctttgacgtcggcgctggaaccagccggttcgggagcgggagcggtgccgcgaccatgcttgttggttttgacgaacgggtcgccaccgcgaagcgcgtagggatcgtcgtagtcggccgaaacggtcggctgatcatgcaggatgaaaccacggcccttgcaggtcgggcattcctcggagaacgcctcgaccagaccctggccgatgcgcttgcgggtcatctgcaccaaaccgagcgaggtgacttcggccacctgatgcttggtgcggtcgcgtgccaggcattcgaccaagcggcgcagcaccagatcgcggttggcgggcatgaccatatccacatagtcgatcatcaccatgccgccgatatcgcgcaggcgcagctggcgggcgatctcttcagacgcctccaagttgcagcgcgtcaccgtttcttccaaggacttgcccttgccgataaagcggccggtgttcacgtcgatggtggtcatggcctcggtgcgatcgatgacaatcgagccgccggacggcaggtagacctgacgttccatgcccttacgcagctgggagtcgatggaccatttgtcgaacacgtccttgccttcgtgctcggccgggtcccacttctccagcttgtccttcaggtcgggggccatggtgtcaaggtattcctcgatacggtcgtagaccttgtcaccttccacgatgagcttgctaaagtcgtcgttgaagatgtcgcgcaccacgcggatggccacgtcgggctcgccctgcaggagtttcgggcgcttgccgtgccagaattcctcgcgcttggcgttgatgcgctcccactggcggaccagtgattcgagatccttgacgatggcgtcttcggatgcgccttcggccgcggtgcggataatcacgcccatgtctttcggggcgatcttggagacgatgttcttcagacggctgcgttcgcgctccgaaagcttgcggctcacgccggtcatgccaccggagggcacgagcaccaggaagcggccggcaagcgtgacctgagaggtcaggcgggcacccttgtggccgatcgggtccttagtgacctgcacgagcaccgggtcgccggacttgaacgccagctcgatgcggcgcggctgaccttcgagacgagcggcatcccagttgacctcgccggcgtagagcacaccgttgcgggactggccgatatccacgaatgcggcctccatgctgggcagcacgttctgcacgcggccaagatagatgttgccgacggtctgtacttcctgaatgtcggagacgtaatgctcgaccagaacattgtcttccaccacggaaatctgggtgtggtgttccttctcgcgcaccaccatcaggcggtccacgttctcgcggcgtgcaaggaagtcctgttccataagctggctctggcggctgcgctcacggcggttgtcacggcggcgctgcttcttggcctcgagacgagtggagccttccacatcggtgatttcgtcgatgtactgctgcttgcgggagcggcggaccagcggctgttcgctgttctgactctggtcgtcggtgccctcgccgttcttgccgccacgacggcggcggcgacggcgagtgacggtctgctcctcatcgtcctcatcgcgatcacggtcatgatcatcgcgatcgtcacgacggcgggaacgcgtatcctcggcatcgttctcggcggtatcgtgctcgccgttggcaccggtttcgccgcgtgaaccacgacggcggcgacggcgcgaacgggtgcgggtgacgtcggattcctcgtcgccctcctcctcggcaatcggcgagtaggcgatatcgtccagctcgaggtcttcctcaatctgctcgacttcggcggctgcacggcgctcctgggcgttcagacggcgggagcggcgcgaacggcgggagtccgaggtgtcgtcggcgtcgaaatcgtcgtgatcggcgttggtatcgccggacgcggcgtcacgggaagcgtcacggtcggcggaggcgcggccgcggtcgtcgcgatcgtcgcggcgacggctgcgcggctgggcatcgtcatcgtcgtggctgcgcgagcggcgggagcgacgagacgggcgttcgtcggcgtcaacatcgtcatcacgagtgtcagcggtatcgtgcgcatccacggcggcgggcagcaccggttcctggaacagcagggacgtcatcggtttgccacggcgcacggtctcgtggccagagggcagggattcgaccgcgtcgaacaggcgctcatccggggtatcctcgtgcgtatccgcaactgcacggcgagaacgacggcgaaccgtacggtcttcgtcatcatcatccatatccataggcgcacggcggaggcgggagcgaaccgggcgatcctcgtagtcatcatcgtcggactggcgggagcgagagcggcggcgaaccgaacggtcctcgtcgtaatcgtcatcgtccacgactgaacggcggcgggaacgcggggcgtcatcgtcatcgaaatcatcggcactgaccgtgcggcgcgaacggcgcggacgatcatcctcgctatccaagtcggccactgcggaagcggcgcggcgcggacggcgcggagtctcgtcgtcatcatcggtatcgctggaagatgcggcggacgtacgacgggtgcgacgcggcgtttcggcggcatcgtcggccgtggaaacgcggcgcgtacggcggcgggttggacgttcggcggaatccttggaatcgctggattcatcggaatcgccggaatcggatgacttggaatcggccgcggtgctggcattgggaagcgcgggggcttcgaacagcggggtgcgttcctgcacttgcagttccagggaggcgccggcagcaccggtgccgcggaccacgcggcggccgccacgacgacggcgaacaggttcgacgggctgggaggcggcggcaggcgcagcgttcacggctgcagccgaatcggcattggatacggttgaattatcggttccgtcgttgacgaaaccttcacggttgtcagtgggcacaatgctcctcgcggcgcgctgcatcacgacgcctatttccaggcctatacgcttgactcacaccacgctctcaccgtggccgcgcgaaaacgcgccgcgtaaaggcaacttcgtctcaagtctgtcctgcgggtggcggacaccggcgcttgcgttgtctcattctcgagagccgcaaggggatcgacgccatctcgcacgctgatggttatgcagaaccaccatcctttagtatgccacatattttgtgcgggcgtggcccggcgaggctgacgttctctcggctcccctccctgcggtgacagctcccctcagagaggggagctcgagaggtgtcagaccagccagtcggtaagaattgcggtcatggcggccaggtcggattcgggcacctgctcgtcgtgcttgtgcgccagcagcgggtcgccggcaccgaggttgacggccgggatgccgagctgggagaagcgtgccacgtcggtccagccgagcttggccaacgggtcgcggccggtgcgctccttgaccagtcggaccagatcttgggcgagcggggcgttcaggcccgggcgcgcggaggggctttcgtccttcatttcgatgccgtagccctcgaacacgccgccagtggccacatgctcgccattgccgagttcggcaccggcatccgcgcccatcatcagagccttggcctcggccagcgacttgtccggggcgaagcggtagttgacgtgtacgcggcattcatccggaatgacgttcgtgcctttgccgccggagatcagcgtggcgttgaggccctcgcgatagtcgagcccgtccacgttcacggtggccggctcgtaagcgttgagtcggctcaggatgtcggccgccttgtggatggcgttctcccccatccacgcgcgggcggagtgcgctgccacgccgtgggtcacgacgtcgaaacgaatcgtgccgttgcaaccgccctcgatgccgctgttggtgggctcgccgatgatggcgaaatcgccggtgatccaatcgggatgggcctcgacgactttgcgaaggccgttcttttcggcgacgacttcctcatggtcgtagaagacgtaggtgaggtcgactttcggggtggtttccggcgtgcggccgtcgagcgtggcggcgaggtagagcatcaccgcgtcggaggccttcatatcggtggcaccgcggccccacagcacgcggtcttcgggatgagcgtgggcgatttcttcgcgaatcagcgaatcgccgggctccagccacttcggtgggaaattgtcgatgaccggcacagtatcgaggtgcccggccaagatcacacggttcggctcgccgaagtcggtgctggccaccactgtgtcgccgtgacggcggacggtcaggtgctcttgctcgttaaggaaggcctcgacctcgtcggtgagggggccctcgtggtcggacacggagaagttctccatgatctgggtgagcaggctgttcagctgctcggcagtggatgcggtgcggttcaattcaagcgtcatgtgaacagcgtaccgcgtgggcggcgggcccagcacacccactacatgagattttgcggccgaatacatttttatgtgccacactggggtggcgaaagggaggattatgtcaggtctaatcagcgccatgcaaggcttctgcgttatcggcatcgtgattgcggtgggatatgtcgccgcacgaatgcgaatcggcgggccgtccgctcagatggtgctcaaccgtttctccttcttcgtatcgagcccgtgcctgatgttcgccatcctctccaaggaaccgatcttcgacatcttccatccctcgattatcgtggcgttcttctccgccgtgctggtaggcgtggtgttcctggtgctcaaccgcatgttcttccacctgaacgccccggacgccaccatcggcgccctgaattcgctgtacctcaattccaataacatcggcctgccaatcgccacctacattctgggcaatccggctctggtggcaccgattctggtcatgcagcaggccatcttcacaccggtgggcctgacagtgctggacgtgaccaccaagggcaaggtctccatcaaggaaatcgccaagcagccactgcatcaaccgctgcttatcggttcgctgctgggcattgtggtctctgcgatttccgctaaaagcggctggttcccagtgccgaaattcattttcgacccgatcgacatgatcggcgattcagcggtgccaatgatcctgatggcgttcggcatgtccctacacggcaccaagccgctgcagcagaagggcgatcgcccggccatcttcacggtcgcggccctcaagaacatcatcatgccaatcatcgcgttcctgctcgcctatttcgtgatgggcttccgcggctccgagctgtacgcctgcgtggtactcgccgctctgcccaccggccagaacgtgtacaactacgcggcccgctacaacgtgggcctcaccttcgcgcgcgacggcattctgatgagcaccatgaccagcccggtgtttatcgcgatcatcgcggcgctgctgagctgagccggcaactgtaatcaccgtaaaaaaacttccgcgaaatccaccgtaggattccgcggaagcctgagatatacactacttgagaatcgccttaatcgcctcatactgctgagcagtgagttgcaccgctggctcacggatcagggtggaaatgttcagtcccttggccttgaccgcacccttgatggcggagatgaacaggtcggtctgatcgtacagcgccatcaggtggctgatgcgttcggcggcctcaattgcggtgccatagtcgccggcctcatatgcacggtgcagcgtaacgaaggtctccggctccacattggtcatgccgcagatcacgccatcaccgccggagacgcggttgacgagatagtactcgtcgaaaccggagaacaccgcaaaccgtggattcacggccttgaccgcgcgaatcaccttgcgggtgtggctgattgtgtcgaccgtgtccttgatgccgacgatgttcgggtgcgcggcggcaagctcggccacgagctccggggtcaagtcgctgccggtgcgcggtgggaaattatagaggatcaccggaagattcgtcgcttcagcgaccgcgccgaagtacgccttcgcgcctcccgcagtagggccgaagtaatacggcgaaacgaccacgagcgcatccactccacttgcttcgactgcccgcgcgaagtcgatcacattgttcaagttggtatcgcccacgcccgcgaacaccttgatgcgcccggcgacatgcttggccacgaagtcgaccgcctgcttcttgacgtccagagggaaggcatagaactcgccgatgctgccaaacaccagcacgccgttgataccggcctcgatcagatgatcgagatgctgcccccaacgttcatagtcgatgtcaccgtcgtccttggtgatggtgatggatgggcagatgatgcctgagaattcggcgctgcttgtcatgattgttcctttcgttacggaataggggtgccgcacaagcggcaccgggtttgcggtctctcccccagtcgtcctgcggacgatagccccctcatcagagggggcttgggtttagtcgatgttgtaagcgcggcgggcgttgttttcgaagaagtcctcgtcctcgccgaacgtgtccagcatgagttggaagtgcgtggcaaaggtcgagttgagttccacgaccggccagttggagctgtacagcaccttcttcgggccgaatgtgtcccgcacgtatttcacgatgtccgggtccaccgggttgtcgccggaaaccttgatatacgaattcggcagttcggccaacgctgcgagtgcggcgcacgattcctcatcaagcccgggcacgttgccgagatgatcgatgatgaccgtcacttcgggaacctgcgagaacgccttggccatgtcgcccagttccgggccccggttgcacagctcgaatggcaatcccttggcggccatcgcgcgtagaccggcgatgaattcgggttcgagcgcacggccccgcggctcggaatccacatgcagcggttccctgatgccatcggcgttgatcgggacacgcatccaagggcttacccgcccctgcagcatgcgcttcaggatcagaggacttgcattctcgtacagcagccggtcctcaagctcgtgatcggccgcgtcaacctccacatatacgccgccgaggaaattcacgccaaatttggcgtactgtgcggctaggtcttcaatcgtgtacttgtgttgcagcgagggcaatcctgccagccatggcagatcctgcgcatccggatcccagatatggaagtgggaatcgattacgttgagtgtcatgtcaggcctccttcagaccgatcttggaaccccagaatgcgtaccatgccacgaacaggaagcccgggaccatcaccaggatggcgatctcgatgcctgccgcatcctgaatcacaccgagcagcagcggaatcaacgcggcgcccacaatgctcatcaccaaagccgaggaaccggtcttcgccgcggaacccttgatacctttcagcgtcagggagaatatggtcgggtatccgatggaaatgaacagatacgccaccatgaacgcgatgacggagaccttgcccaggccaaggaataccacgaacatcagcacggctgaaatggtcatgtatacgccaagaatcttcgagggatcgaatttggccatcaatggggtggtggcgaagcgtccgatggtgaacagcagggaaagcacggaaagcatcatcgccgcggtgccggctgtgatgcccgcgccccagtgcttgagcgcgtaggcggagaagaccgccatgccggccacttgcaggccgatgaaaatgaactcggcaagcacgcccaatgcgaagtgcgggcgcttgagcaggccgaagaaggagctgttctcggaggaggcgccgcccgcggcctcctcttcgtctcccggaggcgtgggcagcttgaacagcgcgaacacggcgagcaccacgaccagcacaacgccgatcacaatgtatatcgtgcgggtatcattcaggaactgcgccttagcggcgtcgaagccggactcgcctgatgcgacggtggtgccgagaatctggccaagaatcagcgggccaacgatgttgccgacgccgttgaaactctgcgccatgttgatacggaacgattcgcccttttcatcacccagcttggtgatatacggattgcagttggtctccagcgatgccgcgccgagcgcgataacgaacatggcgaacaggaacaggccgtagctggccatgctggtggcaggaatcaccatgaacgcgcccagagcgaacaggaacagaccggagatgacgccgcccttataaccgaaacgcttggcgatcaagccggctggaatggccatgacgaagtatgcgccgtaataggccacctgcagtaatgacgcttcggcgctgctgagttctatgtagtttgcgaacggcgagttcaacgcgttcacgaggttcatggtcaaaccccagataaagaacagtgaggtcaccagcacaatggcgatggtcgccttggaaccggttgtgtttttggatgtcatcattgactccttagtgatacgagtttccccgatattgcctagcgagaagtggaccaccctgggccatgttggtaaacggatgacccagggcgcgggtgatacgggcggcatacgcggatacggcgtacggatggagcaatgatcaaagctccggaattgccgcgcgaatattcgggaaagggctgcttgtcagctcagcgcacggtcaaggtggacatagccgccatcgacgtacacccactgaccggtggtgtggctggagcggtcggagagcaggaatgccgcttcattaccgatctcttcggtggtggtcatacgatgttccagcggaatcttgtcggtgatcaccgacaggcgcgcctgctgggccgcttcatcgccaaaggtcttgatccaatcggcatagagcggggtccagcactcggagacgactatggcgttgacacgcacgctatcgtgcaccaatgcggcggcccattcacgggtcaggcccaggatcgcgcccttggcggccgcataggcgctggtcttgccttggccggtaagcgcggtcttggacgagatgttcacgatggatccgcggctttccttgagatacggcacggccgcgtggaccagctcgtaatagtgagtcaggttgccgtgaagcgattcctcgaactcacgccaagtagtggtctcgagatccttgttgtcgttctttccggcgttattcacaatgccatcgatatggccgtacttcttgtatgttgcttcgacgacgccggcgatcttgtcggtgtcgttgaggtcaagcaagtgcacatcataggtggtggtgtactgctcgatatccttcttgaactcgtcgagagcgctgtcgggtcgattaatcaccaccgggatggccccctcctgggccagttgcagcgtgatgcctttgccgatgcctttgaaaccgccggtgatgatgatgactttgccttcgagatgcagatccatgggaactccttcgtccatccttattctgcgtttcatgggtgttccatgtcacgcccggccggggcttcggcaccccagccggagtggttgtgtgttgttgtgttgagttgtgttgttcagttatgaattttcagttgaggtcagccgcgatacaggtacttctcggccgtctccagcgtcatttcggtaccgttgcccggagcggtcggagcgacgtagttgccgtccttgatctcggtcgggtggacgaaatgttcatgctggttatcgacgtattcgatcattcggccatccatcgtgccggataccgccacataatcgaacatcgcgaagtggcatacggcctcgcacagacccacgccgccggcgtgcgggcagacgggcttgttgaacttctttgccagcaggtattcgagcacgatctcctgcggaccggccactcgggtggcgtcaatctgcatgatgccgaaggcgttggcctgcag

SEQ ID NO: 612 - DNA, 27257 bp, Unknown
  R14_15m  MAG No. k141_4530
atcggcacttcggagagcaccacgctggtcagctgcgcggaggcgaagcccagacccagaccgtacgcggccatgggaacaagctgccaccacaccgacaatcccacaggcataaggaccgcgaccaaggcgacggcgatgatctcgatcacaagaccgagttgaatcacgccggccggggtgagcttggcggccatgacatgggcctgcgcacctgcgacgatggaccccaggcccatcacggccagcatcgcaccggcctgcagcgtgttgagcccgcgggcgttgatgaggtacagcggcagcatgaacaccagcgcgaattcgccggcggcgatggccgcagccgccagattaccccacgagaacgtcctgatgcgaaacagggtcatgtccagcatgaccggccgaccggctttgccccgcgcggattcgaagacgatgaagacggccatcagaagcgcgccggcgatcaggcagatcggcaccggcgacaaccagtcacgattccagctcaacccgccgagcttcaactgcgttgaggtctgcttccaccaaccgtaggtctcgccttcgataagaccgaacaccaacagggccgaggtcagggcagacaacaccacgcccgggatatccacaccgacgcgacgggatcggacatcctgcgcggcatccgcggcaccggcgaccgaggcgttcccaccggtctgcggcaccaggaagatggccgacacaaagaccgcgatgcccagcggcaggttcaccaggaagatccaacgccatcccaaggtctcggtgaacacgccaccgagcagcggaccaagcgcggcggccgaactcatcaccgcgccccagacgccgaacgccgcggcgcggtacttgccacggaacagggcggacaccgtggacagggtgttcggcatgatcatcgcgcctccgatgccctgcagcacacgggcggcaagcagcatccccgcaccctgcgaggcggcggcgagcgccgaactcgccacgaagatcacggtaccggcttgaaacaccagtttgcgccctctggcgtcgcccaacttgccgaaaggcagcaacaacgcggcaagcacgatgttgtagagcgaggtgacccactgggcgtcggtcaggttaatgccgatgtcgtcgatgatggtggggatggagacattgacgatcgagctgtcgagcacgatcatggccaatcccagggccatcacccacagcgcgccccacggcggcgcctgggtgggcagcggcgacgaggccgtcggattcgttgaagagatcgaagacgcatcggcctgagtctgatgctgagatcgggatgcatgatccataacggggtttcctctcattgccatgattgcggcgaccgacacgcctatgcgccattcacggtacatccgcggcctagaccgtctcgccggatttcgcgggacattccgggcgttcagccatgggcgtaacctcggcggatcactgaagagaggagcaccaaagacggccgcactattccagatgcgtcatttcgaaatgaaagcccgacagaacgccggaatcgcaacgatcgacaaatcgccagacgatacagggccgggctctcgctcaggaaacagggcatgcccagcgcccatttaccggcgtcggcattgacggcatcgccgccgccttccacgtctcctcccgatgaccgaatcgctaattcccgcccgccagaaccccattgcatcgtgtagacgggatatggaataatccacaaggtgcttttgcgtaggaccaaggcgccggcgatgacacgggacaaccacaacagcgaatgacgcacaacgggtcgtccgggacacccccgtaaacggtcgcgtcgttttccattggtgtcattgcggggtccgggtcccgcaaaacgttggaaaatcagcgtttcttgaacggtaaggtaacatatggctgagtttatccaccagatagttcgtagtcactgagccttgctattccaacgtttttcccgcatgtcccgtgacacaacagcatgtcactcatcggctacgaatcggcttgtgtcaaagttgcgtcatccgacgctaatccgagacccagcattgctagaatcgatgtaagtgatgccgacgcgacggcattccacatcacggaagattcattcactttcgatgaggcaaggaggcgagacatgacgaagctcgaacgcaaccagatcgatttctccacgtttatgctgtatcggctcgccgagcattggggcaagtccgtgcccgacacctatcgcattctcgataaggccaacgctatcgacggctaccttgtcccctgctacgacatgctgcacacactcggcagcgaatacctcgtcaacgacctgacggactacgtgcgcgagcggggaatctgcatatgaggctgtaccacggttccgacgtcacaatcgaaaagcccgacgccatccacttacgcaagaaccttgatttcggctcggggttctacgccaccagttatccgaagcaggcggaacgctgggccttgcgacgttcattgcgctcgcatggcaaagcgctggtcaacgtgtacgaattcggcgaaacggcgaatctccatattctgcgtttcaacgagaacgacgccgaacgggttcgattcgtatgcaactgtcgtcggggcgggcagcctcccctgggaactgacctcatcatcggaggcgttgcggatgacaaggtctacgcggccatagacatgtacatgcgtgagctatgggacatggaacgcaccctgcaggcccttgccttctacgaacgaaacgaccagtaccgcttcctcacaccccggtcgatcgcagccctgcgatacgtcgagacctacgaggtgaaacaatgacgatcacgccacaaaccctgacgaagctcgaaacgctacgcaaggagcatctcgaatccgatctcatcgcgctgatagccgaccaatacgacatgacagccgccgatgcgatgaaactctattattccagccaactcagccaacaggtggccgacggctcctacggcatcgaacaactcgacgcgcgctacctactcgacgaccttcaacgatacgagccgcaactcttcagaaccgtcaacgcgactgaatagggcacggctgccgagttccgaacgagcaccctcgcatcccatcacattccgtagcgacgcggtgtggacgacaaggcaacagctcgtcccgttactcggacgcggcatcacgacgatcagcaaaacacatcggcaatgccaagcgtgaggaattggacggaatcgcccccagcggcacaacccacgagctacatctcgcctactcccctgcgtcgggatcgtatttgagaatgtcgcccggctcgcattccaaggcctggcagatattggccaacgtggtaaaccgaatcgcgttgaccttgttgtttttgatcttggataaattgacgttagtgataccgacctgctcggcgagatcgcccagtgagatgtgccgcttcgccatcatcacatccagttccagaacaattttgcccatatcaaccttccctgaatcgcgcaatcatcagagcaggccgtcgacgtcatgctcaagctcggcgccgtatgcgaagaattgcgccaggcacagcacgacgagaccgaaggcgatcggctgcatattcacgaagaattccaccttgcggctccccaccacgagatcgacgacaaccatgaaaatggcgttgatgatgggggcgatgatggatagttcgccgatgcggcggacgcgttgcacgttggccttggtgaagggagattcggtttcgctggtactgaagatcagatggatgtttctgaacaccacagccatcatcccaagcatcgccaccatggcgattgcggcgacagcgaaaccacgggcgagcacagtggcatccgatgccacaggcagcagattcgggtccccaacgataaacagattcccggaatccaagccttcctgaacccaccgcaccagcggagcaccggcaacgaccagggcgaccagcatgcccgcatacaccgccgttgcgatccagagcatcacttccacaatcttcgcgatgaccttgaccgccgcgttaagcttcgttgccttcatcgttatcacttcctttgacaataatgaaaatatttattatttgataattttttatcgttttacgataattattttatatcagacgaatactttctatgcaatgctcaaagcatcggcgtgttccgcgatcgaaagcacctgcgccatgcgctacaaaccgatcaccgcaatatgcaacctgccccgcacctcgtcaatccactgttgcggcatgacgatgggatatgggataatccacaaggtgcttttgcgtaggaccaaggtgccggcgatgacacgggacaaccacaacagcgaatgacgcacaacgggccgtccgggacacccccgtaaacggttgcgtcgttttccattggtgtcattgcggggtccaggtcccgcaaaacgttggaaaatcagcgtttcttgaacggtaaggtaacatatggcagaattcgtatttcagatgatcaaggcccgcaagtcttacggcgaccgcgtgattctcgatgacgtgaccctgagcttcctgcccggcgcgaagatcggcgtcgtgggcccgaacggcatgggtaagtccaccctgctgaagatcatggccggcctggagaccgtgagcaacggcgaggccacgctgaccccgggcttcacggtcggcatcctgcagcaggagccgccgctggatgacaccaagaccgtgggcgagaacatcaagatggcgttcggcccgattgccgagaaggtcgcccgattcaacgagatcggtgaagaaatggccaacccggacgccgacttcgacgcgctgatggaagaaatgggcaagctgcagaccgagatcgacgccgccgacggttgggacctcgactcccagcttgagcaggcgatggacgccctgcagtgccccgatccggacaccccggtcaacgtgtgctccggtggcgagcgccgccgtgtggccctgtgcaagctgctgcttgaggccccggacctgctgctgctcgacgagcccaccaaccacctggacgccgagtccatcctgtggctggaacagttcctgcaccagtacaagggtgccgtcatcgccgtcacccacgatcgttacttcatggacaatgtggccgaatggatctgcgaggtcgaccgcggccacctgtacccgtacaagggcaactactccacctacttggagaccaaggccaagcgtctggagatccagggagccaaggacgccaagctcgccaagcgactgaagagcgagctcgactgggtgcgctcctcccccaaggcccgtcaggccaagaacaaggcccgtctggaacgttacgaccagatggagaacgaggcacgcaacaacaagaagctcgacttctccgagattcagattccggccggcccgcgcctgggctccaccgtgctggaagccaaccacatccacaaggccttcggcgatcgcgtactcatcgacgacctgtccttcacgctgccgcgcaacggcatcgtcggcgtgatcggcccgaatggcgtgggtaagtccacactgttcaagaccatcgtgggcctggaaccgctgaccagcggcgagctgaagatcggcgataccgtcaaaatcagctacgtggaccagaaccgtgaaggcctggacccgaacaagaacctgtgggaagccgtgtccgacggcctcgacttcatcgaggtggccggcgtggaagtgccgacccgcgcctacgtggccagcttcggcttcaagggcgccgaccagcagaagctgaccggcgtgctgtccggtggtgagcgcaaccgtctgaacctggccctgaccctgaagcagggcggcaacctgctgctgctcgacgagcccaccaacgatctggacgtcgagaccctggaatccctcgaaaacgcgctgctcgagttcccgggctgcgccgtggtgatctcccacgaccgttggttcctcgaccgtgtcgccacgcatatcctcgcgtgggaaggcgacgacgacaatccggccaagtggtactggttcgaaggcaacttccaggcctaccaggagaacaaggtggcccgactcggtgaggatgcggcccgcccgcaccgcctgcacaagaagcttgtgcgcggctgagatacgccggcattagtgccacaacgcgctttatacgtcgaaagccgtccctcaggggcggctttcccataattgcccccatgactgccccgccccgcatcccataaaatcccacagtcacctacggcaacgcaccggcaacacaccggcagtgcagcagcaacgtagcggcaacgcaccgcataaccaaccgtttaccttccaaacagtctcgttacatttcgctcccggaactcttaacccccaccggatagactgccaaccgtaggttggaatacgataaccgaatatcgaacacagtagaacaggaatcgaggaacgccatggctcaggcaaccaccgtaactccattggaccatctggtgaaggtgctgaagttgggcgagccttccgcttaccgcaatcacacatacatcaatggcgagagtatgtacttccccaccggccgcgtctacggtggccaggtcatcgcccagtcggtgatcgccgcgtccaaaaccgtgggcccttcacgcctgccgcattcggtgcatggctatttcattgccgccggcgatattcgtcaagacctgctgtttgacgtcgagaaccttcgcgacggccgctcgttctccgctcgtcgggtcaacgtcacccaagccgaggggtcgattctcacggccatcgcctccttccaagagaccggtcaggagggtgtggaatttgccgatccgatgccggaaaacctgcccgatcccgaaacgttgacttccgccaaggaactcatgcagccgttcgccgaaaagtcgccgttcgccaatttctatgtcgagaaatcgccattcgatatccgccacgtgacgccgaccgtgatgctgcgcgcagacaaggattccgccgagcatgattccggcaagcagatggtgtggatgaaggccgatggccacgtcgatgtgccgcaggtcatgcatcgtgcgatgctggcactcggctgcgatcaggtgatgatggagccggtgctgcgccgcgccggactgtcgatttccacaccgggcatttcctatgcgtccatcgaccattcgatgtggtggtatcaggatatcgatatcaacgaatggcatttatatgtgcaggatacgcctatcgccgcgcacggacgcggactcggcatcgccaaagtgtatgcgcagaatggcgacttggtggcggccatcgctcaggaagctatggttcgcgtgccgcaggaatagtgggaatcggcttggccgatggtgtggtttttcttcttctctcccccagtcggctacgcctacggccccctcgtcagagggggcttatcacggattatcttctgtaggcctgggctatgtcgctacggcgcttggcttccttgattttcgggttttcggggccttcgttcggcggtaactggcacaaccattcgccgataatgccgatgatcatgtcggcgatgcacaccacggccacgattgcgcactcggtgacggcgtgtgcatagaaatccgcctcgatatggctcaggctcatcacaatctgaccgccataccagccggcgagcgttgcgcccgccaatcccagtgccttagacagcaccagcgtatacaccgcgatagtgggattgatgaagctatgcggacgcttcttggggtcggtattcgcgtatttatgcacttgcagggccaagatcagcacgataacgcccagcacggccagcaatccggtcacaatccaaggcgcaccaatcagcgacagtcccgagctttcgccgtaggaggccagaccgatacccgccaacaggcccagcacggcaccgatcacatactgccaccatggtgttcgccgtgttttcatgtccggcctccttatcgttgcgttgctgtttgctgtttgcgaacggccctcgcgcttgggctgttcatcttgatttggttctcgtcactgccgtgcccggctgttcgaggccggagactggtccgtcaccgtctggtttctagcctaccgttcgtaactggttctgccatcagctcaactgttcgacagtatccagttgtccgatagcaatccgacctgtccggcatccggtgccatggccaaaaggaaggccaccgggtcgccgcccagagaagcattcgggtccatatccagccaaggtgccaataccgacgcatggttacgggccgacggccaaggaatgctgcagttgggctcgtcggaagtcacgccttccatgtcgacaaggtcaaggtcgactgccagatcatgaacgctttcgatgctgcccaatacggcaatcaggtcggcgggcggcaacttggtttcgatttggatgaccgcgctcatcgcgtccgggccgtcgaaatggctgacatggtagagcggcgagatgccctgtacctgattgccaggaacactgtcgatggaaacgatggtttcgcggaacagccgttcgacatcctgcgaggtggaatccagcgaaataatcgccttgcgtgagacgggtgccgactccgacgctgatttttgcttgactgcatgcccgccgagcatccagtcttcgctctcgagctgcacggcgttacggtccggtgcggcggccagcaaatcggctacaggcccctcatgggctccggcaagtttggcgttcggattcagcgccgcccagggagccagcacaaacgcgcgctgccaagcacgcggatggggcaatgccagatccggatccgcgctggtgatgccatcaaagtcgataatgtccaagtccaacggcctggaatcccaatgattctcacgaattcgcccatggttcgcctcgatgctttgcaacgcggcgagcaattcgtggctgcccattgtggtttcaagctccaccacggcgttcaggaaatccggcgtaccgtcagccatgccccacgcggccgtgcggtaaagcggtgagataccggtcacctgtgtgccgagcagcgcgtcaatctcccgaacggcggctcgcaaggtggattccacctcgcccacattgccgcccaaggccaccaccgcgttatggatggcatgctcttcagcagtgcgtccattatcggtggcacgcacgcgcgagatggagaccgatacatctgcaaaagccacgacgatgggcgcatgaggcttgtgcacggtgacgtcgatggaggcgacggccggcgcatcggcaaggatcttatccgcgatacgttgggccagacgctcgatcaggtccacatgagggccttcgatgacagccgcgatatccttggccacacggccgtaatcgatggtgtcgttgagatcgtcggattgaccggctgcggccagatcaaggtgcagggtgacgtccacgacgaaggtttgtggccgttcgtgttcaaaggcgagcacaccgtgggtgccgttggcatgtacgccggtaagagtgatggtgtccattggtaaggctttctgctcaaatgctcccctcagtcgccttcggagccagctcccctcgtccgaggggagccaaggcctagaagcaaccaaaacagggagccaggggaatcatgcgtattcgcgccaggtgttgccggcgatgacggcggcgcggcttttggccacgtcgtgtacgcgcacggcccatgcgccatgttcggcggacagggcggacaaggctgcggtcacgtcatcgcgctgggccatgatcggcccatcagcaccggcagcgcccgcctcggtaagcatcgccgagatgaagcgtttgcgggactggccgatcagcaccggatatccagtggcgcggaaggtctcgagtccggtcagcagcggcaggttgtgctcgatgccgggcttggagaagcccaggcccgggtcgatgataatgcgctcaggctttacgccggcggccagcacaccgtcgacttggcgcatgagttcgtcgtgtacgtcggtcaatacaccgtgctcgtagacggaggtgtcttgatcggggttcgcgcccttggagccggcgagccaaccgcgccaatgctgcacgatgtacaggcagtcgtggtcggcgaccacgtgcggcagttcggcatccagcgtgccaccggagacgtcgttgatgatctgggcgccctcgctcagcgcagcggcggccacggatgcgcgcgtggtgtcgatggacaatatggcaccggccggaatcaatgtcttgacggcaccggtgatgcgggccagttcgtcggcctcggacacgcgcttggcgccggggcgcgtggattcggcgccgatgtcgatgatgtccgcgccggcggccatcatgtcgcgcccgtgctgtgccgccttggccgggtccaaccacaggccgccgtccgaggacgaatcctcggtgatgttgagcacacccatcaccatggtgtgcgtagtgtcatgcaacgcctgcaaatcagtcattatgtttccccttctatgtaggtcccaagtgagctccctatgatgagggagcttagtagacactatttatccaaaatgaggctcatggcttcggctcgggtggccggattgcgcagcatgccgcgcaccgcagaggtcaccgtgcgggcggaagacttcttgatgccgcgcatagacatgcacaggtgctcgcattcggtcaccacaatcacaccacgtgcgcccgcatactcgaccagcgcgtcggcgatctgctgggtcaaacgctcctgcacctgcggccggcgagcatacacctcgaccagtcgggcgagcttgctcagccccatcaccccgtccttggcgggaatatagcccacatgggccacgccgtggaacggcagcaggtgatgctcgcacaccgaatacagttcgatgtccttgaccagcaccagttcgtcggtatccacgtcgaagtgcttctccagcacatcggccggggaagcctgcagaccggcgaacagctcgcggcacgcgcgggcgatacggtcaggtgtttccaccagcccctcgcgctcgggatcctcgccaatcgacttcaggaacagacgtacggcctcgcgcacgccttcctcgtcgtatgtgcgtttctcccgctggcaagactctatatattcgttcatctcatctctcccttgtcattgtccacaacgacgtcggcccggcctgcgtacgtgagaaaccacatgaacaggtcgggacgaatcgtcatcgtgtctactcttccggcttcatgccgaccgagcgcttaaggctttcgggaatctccaccggcggcttgtccgagtcggggcgacggtcgttggacagccacaccgggcggaccggagccttcttgatcggcgcgaagatcgccgcaagttccttctcgttcagggtctccttgaccaacagctggcggaccagctcgtcaaggatctcgcggttgtcgttgatgatggtccacgcctcggtgtgcgcggtctccaccagcttgagcacctcgtcatcaatcacttcggcggtgcgatcggagtacttgcgcggctgcagaccgtccatcacagtggtctggtcatcgtcggaaccccacttgatggcaccgagcttgtcggagaagccgtattcgatcaccatcgtacgggcgatgttcgtagccttctcgatatcgttcgaggcaccggtggtcgggtcgtggaagacgatttcctcggcggtgcgaccgcccatcgcgtaggccatctggtcgagcagctggttgcgcgactgcgagtagcggtcggaggtcggcatgacggcggtgtagccgagggcgcggcctcgcggcagaatcgtcaccttggtcaccgggtcggtgttgttcagggcggcggctaccagcgcatggccaccctcgtggtatgcggtgttgcgcagctcttccagagccatgcccttggacttgcgcttcggtccggcctgaacgcggtcgatggcctcgtcgatggcgcggttgtcgatcaactgggcaccggcacgggcgcacagcaacgcggcttcgttgagcacgttggccagatcggcaccggtgaagcccggcgtgcgcacggcgaccatgtgcaggtcgacgtccggtacgaacggcttgcccttggcatgcaccctcagaattgcctcacggccttccagatcaggggcggccacgcccacctgacggtcgaatcgacccggacgcagcagagcggggtcaagcacgtcagggcggttggtggcggcgatgatgatgaggttggtgtcgttgtcgaaaccatccatctcgacgagcagctggttcagcgtctgctcgcgctcgtcgtggccaccgcccatgccggagccacgcttgcggcccacagcatcgatttcatcgatgaagatgatggcgggggcgttcttcttggcctcatcgaacaggtcacgcacacgggaggcaccgagacccacgaacatttcgacgaagtcggagccggccatcgagtagaacggcacgccggcctcgcctgcgatggctcgggccagcaacgtcttaccggtgccgggagggccgtacagcagcacaccgcgcgggatgcgagcgcccagcgccttgtacttggacggatccttgaggaagtccttgatctcctcgacttcggccacggcctcgtcttcgccggccacatcggcgaacttggtggtgggggtctggccatcgagtagcttgccgctgttcttcttgccacccatgccgagcatgccgccggcaccacccatgcggctcatcaggaaccagaacagggcgaagaagatgatgaacggcaggatcgaggtgacgaggtagctcagcatgctggtctgctcgatattcgaggtccaacccttttcgagatcaccgttctccacggccttggccacctgtgcgccctgcgcgaaggtgtagtagaactgcacgttcttgccgtagttggtcaccttgccggtgtcggcgtttttcttggtgtagtcgttcttcagcttaaggcggacgacctgcttgttgtccgtgatctcggcgtaggtggccttgccctgattgatcagcgcgaaaccatctttggtgtcaatggtcttcgtgccaccgccggcgaacatctggaacatcagcgcgaccatgaccacgagcacggcaccccatagccaaggggactgccatatcgggcggttctcgttgttgttgcctttgccattggtcccgttattgccacggttgaacgggttggtgaacgggttgccgttgttacggttgttgttcgggttcggattattgccgttacccggcccttgcgggaagctcatgcttgcactccttggtagacggacggcttgaggaccgcgatcgaatcgaggttgcggtagcgctcgtcaaagtcgaggccgaagccgacgacgaactcgtccggaatctcatagccggcgtacttcacatcaacgtccacttctcggcgggaaggcttgctcagcaaagcgaagacctccacggaagcggcaccacgacgtttcagttctgcgaccagccacgcgagcgtgcgtcctgaatcaacaatatcctccacaatcaaaatgtgccgtccgcgaacatcggcggacaaatcctgcctgactgtgacctcaccgctcgacactgtgcccgagccatagctcgaaaggctcatgaagtcgatctgtacaggaatgctcatggcctgggtgaacgcgaccagcgtattcacggcccctttcagcaccgccacgagcagcggattcttatcgcggtaatcctcgctcgcgagagtggccatctcgtggatcttggcatcgatctgttctttgctgaccagctcgtggtcaatatcttcctcaacgtcagcgattcgcatgcgctccatcttggcacacgcgaatgacgtgtttcttgcgattggctgaataacctctgggaagtgagacgccgccttggccatgccaatcgacgaccagccggtcgatggcggcaatctgggcggcactggcgttcacaccggcctggctcagcgcgtgagcgatgacccgcaaccgaatcgcctctggctcacgtgcaatacgtttgacgccgatcatcaggccgatgccatggcccgaatcgttggtatcgtctgcagcacaggctcgtggcgtatcggtcgataccgctgccgacgatgccggccggtcaactgccgtaaccgcctcccccatcacctcgtcggatcgctgatccagatactccttgtccattctggccagctgtgcgctttcggcgaaatggcgggtgacattgaatccagcgaatcgttcgatggccggcagcaggtcgtggcgtacccgcgagcgcaacggatagtcgtccggcaactcgccgtctaccgcatcgccattggtggggtcatcccaatattccacacccaagtcttcacagaggccggtggtttcgtctcgagtaagggtcagcagcggccgcgcaaaagtcacgccactgcgtgtgaagacctgcggcatgccggccaacgcatccacgccacggctgcgcagcagtccgatcaatacggtttccgcctgatcgtccatagtgtgggccaacagcacggcaatggcacctgattcacgcgccgcggtgcacagctcgttgtaccgggcctgccgtgcggccgcttcgaggccctcaccgcgtgcctgcacggttgtgttgcgcacgatgaccgggcccagtcccaacgcacggcaacgatccgcggcctcgccggcgacctgttcggaaccctcctgcaagccgtgatccacaatcacgacaccgcaacgcacgcccatggacgtgcatacgatatggcttaccgcggccagcgccatcgaatcgcgcccgcctgaacaggccacgagcacgagtggtgcatcggaggcaacggcatggtccccatgctgcgcgaattcgggagcctgcacatcgcatagttccacggcgctcagcgttgttcggaccgcgcctacggccttgcgcaatcgtgcggaatatgccatgtactcaccacccttttctggttataggcactcgtgcgtttatggacgtttacggcctttgtagcccttgatggcccttgatgcctcttttacagccccgcgagcttggtgatgaacgagtcgatggcgctacgcgcggcggcataatcctcaggattgttgaccaccacggcaaacgacaacgctcccccattggtacgggacacattgccggccatcgacgtgaccgtgccgaggctgccggttttgacgcgcagcagaccggccacggcatcatccgtataccgatcctgcgccgtgcccaccaaccccgcgatggatagaccttccgcaccggccgcgccgctctcggtggtcagattacgttgttggacggccgccagcgtgcgtacggtgagccgggagccgggagacaggccggagcaatcggccatggtcagaccggatgtgtcgagaccgagatcgttcagagtggatttgaccgcttccgtgccgccttcaggactgtttgtcgctgatttcgccaaagcggtgagtctaccgaactcctcggccagcgtattgtccgaatgccgtaacgtgtatgccatgatttcggacagtgttgccgaactcaccgaagccaaaggcgtttcgccggatggagcggtgtttgccgtcacgtctccggtaacggccacaccgttcgattggagcagttcggcgaatttcgtggccacgtcgctggcggtgtgctgggacagttccgggtatccggccgaatcatcagggtcggccggcgcaggcgtatcggcggtgtgttggcgacctccatcaatcgccattgatgagaccggcgtgaagtagacggtgtagtcgcttaagaccgcgccgccttccgacagacctgcgggaatgcgtgagtcgccgaatagggtgtcgtcgtactcgagattgacggaagtgatgcctcgctgggcgagcgcggccacggtggccttggccaaggtgttcagaccggcacgtccgttggtatggttggcgtcggaatcgcctgcagacagcagcatgtcgccattgcctttgagggtcaacgtattggtgccgtcatcggattgggtcaggaacacttgggtatccaaggtggatgccatgttcagggtggatgaggcggcgagcgcggtcagcgttttcagtgtggatgcaggctcgcgtggagtgttcgactcatgttcggcagcgacggtgccttgggcgtcttcaatgatcaccgacgtatcgtttcccacgccttgcgtggacagcaattcgttgaccagtgcagaagcggccgtggaatcaatggccttgttcgcgttcagggcaccggcgatggtgccgcctgatttggcggtggccggattggcgaaaacaggtgcggtgacaggttttaacgtcaacaatccgggggccacgtcggtgatgtcggcggcgcagtaccccgcgaacagggcgatggtggtcagtgcggaaatgatgacggtcagtgttcggcgatgcgatcgttgggtccgccgttgcgcttcacgtcgctgacggcgtgataccgctgtagataccatcgtgctccttatgccaaggcaatcatttctgcaatgaggcgaacgagtcgagtgttgccacaatcgagagcattcgcgcatccatcagcttaccgcccagccatgtcccgagtgccagaatgccgatgccattggccagcgcgaccggaataatcgccagccacatgccgccttcggctcctgtcagcagcatgaccagcgccacgatgccagtgggcagcatgagcagcaggctgccaagcatgtagacgaacgggaagaagccttgggccatggcgcggccttgaggcgcggagaacggcttgtccattgaggcgaccgggtacatcagtacacaggaggtgacttcggccacgcccagtccgctcaaggcgatgcccatgcccgtggcgaggaagatcaggccggtagcgaggtcatcgggctgcgcccagcgtccggtcagtgcgccgaccagcacgatgccggcgagatagagcagcaccatgtagacgaccatgatgccgacgtagacgcgtacgcggccgattctgtcggtccggccacgcacgccggcgatgacttccatggtgaagccgcggccgtcatatgcgagcccgttgctttccacgacggacatgaaccagccgcaccagatcagcgactgccagacgaccgcgctgatgccgtgtgcctggaaggcgaagatgatcaggaacaggaccggcatggcgaaggtcatggcttggcgggggtctcgtttgagataggtgatcaggcgtgcggaaaccgcgccggatgccgaatcgggcatccatgcgaatgcgccgatgcctttggcggtctcggacggactgtttgcgccgatggtgagccgttcatgtctcagacaccaggtgcagacggcgaagcagacaatccatgtgacggcaaggatggcgatgcgggcgagcagcaccgcccaggctccggtaagcgcgtcgaacggtagttggaaggccgcgccgaacggcgtccatgcgacgatggtggtcgccgcgccccaggtttcggtgttgaggctgaaggccacgccggagttgaccagaatgttcggcaactgacagatgataacgaacgtcagcacgatgaagatatagaacgcgcctttgccgcgtttgctggtcaccagcgtggtggatagggcgatgagcagtttggagatgctcatcatggtgatgacggccagcactgcggcgaggagggaactgatgattacggctggtcccatatgccgataggccagtgtccagagcatcagtgaggccacgccggtaagggcggggatgccggacaggccggaaagcagcaagccgaattgcaggttgcggtcggcgatgccgtagagcgcgaatttgcgtgggttcatggtggagccttcgccaagcatcatgagctggatgaagccgatgaagatggtcatggtcgcgccgaccagcacgacgactatgttgacgatgcctccggaaccaaggatgttcagcggaaagccatccgcgttcacggtgaagggcggcagtatgccgatgaaccatgcgagcacgccggtgccgatgatggtgccggccgcgagtacggcggaaaagacataggcgacggtctgccacgccgattttcgcagggtggcgagcgtgagcgtccagcgcaggcggaccagggtgatggcgctgctgatcatcggcgggcctcatcggtgggtgtggcgggcgtggcggttgtaagcggaatgggctggaccggctggaccgaagttggtgcttgggcttgggcttgcccgccgtcgagccatgcgagatgggcggcttcgtggcggccgccgaccagttgcaggaagcggtcttcgagttcttcgccggcggcgacctcgtccaccgtgccggccgcgcacaccagaccgttgttgattacggccacatgcgtgcacatcttttcgaccaatgccatcacgtgcgaagagataatcaccgtgccgccggtcttcgcgtattcgatgaggatgtctttgaggttggcgctggacaccgggtccacggattcaaacggctcgtccaggaccagaatgcgcgggctatgaatcatcgcggaggccaggcagatcttcttggtcatgccggccgaataatcggtgaccatcgtgttggcggccccggccaagtcgaaagcattgagcaggtcctgggcgcgacgcgtggtctcatcgcggctcatgccgcgcagcatgccggagtagacgagcaattgcaaaccggtcagtcggtctaagatctggtcgggctggggcatgacgccgatcatgcgcttggccgtgttcacgtcgctccacacgtcatggcccaaaatcatggcggtgccggcgtccggtaccaatagaccggtcaccatattgagcgtggtggttttgccggcgccgttggggcctacaagtccatagaacgagccgaccggaatatcgagcgcgagtccgttgacggcgatcttccggtcgaagtgcttgaacaggccacgaatggacaccgccgcattcggattcggcggccatgcttgtggctgcggttgcgacggctgtgcaggcgcgggggcggcagccggcatcatcggcggctgaaatccgacattcctttgagtattgtctaagctcatacatccactctaccccaccagccaaccctcagcgaagcaaacccccgggttgctgttggattgccccgctgagcggctccaactagcggactcggtcaacccttatgcgcgatgggcttccactgggctttggagaagagggcctggaaggagatcggcacgtagctgagaatgtaaatcgggaagctgagcacataggcgagcagctccttgttcgtggcaccgatctggtcgcgctcgacaatgatggtcaatgcagccaatgccatcaggcccaacaccgatatgatgatgccactggaccaactggccagcgattgcagctggctcggccaactcacgaagccacacgcggcgaacagcaagcccattaccgcgcgaatcacgcccaacacggtaaacggacacagcatcaaggtgaagtcgatgcaggagaaatcacgttcgcgaaccgcgcgtttcagcaatgccgagccataataacggaatacctgcaggaatcccttgctccaacgcaaacgctgacgccaactttgcgagaaggtaaccggctgctcgtcgtagagaatcgcagtaccgcaatagccgatgcggtcgccatgcagaatcgaatccatagtgaattcaagatcttcagtgagcagatggaacttccatcccttgttccgcttcatcacctcgcgggagaacatgaatcccgtaccgcccacatggcaagaggaaccgagaatcatacgcgagttagacaggaatcgcgattcacggatgaaccacagcgcagaaccagaagacacccagttatccgccagattcaccgaattacggtagctggtcagaatcttgaatccggagcagaacgccttgttcatttcctcgaagtagtgcttgtccagcttgttatcggcatcgaacacgaagtaggcctcataatcatcggccacaccgatgtcgagcatatgccccaacagatacgtcagcgcatatcccttgccaaccagctcaagattgtggcgttccaccacatggcagcccaaagaccgcaccacgtcggcggtgttgtcggtgcagttgtcggccaccagccagatgtcgatgaggttggacgggtaggtctgatcgcgaatcgacccaataaggttgccgatcactttttcttcgttgcgcgcggagatcagcacggcataccggttggtcatcggggcgtcggggaagcgcacgggcttggcgaacagggacatcacgatgcacagtccctgatatatcatgccggcaccgccgacgatcatcagaagaatatcgagtacggaaagcagagtcatcagcgccaccctgccctaggattgctggaggcagattgatcagactgcttggtttgcttgcgttgctcgggctgctcaggctgttcggcggaccgctcaggctgctcgggctgctcagactgctgcgtatccgcggcaccacgctgcggaatcgccgccgtatccggctcatcaaagcttgcatccgcaccgactgtattatcggcgttatcggtatcatcggcatccgactccggctcagtgccgtgtaatcccttgcgagcgctggaggatagcacgttcttcggaatcgccacggtggcggaatcgtccaaatcggattctttcgtctcgtgcgacggaatcgcataaatctgttcctgcagcaaacgcagttcctcattcatcggcacgcggttggtggatcccctggccgcacgcggcatgtgctcgccgattggctgcaatacgtgctcgccgaacgcctcggacgcctcgacgatcttggacttcttctccggagtcggatcgttcatcagcggtgagtcaatcagctcatagcgcttggtgtacgcacggaagatggcctgcagcgatgcggtgaccggcagcgccaggaacgcgccgaatgcgccgaacagcgagccgaacgccagcaccgagaggaaggcgacggccgcgttgatatccatcgtgcgctgcgaaatcctcggcgagagaatcaggttctcgatctgctggtagacgatgatgaacaccagcaccgccacggcgtacgtccacccgcggttgccccaagcgaacagcaccggcagcgcaccgccgatataggtgccgaccgtggggatgaactgggataccacgccgcagaacagggccaacggcagccagtagggcacatgcaggatctccaagaagatggcggtgcaggtggcgttgatcagcgccagaatcgaacgggagaacaggaaggacgaaatctggccttgggccacggtccacaccagcaggaatcgacgctgcgtgttgggggccagccactggcagaaggagcggcgcagctttgggccggcggcggagatgtaatacgtggtcattaccacggtcatgaggttcagcaggaaggagaacaggccacccaccgtactcatggcggtgccggcgaaatcggtgacccacgaggtctggatattgttgaagatttccatgccaagattgctgatttccggcatcttgaacgtggcgtgctggtccacgaactcacgaatctgcccatacattgccggcaaaccgcggaccatggcaatcatctgctgtacaaacatattgccgaacagcgtgagcagcacacccacgaccacggccacgcccaccagactgacggcggaagccacgccacgcttccagccatgagccaccagcgccaccaccagcggttcgacggccagcgccaggaacagcgagatgatgatgtcgaacaccagataggagatgtcgccccacgagcgccagcagaacatgaatacgatgacggcgagggccacatacagcagcgcgcggccgaaccattccggtggcctgcgggaatctcccttggcggggaacaaagtaccaaagtcgatacgattctcgtcgtccgggtctgccccggcttctgcggcaccgcttctcgacgtgtcggtgctgtttatgtttcgcgcgcgttcgctcatggctccccattgtagcgaggggtttgaagctcggatacgccggcggcgtacacccgcttttctattgttgatgttatgctcaacgtttcgatcatcatcccagcgtggaacgaagccgaacgcatccgcgactgtctgctgaacgccactcgccagaccatcatgccgcatgaggtgctggtggtggacaatcgttctacggacaacacctgcgcgattgtcgaacagttcatcgccgaacatcccgagaccccggtcaaactgttgcaccagaacgatgaacaggggctgattcccacccgcaactttggcctgaacgccgcgaccggcgatgtgctgggccgttttgacgccgactgtatgatccggcctgactgggtggaggtggtctccggcatcttcaccgaagacccggccgcgatgggtgccactggtccggtgatgtattacgacatgccctcacgtcatttcgggttgaaaggcgacaattccttacgcaagcgaatctaccgtgccgatggcggccagccgctgctgttcggctcgaatatggccttgcgcgcttcggcctggcatcagatcgcgaatgaggtctgccgagataaggccgatgtgatgcacgaggatatcgatatttccctgcatctgatgggcaagaatctgaaaaccgtgtactcgccgcgcatgatcgccgcgatgagcgcgcgacggatggacacgtcgctgagttcattcctgaactacatgcgacgttttaagaatacgtttgatgcacatccgcaacatacgcgcacgcataagccggaggtgttgttcaccgccatgtatccggcgatgcatatgttctacccggtgtggcagaaagtgctgaattccgcggatatcaatcctgctgaagccgcgtggatcaacgagcagatgaaactggcggaggcgcaaggcaagcagctgtacgacgagacccccaccgacgaagtctacgacgaaaagcacgaaaagtagctggatatacgagccccctctgcttatgcaagctccctctgatgagggagctgtcgaacgaagtgagactgagggagagactgcgacgcagccgctaaaacattgaatcggccgcaggccgatacctattattcagcggctacgccgcaacttctctcccagtcagccacgctgacagctccctcatcagagggagctaatgtttaccgtcatcgactgatcacatcagcgacttgtaaatcgcgagaatgtcctcttcggtggcctgacgcgggttgccgggggtgcacacgtcgttgaaggcgtcgtgggccagcggttccagatcagcctcggtggcgccgacctcgctgatcgtggtcgggttcttcagatccacggtcagcttgtggacggcctgcacggcctcttcgcgcaccttctccaggtcgccggtgtaggcgtcctcgacgccgaacgcgtcggcgatgtcgcggtacttctcgcccgtgtagtccttgttgtattccatgaccggggccagcagaataccgttggccacaccgtgggccacgcccagacggccgcccagcgggtgagccatgccgtgcaccaggccgaggcccacgttggagtaggccataccggtgatgtaggaggcgtacgccatctgctcgccagccggaatgtcgccgtcggcggacttggctaggttcttggcaatcatgcgaatagtctgcatggacaggcagtcggacaggctccaggcacccggggtaatgtaaccctcgatggcgtgggtcagggcgtcaagtccggtggcaaccttcaggccgcgcggcatggagtcggtcagatccgggtccacgaaggcgacgatcgggatatcgtgcgggtcgacagccacgaacttacgcttgttggcggtatcggtgaccacgtagttgatggtcgtctcggaagcggtaccggcggtggtcggcacgccgaagatcgggacggacgggttcttggtatccgcgacgccttccagggacagcacgtcggcgaactccgggttggcggtgatgatgccgatgcccttgcaggtgtcttgcggggagccgccgcccaggccgatcaggaagtccgcaccggactcggcgaacttggcgacgccgtccttgatgcactcgaccggcgggttcggcttgacgttggagaacacttcgtagggcaggccggcctcatccagaaccttggtgaccttctcggcggtgccggtctccagcagtaccggatcagtgacgataaatgccttggtgaagccgtgctgcttggcgacggccggaatttccttgatcgcgccacgtccgaagtatgcagtctggttgaaaatcatgcggtataccatagggactctccttttgagctcgtgtcttaactggtggtccactcactctttgagtggtccaacggttccccagtctactccgcgcatgagcattcacctgaaaacacgctgaaagaacaacactgaaaataatggcaagaaatggcggaattccgcacttgtcgaattattgtccattgaccaaaccagttcaatcgcccgagatctcaacgataagaccattttccggagtcgcttggtgctctccgagaaactcgtctctcatccgcttacttcgcgcgtacacaatcaatatgcgagatgcctaattccattcgtgtttcatcagccgaacgcgaactggttcaccagatggtgtattcaacggtttcagtctcctgaagaggactaagatacctcgacaattggggtgatcatcataagagaatgaggcagataatggcaaatggcaaggctatgacggtcggcgagatggcgtccctgtttctcgaccccgacactcccgttcgtatcgacgcttttgacggctcgcatttcggcccggcagacgcggatttgaaggtcaaaatcgccacgccgaactgcatgtaccagctgctcgcgcacccgaatgaaatcggcatcgtgcgcgcatacattctgggcgatttcgacgtggacggcattgactacgccgacccgtatccggcgatgcgcaagctggtgtcgctggccaaatacgttcgcccgctcgctcccgcatccattgcccgcgtatccgccggcattctgagtcacggcttcaagaagccgccggtgcccgccaccgagggcccgagcaagttcgcccgcatcaagcgtggcctgatgccgcacaccgaaaaggccgattcggaaaccgtcagcttccactacgacatgtccaacgagttctacgccgacttcctcggcccctccatgacgtacacctgcgcggtattcgacaacgagcacatgagtcttgaagacgcacaggccaacaaactgcgcctgattctcgacaaactggacttgcagcccggccagcgcttactggacatcggctgtggctggggttcgatggtcatcaccgccgcccgtcgcggcatcaaggcgctcggcgtcaccctctccaaggaacaggccgcgtacgccaacgaatggatcgcccgtgaagggctgcaggatctggccgaagtgcgcgtacaggactaccgcgaggtgcccgagcatgacttcgacggtatctgctcgatcggcatgatggagcacgtaggcgtcaagaactaccagagctacttcgaagagatgttccgtctcctgaagccgatgggccgactgctgaaccaccagatcaccatcagccatgacaagcctcacggcaagcccggcaccgacgaattcctcgaccgttacatcttcccggacggcgacctcggcgcgcccggcttcatcgaatcgtgcatccatgacgccggcttcaacgtggtgcatcaggagaacctgcgccagcactatgcgctcaccctgcatcactggaaccagaacctctccgagcattgggacgacgcggtcaagcaggtcggctttgaacgcgccaaggtatggggtatgtacatggccgcctgcgctctgaacttcgagctcgacggcatccagattcaccagttcctggctgtcaagccggatcgcgtgggccacccggacggcaagtggtaccctctgcgccaatggtggcaggcctgactccgtttctgtgggacggcacgcggtttttaccattgttcatctgccgtcccacagaagtgtgggatagcagatacatcaatcgtttgacgtatctgctatcccgcatgacataagccgagaaccgcagaatagagccgttctttgccctcagctctgagggcgttcttcgaacgctgtgggacggcacgtcgaaaatcggcaaaatcacgtgccgtcccacacgattcccttcgcacgcgcatttcgcaggtgctttttctgcaatactgactctatgagcaccacagccccagaaacggctggggcggacgatcgcaccgaccatgacacgcgcggataagacccacgtttctttatttaaccctaacccgatgttcgcattggtgctgttggcgtgcgtagttgcggcgaggaagacagttgttggcgaacgcgagcctttggggttataggccaaaatgtgtgtccgttttgtcttgtgttcctttgtggcagtgggcgtttctcctgttcgagttgtatgggcggggaactcgaggtcggccagaatgtgtgtccggaatggccggtcaggccttgcggcacaacggttgagtgactttcgagttggcgtggcagattgggtggatgaacacaccttgttgc

SEQ ID NO: 613 - DNA, 34286 bp, Unknown
  R14_15m  MAG No. k141_4536
catgccgccgccgatgaccagacggttggccttgtcgagcaggttctcgatgacgccgagcttgtcggagaccttggaaccgccgagcaccacggtgaacggacgctccgggttctcggtggccttggacagggccttgacttccttctcgaccagcaggcctgcggcggccggcagatcggcggcaacgtcgtagttggagccctgggcgcggtggaccacgccgaagccatcggaaacgaaggcctcgccgagggcggcgatcttcttggcgtaagcggcgcgttcgtcggcgtccttggaggtctcctccgggttgaagcgaacgttctcaagcagcacaacatcgccatcgttcatggcggcgaccttggcctgagcgtcctcgccgtaggtgtccttggccagcggcacgttggtgccgagcagctcgccgaggcgggcggcaaccggggccaggctcagctcaggaacgaccttgcccttcgggcggccaaggtgggccatgaggatgaccttggcgccttcttcgcgcagggtcttgatggtcggcagagcagccttgattcgaccgtcatcggtgatggtggtgccgtccagcggaacattgaaatcagcgcgaaccagaacgcgcttgcccttgagatctccaaggtccttgagtgtcttcatgaatatcctttccttgacgaatcgcacgtcaaagtggccaattttgccactttgcatattacaggcattccggaacaaaacaccgcattcgcctactgactgaatgcggtgtttcgttacgtcgttgtcgggttacttgccttcggctgcgcgagccttctccgttttctcggcaagctgaagcagtcggcgaattcggccggcaatcgcatccttggtgatttgcggttcggcgatcttgccaagctcctcgaggctcttgtccacgtgatcgatgcgcaactggccggcctgacggaggttgtccggaatgttatcgccgagcacttcgaaggcatgctgcactttttcgctggcttcggcggcagccttggcggaacggcgcatattggcgtcatcgaagttggccagacggttggccttgccgcgggcctcgccgtcggagcgcttgccggtccattcgcgggccgaacgggtggcgcccatgagcttgagcatgcgttcgatggcgtcgggatccttgagggtcacgcgctcggagctgcgcagcgtgcgatgcttggcctggatgccgagacgacgggccacgccacacagggccatggcggcctcttccgtggggcaagcgatttccaggaagctggccttaccgggatcggataggaagccacgggccatgaaggcgccgcgccatgctgctttgatttgggcgatggatccgttgaccacttcagacggcagtccacggacctgctgcttgcggcggtcgaccagtccggtctgcaaagccaaggccactacgttgcgggtgatgagcaccacgtaggtctcgacagggccgttcggggtctgacgggtgaggtggttgacctcggcttcatgcccgaacgtgttcctcaacgtgttcttcagccattctgcaacgtcaagcgaggtgaatacggcttggataacgtatgtattctgtaccggtcgaagaccgccgccaaaacggatcatggccgcagcttgggccttgatcgcggctggtgaatcgccttcaaaggccgccaactcgcttttgacatcgtccagaagagccaagatctacctcctacagtcccgttcttctcaatgcttcaggcgcttcgtgccgttatctgctgtcatacggtcggaagccatcggctttctgtgatacctaatctggtggacaagcgaacccgtttgatacgtattatgggctttgctttctcgcagtgtggtcaccgaacgcttgcccgatgaccgctcgacgcctgcttacgatgagtgacgcttatgctgttctctcgcggaaacggttatgttgagcccatgtgcgcgtaagcggcgagccagctcttcgctcatcgccaccgaccggtgctgaccaccggtgcagccgacggcgatggttacatagtgcttgtcttcctgggcgtatccttccaacgcaatctcgatagctttctcataagcgtcgagaaattccttggctcccttgctggaaagcacgtagtcggcgaccggcttgtcgtgcccggtaagctcgcgcaggttgggaacccagaacgggttgggcagaaaacgcacatcggccacgaaatcggcgtcgatgggcatgccgtatttgaagccgaagctgaagatgtgtaccgccacggtggtggggccggaaccgagcatcgtctcgtagagtttggtggacagctggtggatgctcagggagctggtgtcaatgacccagtcggctcgctccttgaggtcttccagcaggtgacgttcctcaaggatgccgtcgatcagtcggttgccgtgctgcagcgggtgcgggcggcgcacggattcatagcgcttgatgagcacttcgttgctggcgtcgaggaacagaatatgggttttgacgccgagatcatccagatggccgagcacggcggccagctcgtcgaaatagctggagcgcacgtcgatgacggcggcaagcttgtggacgcccgaccccgatccggaaccggaggtggtcatcatgtcgacaagcgggataagcagtttgggaggcaggttgtcgaccacataccatcccatgtcttccacgcagtcagcggcatgagagcggcctgcgccggacataccggtgatgagcagcacctcgaaggcatcaagcggggtcggctggttgtccggagtcgatgtggatgtcgcggaattcgccggcgcattcgtggcggccgcctcgccggtatcgcggattgttgtctgttgactcattacaacgcctcctcaagagctttgcgcatcgcgatctccagctggtcgtcttcggtggtggtgtcctgcagacgctggtcggcatcgctgggcgggtcgtcatcccagataccggtcatcagcaatacctgtacgagagcttggtacagcagcatttcttcgccgccgatggcgtgaccgccatgagcgcgccaggcttccatgagcttggtggggcgtggatcgtagaccacgtccagcagcagtccggagaatggctcggttccggcattggtgagggcatccgcgacgttgtcggccgcatgtccgggaatcgtgttgatgacataggtggcgttgcgggctgcctcgagcagggcctgatcgtcgcctaattcgatttcgctgtacgggttatgcacgttgacgaacttttcggccactggtttaagcccggtgtttttcccagggtggcgggcggcgacgatgatatggccgatttcgggcatcatgcagcatgcggccaacgccgaagtggcggtgttgccattgccgaggatcaacgcggcgccgcttctcgatgcggtgtggtgttcgccgagttcgcgattggcgtggtcgaaggcgagttggatgccgatgacatcggtgttgtacagcttgatgcccggcttgccgttcggccaagcgggatcatcggtagccacactccagtcgaataccgcggtattcgccaccttcagttccttggcccacagattttccggaacaccgtacggttggatggtcttcttcaacggcatggtcaggctcaggccagcccacgtcgagccaaggcctttgaggaaagcgtcgaggtcgtcttcccccacctcgtgcttgtcgtacagccaatcgtcgagtttcagcgaacgataagccgcgttgtggagcacgggcgacaatgagtgcgcgacgggtttgccgagtacagcgcaacgatgattggccatatcccctccttgatgtctgtttccatgctagccgacactttgcttcgaatatgtcaaccacagaccccgcaaccgaaaattcactctgggctgctggaccgggccggctcactgctcgtgcagcgcgttgtacagcgctttggctttggcgtggccgatgcctttgaccttctcgaagtcctcgacactggcttcgcgcatggctttgaccgagccgaagtggttgagcaaccgcttctggtagctttcgccgatgccgggaatctcgtcgagcgcgctgcgcagggcgcctttgcgccgctgttggcggtggtaggtgatggcgaagcggtgggattcgtcacgtacacgttgcagcaggtacatgccttcggactggcgtttgaggataatcggatagtcgtcgtccggcacccacacctcttccaagcgtttggccagtccgcagacggccacgtcgttcacgccacagtcctcgagcgccttggctgcggccatgacctgcggcttgccgccgtcgaccaccaccaggttcggcgtgtaggcaaagtgatgccggtttgtgttctgctggacgatgtcgggcgaggactcccgtgcatcgttctgcactccgaccggcaccgcgtgccccttgccactgatgtcggaaccgccctcaccattgtcgttaccgttcgcagcgattgtctccgccgccacggcagtgatcatcttgccggcggccgaggccgcgcgctgttccgtgtcgatgctttcgccggagtcgccggcgatgttgccgtgcctgaagcggcgggtgagcgtctcgtaaagcgcggacagatcatccaccgcgcctttgccgtccttgcctcggacggcgaagcgtcggtattcggatttcttggcgatcgcgtcttcgaacaccaccatggaggccacttggaaggcaccgcccacagtgttcgaaatgtcgtagcattcgatgcgcagcggggcttgcgcgagtcccaatgccttggccacatcgttcatggcctgggtgcgtgcgcccatgtcggagatgcggctcatcttgctgcgttgcagtgcttggctggcgttctcgttggcgcggtccataagctgcttcttgtcgcctcgcgaggccacgcggatggtcaccgcgcccccgcgcagattggtcagccagccttcgagttcctcgcggcgggccggttcgacgggcacgatgatttcgcgcggtaccggtgcgatgggtgccagcaggtccgcgcgtccggtggtctcctgacgggtgttgcgttctcgggtggcctgggcgcgtgccacagcgtccgtggccgtgatggtctgtgtggagccgatggcctcgcgattggtggagatggtcgcggccgactgggggtgattgtccccggcggcgtccgaatacacctgcaccagaaggtcggccatcaagtcggcgtcatcgatgtcctcaactcgttcgacgctccagttgcgttcgccgcgaatagagccggcgcgcacataaaaggcgtgcaccgaggcttcgagctcgtcgctggcgaagccgaacacgtccgcgtccacatcctggtcgaagacgacggcgttctgttgcaccacggtttccagcatttggatctggtcgcgcagtcgggcggctttctcgaattcgagttcggcgctggcctctttcatgtcgcgggtcaactgggcgatgtatggccgtccgagccgtccggtcatcacgccgaccagctgttcgcacagccgccggtgttcgtccgcttcgatacggttcacgcagggtgcggagcatttgccgatggaggcgaacaggcatggccgtccggtcagttgcgccttgtggaatacgttggtggtgcaggtgcgtaccgggaacgtgcgcagcaaccggtcaagactgtgccgcaattcccacactttggcataggggccgaaataccgggtatcccgccgtttgcgcgaccgcgtgacccacacgcgcggaattcgctcccccgtgctgaccgcgagatacggataggtcttgtcgtcgcggaactgcacgttgaaccgtgggtcgaattccttgatccacgtgtattccaacgtcagtgattccagttcggtggcgacaaccgtccactccagactgcgtgcggtcagcaccatggtctgcgtgcgcggatgcagcagatacagcggctggaaataattggtgagcctgttgcgcaggttcttcgccttgcccacataaatgacgcgcccttccccgtcgcgccatttgtacacaccgggtttggcgggaatatccgaggtcttgggtcggaacaggtcgcgagaatcccccagcaaaggtgccccattcgcattcaccttcgccgtcgtttccccggcgcccacagctacgctttccggcattaacgccgccgcggtcttccgccactcatccggactatgccgctcaatatcgttcgtcataatcctcctcgctattaagcaaaaccaatcatcagggattgggcgggttggtatgtgctgctggaccgtaaagacttggcctgagcggcccggagcgtgtccagcaacataccaccccaacccacccgaggtcagctgcaatggaaggctaaagcatggatttcaggaacttgccggtccatgaggattcgcattcggcaacctgttcgggcgtgccctgcgtgacgatggtgccgcctccgtcgccaccctccggaccgaggtcgatcagccagtcggcctccttgatcacatccagattatgttcgatgacgatgaccgtattgcccttgtccaccagggactgcagcaccttgagcagcttgttcacgtcttcgaagtgcaggccagtggtcggctcgtcgaggatgtacacggttttgccgtcggatcggcgctgcagctcggtggcaagcttgacgcgctgcgattcgccgccggacagggtgggtgcgggctggccgagtcggatgtagccgaggccgacgtccacgagggtcttcaggtatcgggagatgccggtgtacgccttgaagaagtcggcggcctcctcgatgggcatgttgaggatgtcggccacggtcttgccgttgtacgtgacttcaagggtctcgcggttgtatcgtttgccgtggcagacctcgcagtccacgtagacgtcgggcaggaagttcatttcgatcttcagcgtgccgtcgccgtggcaggcctcgcatcggccgcctttgacgttgaaactgaagcggccggggccgtagccgcgcacctgggcttcgggagtcttggcgaaaagggtgcggatcttgtcccacacaccggtgtaggtggcggggttggatcgcggcgtgcggccgatcgggttctggtcgacgtggatcaccttgcgcaactggtccacgccttccacgcgcctgtggcggccgggtacgatgcgtgcaccgttgagcttgtcggcgagcaccgggtagaggatcgtgttgaccagcgaggatttgccggagccggagacgccggtgaccacggtgagcacgccgagcgggaagctcacgtcgatgttcttgaggttgttctcgcgggcacccacgactttgagcacctgggtcttgtggatcttgcggcgcttggcgggcacggcgatctctcgccggtgggcgatgtagtcgccggtgatggagcgcttggcttcgatgaggtgcttggcggggccggagtagatgacttcgccgccgtgttcgccggcgccggggccgatgtcgaccacccagtcggcgcggcgtatcgtgtcctcgtcgtgttcgacgacgatcagcgtgttgccgagatcgcgcaggtggtgcagggtttcgatgaggcgttcgttgtcacgctggtgcaggccgatggacggctcgtcgagcacgtacatgacgccgaccaggccggagccgatctgcgtggcgagtcggatgcgctgcgcttctccgccggacagggtggcggccgcgcgcgagagggtcaggtagtcgaggccgacgtcgttcaggaagccgagtcgggccttgatctccttgagcacttcgccggcgatcagctgtgccgagccttcgagtttcaggccgttgatccaggcgagttcgcgtacgacgggcatgtcacatacgtcgaagatggatttgccgtccacggtgacagagagcacctcgggcttcagacgacgtccgtggcagacctggcagggcacttcgcgcatgtacgactcgtagtattcgcgcatggactgcgaatcggtttcgtcgtggcgtcgcatgagcgtgcggatcacgccttcgaaaccggtggagtattcacgcaggcgtccccagcgattgcggtaggagacgttgaccttgaagtcgtggccgtagaggatgtcgtgcttgacgtcgtccggcaggtccttccaaggggtcttcatggagaagcccatttccttggccaagccttcgaggatgtggccgtagtactgggaggtcatcttggtgccgctccacggttcgatgacgccgtcggccagtgacttgtccgggtcggagatgatgaggtccgggtcgatttccagtttgaagccgagaccggtgcaggcggggcaggcaccgtagggggcgttgaaggagaaggtgcgcggctcgacctcatcgagttcgagcgtgtgcccgttcgggcagctgcggtgttcggagaacggctggcggcgggccgggctgccttcctcctcgtccacgaagtcgatgacgatgctgccgttggcgagcttgagggcggtttccaccgaatcagtcaaacgttggcggataccgtccttgaccacgagtcggtcgaccacgacctcgatggtgtgcttcttctgcttggtgagtttgatgtcgtcggacagctgtgtcatctcgccgtcgatgagcgcgcgggcgtagccgtcggagcgcagcagctcgatcatgtccacgaactcgcccttgcggcccttgaccacgggcgagagaatctggaatcgagtgcgctccgggtagccgagcagcgtgtcgacgatctgctgcggggtctgggaggcgacgggctcgccgcattcggggcagtgcgggatgccggtgcgggcgaagaggagtcgcaggtaatcgtagatttcggtgatggtgccgacggtcgaacgcgggttgcggttggtggtcttctgatcgatggagacggccgggctcaggccctcgatgaagtcaacatcgggcttgtccatctgacccaggaactggcgggcgtaggcggacagggattcgacgtagcgtcgctggccttcggcgaacagggtgtcaaacgcgagcgaggatttgccggaaccggacaggccggtgaacacgaccatacggttgcgtggaatcgccaggtcgacattcttgaggttgtgttcgcgagcaccctgaatcgtgatcttgagatcgttcgggatgtgcgagatatcagctaccagcgaaccatcgtgttcgatcagcggcgcctttttgatttcccggctcaggaaggagtcgctggtcatcaccttttcgacgatgacctcaccgttcttgcctttgctggttttcgcgccctttgcgcttgttgcgcgccttgcgccagtccgcgttgccgccacagccacaccccaccttccatctcaccgttcccgcgcgcacggttatgcgcgcgccgaatctgtcccaaggatacccgaactcacgaccaaattcgaacgcttgttcgatggcgtgtcaggccggaaaaccgaaccatagtatgcaaaattccggaccatcagtggaccgaaacgcaagagccggcccacgcgacatcaaccgtgcgcccagccccagtcaagctctatcccgaagacctctcctcctctgatttgccccggttcacatgtcaatcgtttgacgtccgcatcggggcaaaacccgctgtcccggttcgtgattttggcctgttttcgagaaccaggacattccagtttccacgaaccacataaaacgcgaacggaaacggcggaataaagccaatctcagaatcgccatgttgtcccgattctcgcatcaaacgattgacgcccataccggggcaacacaacatgtcccggttcgcgaaaaacacccgaaatcacaaaccgggacaacggattctgccccggtacgtccgtcaaacgattgatgttcgaaccgggacaaaatcttcaatggactacacggggatgccaagcttgcgtaattcgtcaactgcatcacgcatgggaatgcgttcctgttcgatacgccgataagcgatggttttgtcagcacacagtcgttcataaagacgtcgctccgccgattgaaggccgggcgtcggcttaggctcccgcatagcaatcttcgcgctgcgttcagtacgatcggtaccaaaatcgtcgtggcccggatcgagataacggaaccgcagttcggtcggccgttttgacagacccaacgtttcgacaccgagcagtcggcaaatggccttacgacgattggtttttgactcattcagccatttgccgctgaatcctgtcagtggaatctgtgcgacggtgcgcttcgcgatattccgccgccagcgtacgaccaaccacacgcatggctattgattcgtcaggaacgacgactttggagatcaactcgacagaggtgcctatggtgcgatgcttggttatgatttcgcaaccattcttgcttgcccattgccgtatctcattgttgttgtcatgcactgcaatcgcattggtttccaaaaatgcttggtccggcaatcccaccggcacgggaaatggccatgccggttcgatgtcgtacatatgtgaacgcatatgtttcttcacgcatgtggtgatcgcagcgatgtctttcatgccggccatagttcccatcacctgctttcgaacatcgtcgagtcgaaccgaatcgtcttaataccggcgacgccgggactgctcattcggcaaccccgtcatccttcaatatatccgacgatgattcatcgtccatgtcattctgatgcagcacggcctcgcacagggaggtgaggccggtgtcggggtccttgtaggtcacgtaggccttggtggagacctcgaggatttcaccggtcttgctttccggggcggagacgatgacctggaatccgaggcgcggcagcaccgtgagggcgcgctgcgtgtaacggccgtcggccttgatgagcgcctcgtcgaggaacagcgtggtgtacgagggctcgctggtcaggccgccgccaagcaggtagatgagcgccgcgccgtatacgaacgaggtgagctcctgcaaggcgccgcccgaacggccgccggtggaggtgatgcgttcgtccggaccgtcggcatgatgcacgatggcgtagaaggacgagcggcagcgcgggtcgaggttgcgggcgccgtagcttttcacgccgttcgtgtccttgacctgcgcgagttcggcgcgcagcagcccgaccatcggcgcgcaggccgcgaaagccttgcgcgaggcgtcggaatcgttgacgtcggcggatttccaatcgttcagggtgccgatgacgcggatgagctgcgcccagaaggtgcgctcgggacggcgcacgtccgcgtgcagggacaggctgccgtgcttggggccgaactgttggcccttgagcatggcgttgatgcggtcaagctggtcgtggatgtcgctggcatccgtgtcgatggcgcgtttgatggtcaggaagctcctgagcagctgttcgaggcagcgccggtattcggcgtcggtggcggcaaccgcggccagctgggtgaggctggcgagttcgtcgagatagtaccggtagtcctccacgctggcggtcagcgaatcatcgtcggccgcgtagagcgcgatgtaggtgctcattttcgattcgacgccggtgcgcgcggcgtcggcctggccgttcagcagattgatgcgggaggccatgtccttgccgatgccggcgatggtgcgttcggggaagctctcccccggcgcctgcgttcctgccgcgcccgcgccgatgatcatgtgcgcgcgcatggccgcgtccgccaatccggcgaatcggttgtcgtaggattcggcgagcgccgccgtgacttcgtccggcagcgggccggaagcggcgtcatcgtcattgtcggcggtggcaccggcggcgtccgtcgtgccggtgtcggcatggtcgcgcagccagatgagcgccgcttcgacggcgctgccggcgcgggccgcggcctggtcggattcgatgcgctggcgttccgcacggtcgagttcggcgttcagttcgtcgcgctgtttggcgagttcggcgagtttgggatcgtttttgatggatgcgatggcgtcctgcgtgtccgtgatggtccgttgcgcgccggcgatgtcgatgcgttcccatgacgtgtaggcgagctggttggctagttcgagttcgcggtggaggttatcggactgtgttttggcggccgtgtagtcggtgtcggcttggctgagcgcgttgcgggcggcgtcgacctgcgctgcgagcgcgttgaggtaggtttcgttgacgaatccgatgacctgggcgcggtctttggtgccgtgctggccgcgtgcgccggatttgatctgaccgtcggcctgcacctgacggttggtgcggtcggtgtcgtcgatggcggtgacgcatagggcgtcgaatcgttcgtcctgggtctgcgagcgcagccagtcggcgaagggcgagtcgtcgcggtagcgcagtttgccggacagccagtcgccgtcctgttctccggtgagtatgttcgcgtgcgcgccggtgtcgtcgtagtggcgtgcggtgtccacgaactgccaggtgcgtcggggcatggtgcgcgggtcgatggtgctgacttttgcggcgaagccctgttcgtggcgcttgtcgacgaggatggtctgggcgatgggcgcgtaggcgacgttcatggcgagacgccagtcttcctcgtgttcgttcacgtccatgagttcggccacgtacggcagttcggcgggggcgagtccggtggcgcggcagagcatggcgcgggtttcgtccatctgctgggagatgcgggtgcgctgggagcgttgccggtcgaagtcgcgttgcagtcgttcgaggtcgccgcgtgcgccggcccgtgcgttgatggcggcggtgagggcttcctcgcattcgccgtctcgtttgttgtattcgcgtttgaagttcacggcgttgatgcggcgttcgttccaggactgttcgttgctgggcagcgtctcgccgatggatgcgaacgtttgttcgattcgtgttcggttggcttgcatgtcttcgagggtgcggcgggcctggtcgagttcgagttcgagtcgggtcaggttgccgccgtccagaccctgcatctggcctcggatcatgtcgaggcgggtgcgcaggtcttcggttcggcggcgcagcagcttggcttccgcctcgctgttctgttgttcggcgcggtcggcgggcagttggacggcgacttcgccgcgcatgcgggccaatgcccagtcgcgcagcacggccggcaccgtgccgtcgacggccggcttgaccggttcgaaggcgcgggccttgccgcgtgcggcggcgtattcgccgtaggcctgttggatgccgcgcagcgtgtccatgcggcgggtcttctcgtccatggcgtggaagttctcgccgtaacgttcgtagtcctcgaccgtggtgcgggccaggtccagggcttcgggcacgccgagcacgccttgtttgaagatgtcgtcgagccgggagggcgcgtcggcggactggatcttgtgcagcagtcggcaggcggcctcgctcaggcccattgcgctccagatgtgtgtgtggaacgcttcggcgctggggaatgtgaggcagtcggggtaggtggctttgagctgggctggcgtgaacggggcgtcacggtattggtccatgcgcctggggtccacgggcttgccccagaccacgtactggcggcgcacgtcgccgcggccgtcgccgggcatcaggtagaggaatttggcgcaggaaagcacctggccggtggtctggttgcgataggtgtccacgatggcgccccacacgggttgcggcgcgccgttctcgtcgcgaccgcgcaggtagagcggctcgtcgccggtttcggtgctgcccacgccgaccatgccgcgcaggtaggtgtagtcgctgcgttcggagcggccggagttcgaggccttgttgaacggcgtgccggtcgggtacagcagggagatctgcgcgtcgaccagcgtggatttgccggattcgctggcgccggcgagcagggtcaccggcagcttgtggtccgtggaggggcggaattcgtggtagccctcataggagccccagttgatgagtcggcgggattccagcatccaccggtccgcgatcatctgcacatctgtcgcctgcatcattcggctcccttctcgtcgtcatcgtcatcttccgtgtcgccgtcgccgtgttccgcgacgtcgagccaggtgtcggccagttcgcggtcgagcaccacgggcacgagcggcgtgatctggtacatggcttcgtcgtccaggcgcgccaaatacccgtaggtgatcatcgcggagacgatggcgccgatctgctttgccacgccttcctcgtcattgcgggctgccaggtaaccggcgccggtggcgagcgcggcgcggatctcctcaaagctgacgagccagtcggcggggtcggcgtgcacgttctcgtattcgaggacgcggatgcgcaggaaggcgagcagcgcggcctcctcgcgtttgaggctgacacgggttttgagcgagcgcagggtcacgtcgtcgccggccacgggcgtggcgtacatgatgcggtagcgttcgttgatcaccaagtcgagcaggtcgttgttcagggagcgtacgacggcgtcgcggttgtcgagcacggtgtcgtaggtgggcccgctgatatagcggtcgcgtttgagggcgatggcggccatgcgtgcctcggccggcatgtcgccggtgtcgccttcgaacagggcgtacgggttggcgttgtccatgtgctcctcgtgttcctcggccacggtcatccttcctccacaatgatgttcagctcgtccatgtcggccagcaccggtctagtgatccagtgccggggctcgccgtcgatcgatacgcaatgccaagtcgcggtatcgccgcgctgcgccggggccggctcggtggcgatgtcgctgtcgatgccgacgccgtcagtggacggctcgtcggcgatggcgctgccgcttacggctcccagcccgcccaggaagccgacgatctcgctttcgcggcgttcgctttcgggcagccggttgaagctggcggcgatgtccacgagggttgcgttggacctgtcatcggacctgtcaacggtcaccgggttgcgccggatgaggctgaccatgcgcaggagtcgggggccgccgctgttgaccatatcccgcagatcggccaccggagtcgcctgcggggcttcggcggcgaggtcgctcaggccgggtgcggtggcgcgggtcatggatttggccgggcgcatcggcaatggcgcgaacagcgcgtccgcggtggccgtgtcgtacgggcgcgaggcgtctcccatatgggttttcgcatccgcgttgaggcgcgcgtacagtcggttcaagcgggtgagcatcgtacggtagcgagtgtcggtttgctggcgcacgagccggctgatcgcctcgtcggagacgcgcatctggcggcgcacggcttcgatgccgtcgtagatgcgggccagttcgtcgcggatctggccgagcagcacgccggattcgccggccagatacggggttttggcgatggcgcgcagggcttcgtcgatttgctggcggccctcgtcggtgatgatcacctggaaggcgtcctcgaagcggcggccgctgtccgattcgctgaacgagcggcggtattcgtcgtggtagcgggtcaggttctcgtccacgctgatgtcgccggtctgcatgcgccggcgcaaggcgtcgccattgtcccgctcgtcgagcacgagttcgcgcaggtcgatgggcacgccgcgcagcgtgttgtggatcacggcgatcacgtcctccacttgggcttcgctcagcgtggcgtgctgcttgccctgttggatgcgtttgatctcgtgcttgcgttccttgatttcacggttgagaagtttgatgcgctcgccggggtcggcggtcagctgcatgcgcgcgtgttcgatttccatgatgatgctgttggcctgcgcgccggacagggcgcgtgattcgtcttcgagcctgctcagcgcctcgatggcgcggtgggcgcgggccgtcaaacggtagaggaatcggtgtgtggccgcatcatgcgagttggcgagccaggcgtagtcgccttcgccttcacgggtcaggtcggcgaggatctgatgggcggcctcggcgaaggtctggtcctcgcgcggcgcatattcgccggcgtcggccagagcgttcagactttgcgcgaaccgctcctccacggtctcgcgcggcagctcgccggtgagcgggtcgaacgtggaacgcagcagcgacacgtacagcatcgcgttctggcgcaacagcaaccgcaggacgcccgtctcatacaccggtcgcagccgttccagctcccgcatcacatcggccacagcatgcctccctctgtcgtgaccgcaccatactagccgatagccgcgaaccacaccccgcccgcgccacgcgtgctctctcccgcccagcaccaatatgtcacttttactgcacatgtcatcatgtgcagtaaaagtgacattgaggctgcgcactcatggtgatcgttcactccagccgtcgcccctattcgccgcgcagggcctcggtcggggtgagacgggcggcgcgggaggccgggtagaggccggcgaggatgccgaccaggatggcggcggcccaggcgagcggcagggaggtccagtcgagggcgatcggctggccggcactggcggcgacgccgatggcagcgccggcgccgagcgcgatgccggcgaatccgccgagtgtggacaggagggccgcttcggtgacgaattgcatgcggatgttgccgggcgtggcgccgagcgcgcgtctcaggccgatttcgccgcgacgttccatcacggtgacaatcatcatgttggcgatgctcatgccgcccacggccagcgcgatcacgccgatcatcaggccgagcgtggtcagtgaatcgttggtggtgttgcgcgctttggataggtcggcggacgcggtgacggacacgttgccgccggccgggttggcggcgtgggcgagcgtgcggcgggtgccttcggcgtcgccgggcgtggtgcgcacgtagatggcgctgatccgtccgatggtgtcggtctggtcggggtaccggccgagcgcccattgctcgccgatgatgacggcggcgttcaggttttcagcctgcggcgtggggttcaggatgccgatgacgccgtaccatgcgttgtcgatgaggatgcggtcgccgggctcgttgacgccgagccggtaggcggcgtccgagccgagcacggcgacgggcaggtgctcgttgttcgcgtcgatgccatgaccttgggcgaggcttgctccgacggcgtcgagtgcgccgggccgcatgatggcgagggccagcgcgttgccgttggttttggggcacagcccgttcttgaagatctgcaccttctctggcgcggtgtcgaagacaccgacccgttcgacctgcggctgacgggcgatggttgtgggcgcgtaatccggcagcggaaccttctgctgggcggcgtccacgccgggggcgaccaccgacagattcgcgccaagcgcgtcgagttgggcgaggagcgctgcctggttcgatgcggcgatgccggacaacgccacatatgcggccacgccaagcgcgatgcccagcgatgccagcaccgtgcgggacgcccgcccggcggccccaacccaagccgcatgcatcaaatccgcaattcgcgtgcgtattggtttactcataggagtacgttcactcatatctctcccccagtcagcctttggctgacagcccctcgtcagagggggcttgattcggcttgtcgagttcggcgactaggccgtcttggatgtgcagacgcctggggaaacgtgcggcgatggtctggtcgtgggtgaccatgaccaggcttgcgccggaatcggccgccgtgagcagcaggtcgacgatggtgtggccggtttcgcagtccagcgcgccggtcggctcgtcggcgaagatgatgtccggccgtttggccagggcgcgggcgatggccacacgctgctgttcgccgcccgacaactgggccggccggtgatgcaggcggttccccaatccgacctgttccaacgcctcggcggcccgttgccgacgttcgccgcgcggcagggttgtgtattgcaggcctgtcatcacgttctccaaggcggatacggtggcgatcagatggaactgctggaacacgaagccgatgcgcgcggcccgcaggacgctacgctgccgctcacccatcgcattcacatccccgccgtcgtatcgcaatattcccgaggtcggcatgtccagcgtgcccagtaacgacagcagcgtgcttttgcccgagccggacggcccgacgatggccacgagctcgctgcgatcgatggccagtgacgtatcatgcaatatctccagcacgctcccgtccttgcctggaaacgccttcgtcacatgctccaacgtcagcaatgccccatgctctgggccagcgggggcaaactcgatgtcgttcatgagaccaccaccttgtctcccgccttgaggccgtcggacttggtgatttgcacttgcgcgtcggacaccagcccgattgacaccggcacacgcaccaacttgccgccgcgtaccgcttcgaccgcatacgcgctgccggcgctggcgatcagtgcggtcaccggcacgatcagcgcctccccggtcgaggcatcggcgttcgggatgatgacttgcacggccgtcggcccgaaagccgccacctgcgactggtccgggaagtcgatgcgcgccgatggctgtgtggcttgcccgttgtcgccggtcttctgcccgccctgatcgaccgaggcgagcgtcgtttcgacggtggtgttgtccggcagcacgacctgcgccttgtctccggctttgaacatcgccgcctgcgtggcggtcaacgtggcctgcgcatgcagggtgacgcccgtatagcttgccgggctgacctgtgattggccgagtttcgcgttcaccgccgtgatgcggattggtgcggccgcggccagggccaccgtattcgggtcgaatgtgccggtgaccgcgtcgccggtcaggccgagcgagcgctgccattgccggatcgcctcgcgggtcagccagttgaaatgcggtccgacctcgccgccgtagaatccgagttcctgcaggttctgctccagttgcgtgacgtccgggccgtcggagacgccatcgccgatcgtccgccagaacgggcggtcgccatggaacagcggcacgggcgcgccgtccatctcgtacacctgttcgccggtgttgatctgtttgccggccaccggcagttgggtgattgtgccggaagcggccgcgaaatcggaggcgtcatcgtattgcagactcgcgccgagccgggtctcggcgttgagtacgcccttggtcacctcctgcgtgcgcagcgtggacacatccacctgctgcgatcggccagtctgcccggtcgcggtgacgtgcccggccaacgtccacggcctcaccgccacgcacaccgcggccagtccgatcacggcgatcgccgcgataatcatcgtcacgattctgcggtgtttcccgaatctgcgcgcttccgtccgtgtcatgattgctcctttgtccgttatcggatggccgtctcattgctggggcgcggcttcggtggacgcgctgccggaggtgaattcggagaggactttgttgtagtcatagccgaattcctcggtggtgccagcgaaggcataggagatgttcgcgccatcggtcgggcattccttgaggaatcggcgcagttcggattcgcttacggtgccgggaatcgtgattgaggtgggcgtatcggcgtccgggtccttgacccagtcgaagcccttcttacgcgcggcctgggcgtaggcgagcgccgcctgcttgtcttccccggaatactggtgttgcggccccatgtccggaatgggctgggtgaagtcggggttcttggcctcgcagtcggcgtattcccgctgtttggattcgtagggtgagccggcgagcgccttggcgtccttgaacaccacccaggtgctgtcgtcttccatcgacgtgtaggcagcgttcgggtagagttgcgggccgtcgtcggatgcgctgaggctgttgccttgggaggcgaccggcttgccgtcggtgccgatcatgcgcagtgcgaccgcgtttttggtcggggcttgtttgcccgagccggagccggacgacacgccagcagccgtacgcgcgtcgaatcctttgccggtcaggcaggcggcgaatcgcttcgccgtggcgtcggtggtggtcgtcgcatcggaccgatcgtcggtacctgagcctgttccgactgccgccagcggtgacgagcaggcgcccagcatcgaagccagcgagagtgcggacgtaagcattgcgattcgccgtaccaggcacgtatgagtagtggacattaccgtctccattccgtgagtcgattgtgacgacttccatccaatcgccctcaccgtggagcgtcggtaagcggacggattactttcgccttaccgtagaatcgggaaaatgttgggtgatgccattggttcgggaaggctcggaaggggacatgatgcggattctgatcgtcgaggacgaccgcgaactggccgccgcgttggacgacgcgctgcgctacgaggggtacgcgaccagtctggcaaccaccggcgtcgaagcgttgaagatccttgccggcacgaacgtggacatcatgctgctcgaccgtgatctgccggtattgtccggtgacgcggtgatggccaccgtcgccgcgaaccgcattcccgtggccgtaatcatgctgacggccgccgccgaggtcagcgaccgcgtgagcgggctggacctaggggccgacgattacctgaccaaaccgttcgcctatcccgaactgctggcccgtatccgcgccctgcaacggcgcagcgggaccagcaacgcgaccgcagccgtgctcacgcgcggcgacatcaccctcgattccacacgccggctcgtgttccgcgaccacgggcgcacgctcgtcaaactcacacccaaggagtacggcatattgctggagctcatgcgtgcggaaggcggatacgtgaccgcgcacgaactctacgatgcggtttgggatgagccgaccgccgccgacccgaccgacgtgatcaaaaccaccatctattcgctacggcgcaaactcgccgatcgcgaggccatcgtctcgacacgcggggaaggataccggctgcaatgaaggcgacgaacacggcgaaagcatcaggtcgtatacaggcgcttgccggcaaactgcggcccaaatcattccgcgccaaactgacgttggccatcagtctcgtgttcctcatcgccatgggatcggcgaccctcgtgcagaccattgtggtcaacagcatgttcacgtacgccacgacggtcaccgccaaaaaccctgagatgcaggtcgaaagccagcacagcggttccggcaccggcaaacgcccggattccgacccgcgaatgttttcccggggaagcggcacaggtctgaacgatatcactggaacatccagcgtcggcggcgatatgggcgacggtgactatcaggtggaatggggcaaggacgggtcgtataccatcaacaccccgtatggcgtctccgtgtggaaccaggacaacatcgccaccggattgcgcatcagcgcggccatcatcttcgtgttcttcgggatcaccagcattctgatcatctggctggtcacctcgcgcatgtcccggcaactgacctccatcagcgcgcaggcggcggcattggacccggccaaacttgatacgcgcatcgacgtgaatgggccgccatctcgccgtaggccccagttccggcgtgcgggcagacgcgggaccgaggattgggatcatagcacggacagccgcacggacggtcgagctgccggccaatcctccgaagtcacgcagctcggtgacgccatcaacggcatgctcgaccggattcaggccgcatccgaagcggagcggcggttcgtgtccaatgcctcgcacgagctgcgcacgccgattgccgcggtggagaccaatctggacgcgccgttggcccaggggcggttccccgaggatgtgcgaccgtcggtacagcgcgcactggatgccaatcgacgcggcgcgcaactggtgcaggcgctgctgaccttgtcccgtattcaaagcgagaccatcggcggcaagcaggcgggcgatgtgacacagatgagtcccgcatcaacggcacgcacatccacagatttgtacggatgcgtcggcaactcccttgcggatatcgacgatgccgccaccaagcgtcgcatcaccataaccgtgaacaaggccggcggcgacgcggacatgtttctcatcgccgccgacccggcgttgctggaactggcggtcggcaacctgctgcgcaatgccgtcgtgcacaacacggatgatgggtcgatcgacgtaaccgtcgtatcggatgaggatggaagcggaccccgtctgaccgtcacgaacaccacggatgagatgctgccggacgatctgaacgagctgacccaaccgttccatcgcggcgagaactcgcgtatcagcgccgtgcccggcgtggggctcggcctgtccatcgccagtgcggcatgcgaggcgatgggagccaggctggaactcggccaaccggccgaaggcgagttccgggcgagcattcggttttgatggaacactcaggctccccttcaaagaggggagctcttattgtttcgcacgcaaaaatcacagacagactattgccttgcgggaaatcatcgttagattggcgagaggaatattgtcaatgcatacgaaacggaaaacatcgtgaccgcaccgaacacgcccgccgaaacctctgaccagctcaacaagcccgccaaatccggcaaactggaggtctccgacctcatcaccatcggcgtgtttgcggccctgtacttcgtgatggtgtgcatcgccacactggtgagcaccctgttcaccagcggcttcggctccatcttcctgcccgccggacgctcgatccgcgcgcgagactcttccttctgctggtggcgaacctcatgctgttcttccatgtagggctcgccacgcaaatcgtcatggtcgtgctgttcctgttgcccctgctggcggccgcccgatggcgaaccgcgttgaacttcggcgtgacctatgccgtactcaccgcgctgggaatgctcgaccccgatgccctgggactgccgtggctgcatgtggtctccgcgctggccgtgggcgtcacgatgatgctgccctgtttcatcaccgactcgcatggctcaacggcgtggccgaccggtacgtggtattcgacggcggacatatcgtgcaggattacgaggccgatgaattcctgtccctctcccccggctgcgtggccgccatgggattgcgggcgtttgacttggaaccgtatcggcaccggattgcggccctggcttcaagcccggccgccgaagacagcccgttccgctggctgctggccatcaaccctctgccttcgcgcaaggcgttcgccgagggcgggctgctcagccacctgcatttccagtacgccaacgatctgcacacgctcgtcgccacggatgaggccaccggtgccgaaaccttgcgcaatccgcgttggtacgcacaccatgtgcgccaacgagggaaccaccgaggaccgttgcgccatcatccgtgcgttgcaccacttgcagtagatctggcagcatacggcggtatgacggctccccgctagtgaaacagcagcgcttcagtagccgtgcgagtgcagatactcgtcatcgaagccgaaataatggccgatctcgtgcaacacggttttgcgtatctgttggcgcagctcggcctgtgtcgagcatacgcgttcatgcggtcccttgaacagggtgatggcgtcccggcatcacgccgctgtagcccgtggttcgctttgtgatgggtatgccctcatacagtccgagcagctcaccgcacggattgctcattgtggccagttcgcgctcattgggctcgtccgcaacgacgatgccgacattctccagcacccgcgcaaaccgttcaggcaaatcatccaacacctgttcaatggcccgttcaaactcatcgtcaccgatgtgcatactcaatccttcacctgttgcttggctcccacgataacagacatattccgggttccggcttcttgcgggtaccataacgttgcgcggaacgcttccaatcattcattaggtcgattcttcattcattaggtcatgaggctgcgattgtcggtgttggaatggcaccattccagtggtgactgtcagagctcaccgacctaatgaatgaagaatcgacctaatgaatgcgtccggtcatatctcattgtgaaaatgacccggtattgcggtattccgcaattgcacttccaacgattctgaagtattcatccagattctgcgtggtagcgaacgttcttcttgtggcgggaaaagtcttatagcccgcgaaggagaggttgttccttttctcgatatctccttcccatcggtttcggtcatagtggtaccgtccgtcgtattccagaatcacatgatcattcggatacaccatgtccacaaccacctctttgttctgcaacgggaggtatatcggagcattcacctccaattcgggtaatccacgttttaccgattcaaggcgaaggatgctttcctgcggcgaatcggtgttctctctgcacaacgagagcgctttgcgaaataatctgatacctgggaatctacctatatcggcgaggaacaacgatatcttgtctttcgttgtctgtttcaaatgctcattacggcaggtggcccaatccaaggcaatgaccatactttccacatcgacgaactgtgcgatctgacacagcgcctgttccactgaaaccacggcgataagatcatcaatcatcgtctggtcaatgccatgaccccaataatggcattgcgtttcggtaagattcgacaatctttcagccccgtccaccgtaacgtgcagtttgttggggtcatagttgggcttgtaattcagcgtggccgtcatgccagcaagctgtagcctggtgccatggctgaagcaaagctcctgtgaagtgcgcatcgatctggcacggcattgttccagtgttttctgggcgaggtctcgcgcctcatcaagtgtgaagaacgtgttgtatgcataggactccatgccatcccccaatggttgtatccgtgaaccgcgttattcacggatacaactcacgatggcataaccaacttctgcgcgcaaccagctcggccgaatcggtggatatgtgtataacctgccagctcagctgttgcggttgatctcgatgtcggtgacggtgaggttggcctcgttgatcaggttgaagaggatgacttcggccagcggaccgggctgcatgaaggtgtgctgcttggcttcggagacgtagtcgtggctatcacggtagaaggcggtgtcgatgccgcccggatagacggcgaccaccttgacgctggtgcccttgtatgcggcctgcagactcttggtatagcccttctcgccccacttggtggcgcagtacacgctttcgttcgcgttgccgcgcgtggcggcggtgctcatgatctgggcgattttcacgtcacgctcgccacaggccttgagggtttccaccgtccacagaatcatgcctttgagccccttgaggcatttgtcaatgtcagcggcttcataggcggtgggcaccttgaacgaaggctggccggcgttgttgatgagcaggtcgatgtggccgagcgcggcgatgctcgccacggattccttgacgaatgcttcgtcggtgatgtcgcctacgaaggcgcggtaggattcggctggccactgcgcgctcagctcggcctgacgttcggcgttgaagtcgatgccggccaccagccagcccttggcgatgagttggctggcgagctcgtagcccaaacccagcgcgctgccggtgacgatggcgatcttctggcctgttgtggttggcatggttgattcctttgcatgcttgcgagactcccctcagcgaggggagcctagggttaacccgttctttgctgacagctcccggtagggggccacggtaggactattcttcggctacgagttcgaggtacgaatcattccagaggtcttcgtcgccgtcgggcatgaggagcacgcgctcggggttgagcgcctcgacggcgccctcatcgtgggtgacgagcacgatggcgccctcatacttggcaatggccttcagaatctcctcacgggaagcggggtcgaggttgttggtgggctcgtcgagcagcagcacattggcccgcgaggtgaccagcgtggccagagccagacgggtcttctcaccgccggaaagcacgtgagccggtttcatcgcgtcgtcaccggagaacaggaacgagccgagaatcgaacgggcctgcgtgttatcgagctcgggcgccacatgctgcaggttctccaacacggtggcgttcagatccaaggtgtcgtgctcctgcgcgaagtagccgatcttgcagccgtgaccgtattccacggaaccggtgtccggctcctcgatgtgggccagcaggcgcagcgtggtggtcttgccggcaccgttgtaaccgaggatcaccacacgcgagcccttgtcgatggccaggttcacgccggcgaacacgatgttggaaccgtaggccttggagatgtccttggccatgatcggcgtgcggccgcagggcgcgggctcggggaaacggatgtccgccaccttctcggccttctgcgcctcggaggtgttttccagcagcttttcggcgcggcgcatcatgttctgcgctgccacggccttggtggccttggcgtgcagccgaatgccttgcttcatgagacggtcggccttcttctcggccacttcgcgttcgcggcggcggcgctcctcgtccaccacgcgctggtgcaggtaggccttccagccgagcgaatacatgtcgatctggccgagctgcgcgtccagatgccagaccttgttcaccacttcgtccagcagttcggtggagtgggagatgaccaggaagccgccctcgtacttcttcaagtagccgcgcagccattcgatggaatcggcatccaagtggttggtcggctcgtcgaggatcagggtgtcggcattggaaaacaggatgcgcgccagctcgatgcggcggcgctggccaccggagagcgtgccgagctgctgctccatgacctcctgcggcaggccgagcgaggcggccatggaaatcgcctcggactgggccgcgtatccgccggccttgtcgaagtcctgcatggccttgtcgtaccgggtcatggccttgctcatcacgtccggatccgggtcggtcatatccttttcggccttgcgaatgcggctgatgatggtggcgatgtcacgcgcgctcatcatgcggtcgagcgcggtctgcgtgggatcggaggcgtgcgtgtcctgcggcaggtagccgagcttgccggagacgcgcaccttgccggcggtgggcagcatgtcgccggtgatcacgcgggtcagcgttgtcttgccggcgccgttgcggcccaccagaccgatcttgtctcccttggccacatggaagttggtggggtgaagcagcgtgcgcgcgccgatctgaatttcaagtccctgcacctcaatagccatgaataacctacttgcctgttacgaatactgtctcttaccaaagtccgactgtccatcatagcgaacaccatgccgaccgggctcagccgacgctcatgcgtccatacgcttatacgcccgtagactcatgtaataacctgcaatgtgcgcgataagacagttgaatcgtgatttccgtcgtacactatccatatccgggcacgcttgcggcgcaatgcgtgtgcggtataggaaggatttcccacatggaaccaaattatctcgtgttattgggaatcgtgatcgtgattgtgggtttcgccctcaaacttgatgcgattctgatcattatcgtggcggctgtggtgactgcgctggtcggcggcattggcgtcgacggcttcctgaccacgttgggtacgtcgttcgtctcgaaccgcagcatggcgattttcatcatcgtgttgctggtcaccggtacattggagcgcaacggtctgaaaaccgcagccgcgcagctgatcggcaaagtgaagaatgcgacgcccggtatggtgatcgccctgtatggtgtgatgcgtctcgtgttcgccgcgttcaacgtgagttttggtggcgtggccgggttcgtgcgtccggtcatcatgccgatggcggtaggtgcgattgaagcgtccggtcacgagccgaacgacgagtatgtggaagagctcaagggcatggcttccggcatggagaacgtcgcatggttctttggccaggtgctgttcgtgggtacggccggtgcgctgctcgtgcagtccacgttgaagccgctgggttatgacgtcgaactgttgcgcatggccattatcgagattcctgtcgcggtgattgccgtggcggtcacagccgtctattacatcatcaaggacacacgactgcgcaagaagtactacggtgccgaagccgccgctcaggccgccaccgctaccaccaccggcaaggaggcctgatatgtcgttcttcatggaccccagcgtgaccgtcggcacgaaaatcctcgagttcttctatattttcatgggtttcatgtccgtgtatgcgggcgtacgcaacctactcgataaaaccaacaaggcccgctacggcactttcgtgttctggacggcgctcggtatcgtcatcgcgttcggccgttggattccggccattgcggacggtgtgctcattatcatcatggtcattcccgccatcttccgccaagtgcgtaagggctcggcatccgattcgagcgctcccagcaccgccgaagtgtccgcgaacttccagcgcatcggcatgcgcatctttattcccgccctgtgtctgggcgtgttcgccattatcggcgccctgattcccagcgtcagcgccctgaccggctgctgcatcggtgtgatgattgccgccgtgattctgttcgcgttctcgcatgacaacaagccggtcgtattcctcaacgattcggaacgcctgttgtctgccatgggtgcgctctgcatgctgccgatgctgctggccagtctcggcgcgattttcacagccgcaggtgtcggcgacgtgatcgccacgctggtcggcggcattattccgaagggcaacgtcacgctgggcatcatcgtattcggtgtgggcatgatgctgttcacgatgatcatgggcaatgccttcgccgcgattaccgtaatgaccgtgggcattggcgcgccattcgtgctcgcctacggtgcggacccgacggtgattggcattctggcgctgacctgtggctactgcggcacgctgtgcacgccgatggccgccaacttcaacatcgtgcccgtcgcgatgctcgatatgaaggaccgcatgggcgtgattaagaagcaggtgctgcccgcattggtgatgattgtggtgcagatcgtctatatgctgatcgcgcaataacctcgttgtccaaataccacaacaatccgtgaaataaggagctaatgatgagcaagattctggtgaccggattcgatccgttcggcggcgagccggttaaccccgcattcgaggcagtcaagctgttgccggatgaaatcgccggtgcgacagtggtgaaactggagattccgacggtgttcacgcgcagtgcgaccgtggttgaggaagccatggtgcgcgagcagcctgactatgtgctgtgcattggtcaggctggtggccgttcggctctgaccgtggagaaagtggccattaatttggccgaggcgcgtattcccgataatgatggcgagcagccgttcgatacgccgttgcgtgaggacggcgacaccgcgtatttcgccacgttgccggtcaaggccatggtcaggaacatcaatgaccacgggattcccgcattcatgtcgtatacggcaggcacgtatgtgtgcaacagcatcatgtataacgtgttgtatctgattgaccgcaaattccccggcgtcaagggcggcttcattcatgtgccgtatgcgaccgcgcagggcgtgggcaagccgaacggcacgccgaccatggaaatcgcgaccatggcgcgcggcatcgaagccgccatcgaggccgctgtgagcaccggaaccgacgccaccgacatcatgggcgaaacccactgatacgcatattgttatgcccctgctgacagcagttgtcagcaggggcatcgctatgcgttgaacgttacagttcgcgcagctgggcggcgatctggatggattcgacgctggcctcggccttgttgcgcgtctcctgccattcggtagcgggcacggagtcgagcacaatgccggcaccggcctgcacgctcgcctcatggtcgcgcaggaacgcggtgcggatggcgatggccatgtccatgttgccagagagatcgaagtagccgacggtgccgccgtagatgccgcggtcggccggttccaactcgtcgatgatttcgactgcgcgcggctttggcgcgccggaaagcgtgccggccgggaacgcggacttgaacacatcgaatgcggtcagcgaggggtcgaccttgccggtgaccgtcgagcagatgtgcatgatgtggctgaaacgcttgatgtccatgagctgcacgacttccacagactgcggcacgcacaccttgctcaggtcgttgcgggacaggtcgacgagcatgatgtgctcgctgcgttccttcggatcggcaagcaattccttggcgaatttttcgtcttcctcaggggtggcgccgcgagggcgggatccggcaatcgggaaggtcatcgcgtggccgttgtccaccttgatgagggtttccgggctggagccgatcacgttgaagtcgcggccccgagcatcggtcaacgccatgaaatacatgtacgggctcgggttcagcgtgcgcaacacacggtacacgtcgaacgggtcggcaggcgaatcgatgtcgagacgctgggagatgaccacctggaacacgtcgccgtcgacgatgtgctgcttggcgcgttcgacggcctgctcgtagtggcttttctcggtgcggaagcgcagctcaggctgggcgaccgtttcgtccaagatgttgacgcgggactcgcccggagccggggtggcggcatcgtgctgcatctggtcgagtcgagcgacggcctcgttgtaggcgacgtcggcgcgggtggatttatcatccacgttcaccgcgttggcgatgagccacaccgaaccggatacgtggtcgaccacggcgatatcggtggccagggcgagcacggtctcaggctggccggtctcgtccggagcttcggcgcgcagggtcggttcccagtggcggatggcatcccagccgaccgtgccgaccagaccgctggtcaggttcggcaggccttccacatgcggggccttcagagtcttcaacgtggcgtgagcgacttcgaccacgtcaccggtgactggcacaccaaccgggaccttgcccagccagtcggcctgaccgttgttggagcgcagctgggccatcgagttgacgccgatgaagctgtaacggctccacgtgccgccgtattccgccgattcgaggatgaaggtgccggatcggccgccggcgagacgctcgtagaagccgaccggggtgagcgagtcggcgagcagacggcgcacgatcggaatcacacggtagccggcgtcggccagttcgcggaactggccgcgactgggccaggtggcgccccacttcaggtgtttgacgctgcattcgctcatattcgctcctttacttacaactcgatgtcttgtttcgtagtacgcggtcgttcggcttcccccagtcagggaagcccgttctactgctcggccgggcggtggccttcgaccacggacagggggccgccttcgaggaagcagctgcgcttgccggtgtggcaggcggcaccgacttggtctacttcgacgagcagtgcgtctccgtcgcaatccagggacacgcccttgacgtattgcacatggccggaggtatcacccttgcgccagtattcctgacgggaccgggaccagaaggtcacgcggccggtggtcagcgtgcggcgtaatgcctcgtcgttcatgtagccgaccatcagcacctcgtgtgtgtcgtactgctggatgacggcagcgaccaggcccttggcgtcacgcttcaggcgtgcggcaatacggggatcgagttcagtggaattgtcgtatgtagtgtctgtcatacctatcttccttatgtggaccaccctcagtcagcttcgctgacagctcccggattatgtgcgacatgtgcatagcgcactgctacgaacaatccactggattgttcgtccagcgggagcaaggtgtattcgtttagcgaacggtgtagccgtgcttcttgagttccgccttgacatcggcgatggtcaggatgccgtaatggaatacggatgcggccagcaccgcgtcggcacctgcttcgatggcgggcgggaagtcctcgaccttgccggcaccgccggaggcgatgatcggaatcttgacttccttgcgcacggcgcgaatcatctcgagatcaaagccttccttggtaccgtcggcgtccatcgagttaagcagaatctcgccggcgccaagctgctcggcgcgcttgacccaccagatggcatcaatgccggtggatttgcggccgcccatcgtggtgacctcgaagccggattgcgtgtgttgctcgcccttttcgcggcgggcgtccacggagagcaccagcacctggttgccgaaacggtcggccacgcggctgataagcgacgggtcattgatggccgccgtgttgacaccgaccttgtctgcaccgcagcgcagcagcgagtcgacgtcctcgggcgtgcgtacgccgccgcccacagtcatcggaatgaacacctgttcggcggtgcgggagaccacgtcaatcatcgtgttgcggtgggagctggatgcggtcacatccaggaaggtgatctcgtcggcgccctgacgatagtattcggccgccagctccaccgggtcgcccgcatccttgaggttttcgaaatgcacacccttcaccacgcgaccggcgtcaacgtccaggcacgggatgactcgtaccgccaacgacatgcttcactcccctgttcggctttgcattacagtccttcagactacctaccgcccgttacatgcgccgcacccgtttctggaatatgagaatccgagctgacgcgcccgctgcgcgatctcaagaccgccgcgccctgccgttatatcgccgccgatatcgagaacgcgggcggccattacgtcgacgagcagctgcacgtggacgacgccaacggtttcaagctcatcacgtcccgcaagcccgctgatttggactacttcgtggacgcaatcaaggatgcgctgaagtaactaccgctccttagcggccaactgcccgcaggcaccgtcaatgtcctggccgcgggtgtcacgcag

SEQ ID NO: 614 - DNA, 22387 bp, Unknown
  R14_15m  MAG No. k141_4638
ccgatgcactggggacacgtctcctccaccgacatgctcaactggaagcgtgagccaatcatgttcgccccgacccttgaagaggagaaggacggcgtattctccggttccgcagtaatcggcgacgatggcaagctcaagttctactacaccggccaccgttgggccaacggccacgacaacaccggcggcgactggcaggtgcagatgaccgcgctgccggacaatgacgagctcaccagcgccaccaagcagggcatgatcatcgactgcccgaccgacaaggtggatcaccactaccgcgacccgaaggtctggaagaccggcgacacctggtacatgaccttcggtgtctcctctgcggacaagcgcggccagatgtggctgttctcctccaaggacatggtccgctgggaatacgagcgcgtgctcttccagcacccggatccggatgtgttcatgctcgaatgccccgacttcttccccatcaaagacaaggacggcaacgagaagtgggtcattggcttctccgccatggggtccaagcccagcggcttcatgaaccgcaacgtcaacaacgccggctacatgatcggcacgtgggagccgggcggcgaattcaagccggaaaccgagttccgcctgtgggattgcggccacaactactacgccccacagtccttcaacgtggacggccgtcagatcgtctatggctggatgagcccgttcgtgcagccgattcccatggaggatgacggctggtgtggtcagctcaccctgccgcgcgagatcacccttggcgatgacggcgacgtggtcaccgcgccggtcgccgaaatggaaggcctgcgcgaggataccctcgaccatggttcgatcacgctcgatatggatggcgagcaggtcatcgccgatgacgccgaggccgtggaaatcgaaatgaccatcgacttggctgcctccactgccgatcgtgccggcctgaagattcacgccaccgaagacggtgcctacacctacgtggcttatgacgaccagatcggccgcgtggtggtggatcgccaggccatggccaacggcgatcacggctaccgcgccgccccactgaccgacaccgaactggcctccggcaagctggacctgcgcgtgttcgtggatcgcggctccgtggaggtctacgtcaacggtggccaccaggtgctgagctcctactcctacgcctccgaaggcccgcgtgccatcaagctcgccgccgagtccggtagtctcaaggtggattccctgaagctccaccacatgaagtccatcggactggagtagctctctcacctccctcacagagggaggttttttgtgtgcccctgtcgttcgccttcgcctatactgatggacggcatataacacaatccatcacacgaccggcaggcgcgcaggctcctcaccttactgttccacgccccggccgcaagcgccaccagcaaaccggactggcgcggaaagcaaggtgacatcccatgtccatcgccaagcgcctcaagcgccgcatgcccaccgtcatcgccgtcatcgtattgctggcagtctgggaaacgtgggtggatctaggacatgtctcccccacgatgatctccgcgccaagcgagattttcgccgccaccatcgaaacgtggaacacgctcggcccggccgcggcgatcaccggctatgagggcgtggtcggcttcctgttcgccgtgttcttcggcattatgatcggcatcgcactgtactgctcgcacacgttcaacgcggcgttctatccgctgcttgccgccgcacaaaccatgccgctgatttccatcgccccgttgttcctgatttggttcggctttgagatttccggcaaaatcgtaatcgtggcggtattcggcctcttccccatcgccgtgcagaccgtgcgcggactagaagcggtgccccagttctattccgacgtcgcattgacctgcggcgcgaccccggtctggacgctctggcacgtgaagctgcgcgttgccgcacgtcagatctatggcggtatccgcgtatctgccgcatacatcttcgccacggcatccaccgctgaatatcttggcgcgcgcaagggcctcggcatctggctgcaggctgcctacaattcgttccgcacgccgctgatcttctccgccaccatcgtcattatcctgatgacatgcgtactgatgctggcggtgaacgccagcgagcgcatcctgctcggcccggccggcgatgacgaagaccccgacgcggaccagtagttctttttaccgtcaaagacacaagccggcggccagaaccgactgaacggggcggcttctcatgaggtctccagccctgtctctataatggaacagctttaccagcgtgtggcaaaccggctttcttgagctttcatagggaatgtcgggggcgctggtcgaacggaaatcaaggccctccatatcgttttctgccgacttccgttcgaagcaatcccagagaacgatagagagacaacgaattagggaaccatcattatgaagaaaagccttgtatccaaggccgctgccctcgtgggcgcccttgctatgactttcggtttcgccgcatgtggtcagaccaacaccgccgactcctccaactccaacacctccgacctcaagaaggtcactttcatgctttcctgggcgcccgataccaaccacatcggcgtgtacgtggccaagaacaagggctacttcaaggacgccggtcttgacgtggatatcgtggccgtggcccaggccggtgccgaacaggccgtgaacaacggtgtggccgacttcgccctgtccaacttgaccaatgtgggcatctacacgctgaagggcgctcacatcaagcaggtgctgcaggtgcagcagaagccgagcgccatttggtgcgcactggcgtccaacaccgccatcaagtcccctaaggatttggatggcaagaccttcgccaccttcggctccaacgagtccgacgccgtggtgcgccgcatgatccagaccgacggcggcaagggcgagttcgacaaggtgaccgtcggcacctccaccttccagaccatggaatccggcaaggccgatttcggcggcttctacgccacgtgggaaggcgtgcaggccgacatgtacggcccgaagctcaactgcttcaccgagcctgactacggcgtgcccggcaacgccgacgccatcggcatcatcaccaatgacaagaccatcaagaacaatcccgacctggtcaagaagttcactcaggccactcagaagggttacgagtacgcgtacgccaacccggatgacgccgcgcagattctcgtggacgaagcccctgacgccaacctcaagcccgaattcgtcaagaagagcatgcaggttatcgtcgacggccagtactggggcgatccggccaagatcaaggacggctctttcgtgctcggcaccaacgacttcaagggcactcaggaatacttcgacttcctggctgaagaagacgcctacactgacagtcatgacaaggtgattcatgaggccccgcaggccaaggaccttggcaccgacgaattcctcggcaagtaatttccgatattccgagtttgaatctacgcaaaaatgcgtccttcccatgaggaaaggacgcatttttgcgtatcggccgataaggttattcatagcgaatcatgctaacaaggaggcgattccatggcccaacgtcctgaccgcattattgccagcatggataccggtgttgatgatgcgttggcgttggcgtatttgttggggtcggcggatgagtgcgagctgagcggtgtgatcgccagttatggcaatgtggatgcgaacacggcttatgccaatacttgcgcggtgcttgatttgtttggccgggcggatattccggtgtttttgggctccgagcatccttcttgggctgatgcgtttattcccgatgcagggtgtgcccagtttcatgggaaggatggactggggaatacttggctggcaggggccggggctctggctgatggagctggtgtgcctggtgatgatatgtctggggatgacatgtctgaggatgtgcccgatggggttgtttctgttggcgggtatttggtaggggacgctcatgctcatccggcgtcggggtcttgttctcgtgtgggtcgctctcggcctgtggaccgtccccagtcggctacatcgacagctctcgccagctggggcaaaaggaggcgctccgttgatgctgcggatgggattgagtatctgattgagcaggttcgtgagtttggccgagacgttaccgtgctggctaccgggccgttgacggatgtggatgcggctattactcgggcaccggatattgcaccgaaactcaggctggtgatgatgggcggtacgcttacccaacccggcaattgttgggatgcggtggccgagacgaatatcatccaagaccctgaggccgcgaatcgtgtatttcattccggcgcagacatcacaatggtgggacttgatgtgactcaccagtgtttgctaccgcgatcggcggccgaccagtggcgtgcgacggggaccaagcgcgggcggttcttggctgatctcgcggacttttccatcaaggcaaatttggaagccgcccccgcactgttctctggcggcatgccgttgcatgatccgttggcggcggcggttgcacttgattcttcactggtcgattgttttgatcttgcgttgcgcgcggagaccaataccggtgatttcaatggagtacgaggccggaccaccggagacccggttgggctggtgaatcattccatgccgcatgtgcatgtggcacttggtgcggattcgggacgttttttggatgagtttacagagaggatggctgaggtgtgccggtaactcccctcagtccgctacacggacagctcgaccgcaattacggacaagctgccgctcgcattcttctggctcgactctcgtctcgccttcgcctacaaacagcccatcgggctgtttgttttacggctcagccccctcaattttgaggggcttaacaaggactatttcacacccccagcaatcaaggaccggcttcgccggactcatcattacctggtcatgtcctatcggcctcggccaggcggcgtgaacgaacagtccaccggactgttctttatttcacgccgccaaatcggcgatcgcggtggatgtaatggtcgatggagcgccatagcacgtcacggccgcagtccgggaagagttcgggcacgaagtcgagctcggcgtaggcggcctcccacggcaggaagttggaggtgcgctgttcgccggaagtacggatcaccaagtcgcaatcgggaacgtccggattgtacagatggtcggcaatcatcttttcagtcacacggtcgccggaaatcttgccatcacgcacttcgcgagcgatggcggcgcaggcgtcggcgatttcagcacggccaccatagttgatgcagaacaccacatcgatgaccttgttgttcttggtacgctcctcggcggcctcaagctcgtcgatcaccgacttccacagcttggggcgacggccggaccaacgcacgcgcacaccccactcgtccatctgttccacgcggcggtggatgatttcacgcgagaagcccatgaggaagcgcacttcctggggcgaacgcttccagttttcagtggagaacgtgtacaggctcaaataccgcacaccggcttcgatggcaccggcgatagtgtcgaacaccaccggttcggcggcctgatgaccattggtgcggaccatgccgcgctgcttggcccaacgaccattaccgtccataatcacaccgatatggcggggtaccttgttcttggggaagtcgggaatacgggcagggtcgctgaacggagctgcgggaatgtccaacgacgtgtaatcaacgttctcaaaagccatactcatgaatctatcaagcgcagcgaacgaatcgggcgttcgaggtaatactccccccaatcttcaaccaactcctgcacaacccgctccacaggcgcggcatcaagcaccgaccaatcgccacgaatcagtgcatcgaactggtttaacacgaacggcgcgatacggcgcgcatcggtagtgtggtcggcttcgcacatcacgccgccggacgcgatggacaggtacgccggctccgccttgccgcataccacgcaagtacccaatcgtggcgtccaaccggccaaggccaaggcgcgcatcacataggagtcgcctatggcttgcggggcgtgggattgtttggcgagcgcgttcaacgcgccgatgagcagccgatattggttcgtcagctgctcgtgttcggtgctggcgagtttatcgatggtctcgacgatgacgttggcggcctcatacgccgcataatccgccgcgatcggagcaccgtaagcggcgaccgcttcagcctgggagaccacgtcaagcgagcggccttcagcgataagcacatcgactcgcatgaacggctcgagcctggcaccaaagcgtgatttggtgcgacgcacgcctttggcgaccgcccgaatcttgccatgcccacgcgtcaggatggtgatgatacgatcggcttcgcccagtttggaggtgcgcaacaccacaccttcgtctcggtacagcgacatctcatctcctttccccgcgacgcccggcagactctactcaatgaagtagtcagtaaataaacaggccccagaaggcgaacaccaacagtatgtacagcatggtgaaggccaccagccagaacaggactcggcccagacgggtggaggcgagtaccgggtcggcaccggtgacgatgtctcgaacggattcacgacgagggggtatctgaatcagtccgcgggcggaagcgacctctatcagatgcataaagacgcgggaccaagcccatagcaccagcacggacaccacttggatgaccggccagctccaatacatgacgcccggcgtctcggtaggagcgctgccccatgcaagtttgaccacacccataatcacctgtccaagtccggcaaagaagatgagcaatgtggcaagagtggtgagggtcaaagtcagcagcgcgttgccgaaaccatgtgcgaaaccgagtatcacaggccgttccggtatcagcatgcccgcacgtttggcctcgcgtttctcgcgccgccatcgggcatccgccgcgattttgcggcccagcgccaccagtgccagcacgatggatgcgagcagcagcagtaccaccgtgacgtgcaggatcacaccatatatggtgccgacgcgtcttgccttcaaggcgcccggcagaccgattgattggtacagattggtgccggccaccttttcgctggtctgcgtgagtccggcggaagtgccgacggcccaatcgatgagatcgtccacataggcgtccgcaaacggggtgcccgcttcggactcatcccccaaacgcagcacatggttggcgaccggatagctgcgcacggtcacgttccagttatcggctttgtgggcgttgtagagaatcgcacgcacaccgtcgacctgcgccgtcatcacgtcttttgaaccgtaagccacataggtgggtacggcgtaagcggcgggtttgagcgtggcgaggtcggaattgttcagtccgaacaggccggtgtccgcgctgaacacgcgttggacgatggatcgatagccctcgttcgcgccgacaagagtgaagtcctgggtgacgaaaaatcccagtgattggcgtgggctgaacaccatcgggctcagaagaatctggaaggcgacgtccggatcgtcctcgagcagatatgaggagatccatgtcgattcggaggtggcatagatgccgaccttggcggcgtctacatcgctttgggctcgtaggtattcgatgacctgatcatatgccttggctgaggccggataatcgcggttgatgtcggtggtgctccagacgggtttgtcgagcactgcggtcacaaagccggccgaagccatatcggaggccacgtcgccaaaggagttgtcacaggtgccgtatccggcaccgtgcatgaacaccacgccggggcgcttgcctgatgcgttctgaggttcccgaatcaataccttgatggcttggacgccgtccgcattggccttgccccgatcaccaggctccttggtcagattgccgtcgctggtcatgttcagcgtgatgtatcgctcggtgacctcatacgtgcctttcgccggcagcgtttctccggacgggttatcgaaggtgacttcggtatcgtcggtgagcgtggccatcgactggccggtgggttcgatgttccaaggcaccgtggtcaggttggaaatggagaccagcacgccgatcaggataatgaagatgggcaggctgaccatcagccggtgggtgctggtccacggcttggatcgaacagtcaggcgatgctcttcttcttgcgacacgtgcgctattgtaatctgaccgcgatatttacgccgagggcctattcggccgaatcagtgaccgggatgctggattgggaccacgaccgggccggtggaattgacgggcacttggccgtcggcctccatttgggcggcgatatcgttcgctatggtgagcagcgtgtcgacgatctggtcttcgggcacggtcttgatgaccttgcccttgatgaagatctggcccttgccattgccggaggccacgccgaggtcggcttcgcgtgcctcgcccggaccgttgacgatgcagcccatgacggctacacggatcggcgcggtcacgtccttcaggccttcggtgacggcggatgcgagctggatcacatccacttgggcgcggccgcagctcgggcaggagatgatgtcgaacttgcgggggcgcaatcccatgtattccaggagtttgcaccccaccttgacctcttcgaccggcggcgcggaaagggacacgcgaatcgtgtcgccaatgccctcggccaagagcgcaccgaacgccaggcaggatttgatggtgccttgccaggcggggccggcctcggtaacgccgaggtgcaacggccaatcgcccttggatgcgagcagtcggtacgtttcgaccatggtgatgacgtcatggtgtttgacggagatcttgaaatcgtggaagccgacgtcctcgaacatgtgcgcttccttcaaggcggaggccaccagcgcttccggagtcgggccaccgtatttggcgtagagttccttgtccagcgagccggcgttcacgccgatacgcagcgagatgcccgcgtcggtggcggccttgcagatgtccgggccgacttcgtcgaacttacggatgttgccggggttcacgcgcacggccgcgcagccggcgtcgatggcttggaacacgtatttggactggaagtggatatcggcgatgaccggaatcggcgatttgcggcagatttccggcagtgcgtcggcatcgtcctgactcggcacggccacgcgcacgatgtcgcagccggcggcggtcagttcggcgatctgctgcaacgtggcaggtacgttggccgtgagcgtgttggtcatcgactgcacggagatgggcgctcccccgcccaccggcaccgggcccaccatgatgcggcgggacttgcggcgcggatgcaaaggcgattcgctggtcaggtcgaccggatcaccggttttgcggaacggcttttcgatgggattttccgtattcaaggtattcatcattgcttgtttatcaggttgtcggcgcgtcggcgggcttcaagctcaagctggttcatttcctccacgtccgtgaacagcgggttaccacgaagctcggcgtccatctggtccagcacggctttgaccgtgtccacgatgccgaggtacggcagccgatgatcaagaaacgcatgcacggcctgttcattggctgcattgagcaccgccgtatgcttctcggaggcggccaggcagtggcgggccagttgcacggcggggaacgcctcatcgtccaacggctcaaaggtccaagttgcggcttgcgtccagtcgcacgcggcggccacattggtcatgcggtccggcgcggacaggcccagcgcgataggcagacgcatgtctggcggcgaagcctggcaaatcgtggcaccgtccacaaattcaaccatggaatggacgatggactgcgggtgcacggtcacgtcgatgcgttcaggcgacacattgaacaagcgggacgcctcgatgacttcgaggcccttgttcatcagtgtggaggagttgatggtgacaaccggccccatgttccacgtcggatgatgcagcgcctgctcgggagtgatgttctccatgtcgacacgtttccagccgcggaatgggccgccggaggcggtgaccacaagcttggcgacttcggcgtgggttccggagcgcagggattgccagatggcggaatgctcggaatcgaccgggttgatctggttctcgcgcacttgcgcgctgaacagcagatgaccgcccgcgactacggactccttgttagccaatgccagctgggaaccggccttgagcgccgcgatcgatggttcgaggccgatcgagccggtgatgccgttcaatacgacattcgcaccggatccggccatggcgatgaccgaatccggaccgccggtcacgcggacaccttgtacgccggcctgtgcgagagccgcttgcagtgctggaaccttggtctcatcaaacaccgcgacttcgggcacatggaactgtgcggcctgttgcgccagcagctcgatatgtgctccgcccgccgccagaccggtgacggtaaatcgttcagggtgacgcgagatgacgtcaagtccttgggtgccgatggatccggtggatccgagaatgatgacggtggagttggaggctatgctcacttttccttcttcgtatcgtcattgttcagtgtggggaacgacaggtcggggatatccgaatcgaagttaccgccaagcgggaacagcagcgggaacgaatcgttggaatcgtgcttatcctgtgacggctgagctgcttccgtgtcgtgggaggcggcaacgtattcagatgattccacagccggacgggagaccgtgctgtctgcaggctgactatcggatacgcgaaccggaatggagttcgtgttacgatccggcttgctggtgggagcaaaggagaccggcatggcagcggacgcagcctcgtcggcagtgctattcacaggttgcgctgccggggcggagggcgccggggatgaaaccgaacccggtacctcattcaatttcagcgcattcggtgtatcaaggctgggcatcttgggagcgaaggacggcgcatccaccgccggaagttcctgagaaaccgcagccatgtgggcgagagcggccagagaggaaccgtcctgcaccatatccacgggctgttccgcgaacaccgacggggtcgatgacggagctgcggattcgtatgacgactgtgccggagcaaacgagggggcgctgccagcggtcacaccggaaaccggtgcggacggggcactggcgggaggctcagccgcaacagctgcggtaggagccacggaaggcgtctcggagacgggcttcgccgcagactcgttggacgtatgcaccgggtatgctgcgggagcaaaggaaaccggctgttccgcattggtgttattggtgcttgtggaagcatcgaacgatgcaggagccggcgcataggcgatcggtgccgccgcggccggcgccgcgggagcaaccggagccggagcagtgaacaagctctgctcggcctgatgcagggcatcgaatgattcgtcatgagcagcggcagacggcgcaaaacgttcgtcagttgccgggcgctgcgttccggaagcgaacaatggcgagacgccgttcgcttgaacggtcacgttcgtggcggtctgggcaggagccgtgggctcgccggacacgaaatcggccacacgtgcataggattccaagcgactcagcaactgcacgcaggcgttcaggaagtaatcgacctgtcgctcgtcatagcctttcttgcccttgcgctgggtgaagatcacattgttgaccgtattcgcattgagatcggccaaagaccgtacatcgtcttcggtcacgccgtcaacgcccaatgcggccgccgccttgtccacaatctggtcgaccagacgatccacctgcttcttatcgtacgaaggctgcttgggcgctccggacttgaagcgttcgcgctcgtcacgctccgcatggttctggacttcgtgatacagcttctcggtcttcgccttccacgtcacacgcccatgctgtgcgatctcccatgtggtctgcttatcgaccacggcacgttccagacgtccaagcgcggcgtcaacctgtgcgatcacatagccgttcttgcgcaaatcaaaggacacgttctgaatgtcatgctgggtgagattcatgccctcgctgtcatacagagcatgggcgcgctccaagaaagcgtccacctgagcggggtcatacccccacttgcgcttgcccgcacgtgcgatgcccgacttgccgtccccttcacgaagttcctgcgccatcggctattcgacctcctgctggatataaacactctgccacaactttacgtgactattgagacgcatctgaccaagaagaccgaaattcacgattttgtagcagtactgccggtttccttctgcgcgcatctcactgagatttcagaaccccttgccgaagactgtcagggaatatcgtcacagcccatgtctgtggaatgaggggattgcacgaagtgatgaaaaatgaaagtgggcaatgagggactcgaacccccgacatccaccgtgtaaaggtggcgctctaaccaactgagctaattgcccgcaaatgacaacaatagcgtatggccggcactgcgcgacacgtggtgtcgcatacgcgtgccgtagcgctcaatcgcgatgacattcagtcacgcccagcagcactacgcagcacgcgacgccagtcaacacgcttaaagtcaagcgtattgattgaggcttatcagcggcccctgccgaatgcgcgcaggcggatgccgttccagtccgagctgacggtcagcggggtggcggcgttcataccggcggtctgtgcggcggactgcacggtggaggagctggcggcacccgggcggccgggcttgggagtcagtatccacagcgggccgtcattgcccagtaccgcgtaggcgtcaacgatcgtatcggacaattcgtcctcatcatcgccgtcgcgccaccatacgatgacgccgtccacagcggagtcgtagtcctcgtccacgagatcctcgcccgtgagctcttcaatctgggcacgaatggaatcgtccacatcgtcgtcccagagccactcctggacgatatcgccgggctcgaaaccaaattcttcagcgttctgtgatgccgtttgattcacaggggacacattagcaagtcttcgcgaacaaatgcgttaacgcggccgaaaatcgccgcattgtgggcagacccatgcgagtcgtctcaccagaaacaacgactggccgcgcgtgtcatgcctcgcaatgaggcaaatcgtcggcctgccccttgccaatggccaccaacgcctgatacgcctcgtccagcgtggcgaccttgacgtcgcgcagaccatccggcacgcggccggccaaatccgaacaattcgatgcgggagccaggaaccatgtggcgccatcgcgcttggcgccaagcatcttcagctctatgccgccgattctgccgactttgccgtccttgtctatggtgccggtgccggcgatggtcttgccgccgctctcgttggcgggggtgagtttgtcgatgagaccgagcgtgtacatcatgcctgcggacggtccgccgatgctgtccacgtgcatcgtcaccttgacgtgttgcaatgtactggcgtcaatgcccagttcgtccgcatgggctttggcatacgccagaccgacggcactggccgaatcctgggaaccggccatgtcctgttcgactttcttctgatactggtccgcactctggcccaccggtaccgtggcctcacgcggcatgacctccacctgcggattggcccaaccccagacggcctgcgcgttgatgatcgggtacccgggcacgccggacgcgttcaccgtggtcagcagcagcttgccggaatccttatacgtcgtcacgccggtaccggtgatgtcgataaccgcaccatcctcgaccttgcccagcacgtcttgggtgggtccgggcatctcgatgacgtacgggctgggcagcagcagaatcaccacaccaagcaacacggcgaatgcaccgacgaaatggcgtttcggacgagcggccgcataggcccgagcacggctgattccacgagataggcgcgaatcatgcttcacttcgaacgatggcatgcgcccatcccccgcttccgaatccgcagtcgggctcttctgctcctggacgaagtctggttcctgattcctgtggcgtgcaaacataccctacagtgtaagcggagggccgaaatcagccgaaaacgaacataaaccgaaaatattgctcggccacgagcgaacaggcccgggcagaccctacacttggggtaacacaccgcggcaaagaaggatacgcatggacgacaacgcgattcacgagtggctgatcaaatgcttcggccccattcagggcgagatggcctggcagcagatcagccagttgcctgaggagatccgtgaacagctgatgagtcaggaccccagccgactgcccaatccatccgaagtccagcagatgatggccgcgttcagcgccggcggactcaacacgatgggcgatatgcagcgcactgtcgaggaagggccgatcaacgtcaagctcgccaagtcgattgccttgcagcaggccaacgcctccggttccgcgtccagcgtgtccgccgtggatggcgaggcggctcgccgcgcgatgagtgaggcgaacctgtggctggataccgcctgcgagttcaatcccgcgcccggcgatccggatgtgctgacccgcgccggctgggtggaaggcaccatcgaccagtgggcgaagttcgcagctcctgtggccgagtcgatgaacgacgctttggcttcggtgatttcggagcgtcttggcggcgcgttcggcgatggcgagattgccggcatgttcgccggaccggtgccgattccgattcccgacggcatgaaagatccagcccagctgatgaagctgctgggcaacacgtcctttgccatgcagttggggcatgcggccggcaatctgagccatgaagtgcatggcagtttcgatcagggcatcgcattgctgaagaatccggctggtggactgattgcccagaacgccaccgaatacgcgaagatgctgaacggtgagactcctgcgcccgaggccgatacggccggcacttcaaccgactcggtcaatccgttctccacatccaccgacgcttccgccaatcccattggcttcacttcggccggcaacagcgatactccggcaactgacggtaccgcccaagtctccggctccgatgcttccgccgacgccgccgcgttcgaggctgcgctctccggattcgagaccaccgagaaaattcccgaatctgaagtgctttccttcctggccctgcaggaaatggctcacgcccgcctgtatgcctcggtaccgtggctgatgccgcgtttcgaggcgctcatcggcaagtacgcacgcggcatctccatcgatctggatgcgatggaggaacagctgcgtgacgccacgtcgatggatccggagtcgatttccggcgcggtgaatctcaccaaggtcggcatccccgacactcccgaacagcgcgaggcgctggcttcgctggaatcgctgctggcgatggtcgagggctgggtggattgcgtggtgtggcgcgccggtatggcccatctgcctcatatcgaacagttgcgtgagatgatgcgccgcgagcgcgcgatgggtggccccgccgagcgtacgttcgaaagtctgctcggtttgcagctgcgccccaagcgcatgcgcgaggccgccggattgtgggagatgatcaccgccgccgaaggccctgaaggccgtgacgccaagtggtcgcatcccgatctgctgccttcgctgcctagcgacaagcccgcagatggcgcgtctccgtcatccgacgccccttcaggctcctcttccgatgccaacggttccgcctcccaccctgccgcagatggcaagaccggcgatatcgattgggatgccgaactgtccaagctgctcggcgaagatggcgaagacagtgaaaacggcaactcggaggatacgcaggcatagtcaaccgtccttcagccaattcccgttcctgaacgttcaggaacattcacattcattaccgacgcccgtcacaaaaatcgtgatgggcgtctgtgttgcgctccataaccatccttggtccgcgcatacgacaaatgcagcgaatcctcagctcgggtgatgcccacatacataagccggcgttcctcttccagcgcatcccccgtttccggcgaaccgtacggcaagagtccttccgaacagccgatcagaaacacgtgcttgaattccagacccttggatgcgtggatcgtggaaatcgtaacgccgggatcgtcgtttgcggcaagtccggtggcgtccaaacccatcgcctccaatagcgcacgtttggacgcggcatcgtcggcgagcgcggatgattgccatcccgaatccttacgaacgcggtatttcagacttgcagcgcgcaaagcggcaccgaataccggctgttgggcgttgatgcgggtgagaatcgcgcaatcggacggcttggctccgttggcgaccaaccgggcgatgcgtgccgccacgccctgcgcctcttccatatcgctctcataagcggttcgggtaacgcgcgggccggattcgcgggcggaaaccagtttcaggtaatcctcacggttcggcgcggccgcaagcacccggttggcgagattcacgacttccggcgtcgaacgatagtcggtgttgagattgacatcggcggcgagcggcccgaattcatcggcgaaacgcagcagatcccagctggaagcaccggcaaacgagtagatggtctgggccggatcgcccacgacgcatacgttgcggttcatcgcgctcttgccgtcaggtcctcccccgcccagccacagggtcagcagcctgtgttgcaggggcgagacgtcctgatactcgtcgacggtgagccagccgatggtggaacgaatttgggcggcggcttcgggaaaatcatccatgatatggcatacgagcagcagaatatcgtcaaaatcgatttcgccacgcgaggtcttttcctgctcgtaggcgctgtagacgtcggcgaaccgagcggtgtcgagtccggcgggcggttgccgatgggcgatggcacaggtccgtgcataatcttccaccgccaccaacgagattttggcccaattgatttcggcgagcacatcgcgaacggtcagcggatcggcatcggtacgtgcggtggcgcggatgatcgcgcgggagacgacgtcacgctgatcttcgatcacatgcgggaatggagcctcgcatatgtccgcccagacgctgttgagctgatgcaatgccgctgagtggaaggtcgcggccgtgactccggcagttcccgcacccgaaccggaacgtccggcaccttcccctacgccgagctggcccaaccgtgcgcgcatttccgccgccgcttttaccgaaaaggtgacggcaagcacccgctccggcttccatgccccggtggcgcaggcataggcgatccgccgcgtgaccgtgcgtgttttaccggcacctgcgccggcgatgatgcgcaccggcccttgcaacgtagtcgcggcggtacgctgccgctcatcgagcccctcaagaatcccctgcgcctgttccatgcgtccattgtggcacgattcgcgctcacggcacgactcacgcctatggctgaatcgggctcacgacaaaacatcgccagaatcatgcgttttgcgtgtcattctggggtgcgaatcgccacggatgtattagtgtggaagggtgatgaaacgtagcgattatatgttggcggcactcgcctcagccgtcctgccgaatctgggggtggccggtgtacgcgagaacgtgcaggccagcgcaaccgacgaggccaaaggcatcgatcagaccgtgatccaagatgcctcgggcaagttgtacgacgtatacgccactgacaccagggaagggcgtacacgtctgatccgccgtgtgaaagcggcgcagacactggcagccgcgcgcgagcttggtggcctcggcttcgatatggaccgtgtggtcgcattcgtcccgggagacgtttcccaacccggccagacgaccaccgcacaggccgtggggcagcaggcccaggcggagtccacaccgctgaccccgcgcaagcccggtcccacaggcgagacgaccgtgatgatcgccgtccaccgtgatggtcaggcacgtcctctcgacctgttgacattggatgactgcgcggccgtcggcacctccatcggagccattcatcgcctgccttcgacttttctggccaatgccaaatatccggtagtcaccaccggtcagattcgttcgcagctgaccgcctggattcgccgcttacgctccgccggccatgttccccaagaaatcaccgacagctgggcgcgcatcatggacaccgagggattgtggtcgttctccacctgcacggttcacggcggattctccgacggcgacttcctgttctccggttccaccatcaccacggtgaccaactggcaggatatgcaggtcaacgatccggcacgagaccttgcctggattttcggcaagctcgacgaatcccatcgcaacgccgtgctctccgcatacggccgcatgatgggctctcgacttgacgatctcatcatgctcagggccaacctgtggctgcagatggaacaggtgggcgaattcattcaggcgttgaaccgtgcggacaacaatcgcatcatgcagttcaaggcacaggtcgaacgactcgcacaccagttgggcgtgatcaagcacactccggcatcggccccagccgcagggtcggccgccgccgcgtcgacggagcccggttccccctccacaatcaccgtcggcacattgttgcaggacgaccgtcatcaggcacccgccacgcaggtacccgcacaaccgcagcagtccgaaaccggtaccgcggcggccgaggtctcggacgacacgcccgatccagatcgcaccggttccgctgacatcgtggccgctggcgacgtggatcttaccccggaagtcgaacccgatgctgaccggaccgccaatcacccgcaagcgagtgtctccggcaccgcaaccggtacgggatcgaccaaaccgcagccctcacatggcgcttcccattcttcggtgacgatcacgctgaaggagctcctcagtatgaacgggcatagcggcacgacgtcaaccgacgcttcccctgcatctcaatccgccgccccgaccgacgatgcggtgaatgacgatactccggacagtttcgttcagcacggagcctcgagtgcccaaaccacggtgattccgctgttggagcgggaagaacgcgctctgcgcgatgcccgtgccgggttggacgggtatgacagcgagggcaatccgctggccgaatcatccgcatcatccaaataatgtcgtgtgcggtgttccgcgccacgccgagcgcgtaacaccgcacatgacgacgcagacacgcggcacaatagagtacagaacctcggccggtgacggccacttaccatgatgttcgtcacaaagacggcagaacaaggagccttatatggatatcgaactgggcattcagaacgtggcacgaccggtgaacttcagcaccgacgaatcagccgataatgtgagccaggccatcgcgcaggccgtggccgacaacgcgacgatcgatatgaccgatgacaagggccgtcgcatcatcgtgcccgccaaggcactcggttacgcgatcatcggctccgaaaccaagcacgccgtcggtttcggcacgctgtgaccgtgaatcgcgcataagcggccttgggcatcatctcaaggccgctttgtattgccgcgaatcaccgatataacgggagcacgccgcgatgaacgatctcttcgacagtggcctcgtcggtgaggttctcccccagtttgttcggtttgcctttgccatgccagtcagatccgccggtgaccagtagctggtgccggcggcagatggtgagcagccgttctcgttgctccggtgaattgcctcggtgccatacctccagcccgtccaatccctcgctgatcaacgcttcgatctggtcatcggacagcagtctgcggttacggctcacatcaccggcatgggcgatcagaatcacaccgcctgcccctttgacggcggccaccacttcatgagaggtcggcgagggcgtgggaatatagtatttggatgaggcgctgaccgcattcgcaaacgcttccgaacgagtccgatatacgccggcactcaccaaagcatcagcgatgtgaggccgcccaatggtggttttgtcaccctccttgacttgggcgagcacggattgccaggtaatcggataatcacgagacaacaattcgaccatgcgctgcgtgcgttgcaaccgtgcggctcgagtatcggcgaacaagtccgtgatgtgctgattcgtgggatcatactggtagccgagcatgtgtacggagacgttctcatccgtggcggtgatttcggtgccgcggagcaacggcaaaccgaccctatgggatgcggcttcggcctccggccagccggcggtggtgtcatgatcggaaatggccacgcccttgagtcccaatgccttggattgttcggccaatgtggccggcgtttccgtgccatccgagaagacggtatggcagtggatgtcccacccgacggcgggcggctccaaaggcatcacatatccagtcatacctttcatcgtaacctcatctcagcattcccacgcaaggcgcagacaggtcgtcaccttctgccaacggccaagaccagacatccggcactcagctgacaaccgcagaggctaatctggagcgcagcgctatcgaaaggggcatgatgactcgtaacaccgcaaccgacacatcatccagcaccacgaacaccacgccgcttggcttggcggaggcgcgaccgttgattggatggcgccacagtgccacttggacatatctcatcatgctgatcgcctcggcagtggcattgggggcctcgctcattctgtccgccgagactttgcagttggctcggcatccggagtccgcgctcggctgcgatctgaactcggtggtgtcctgttcggcggtggcccagtcctggcaggcggaaatcgtgaagttcggcgggctgagctatccgaacgcgttcttcggcatcgccgccgaatcggtgttcattaccatcgcggtgatcggtttggcgcgtgtgaaggtgccgcgttggttcgcgacctgcacgtggctgggcggactggccgctttggcctactcgtactggctgagcacgcagtcactgttcgtgattcacgcgctgtgcccgtggtgcctgaccctgatgttctccaccaccatccagttcatggcgttgagccatgcgaccgtggccgtgcagggattgccgtcacgtaaggctgtggcggctgatgatggcgacggtgaggccgatgtcgcggcggtgccggccggactcaataagtattaccgcctcaacatcgacctcatggtcgatatactgtggatcgtggcgatcgtggtactcatcatcgtcaccgaaggcgcggccctgttcgctgcctgattcctttacaacaaatcgatatcggcgaccagcgtggctgctccggtcagtttcacgtcgctgtcggtgacgtccacgcgcagggtgccgccacgtacggtgatatcccagtggctgatgccggtcttggcccgcagcacaacgcctgtggcgca

SEQ ID NO: 615 - DNA, 14796 bp, Unknown
  R14_15m  MAG No. k141_5113
atccagaacgtcaaacgacgggcgagaggcttccgcgacatggactacttcgccaccatgatctacctgacctgcggcagactcgacctcaaagccgtcaccaccacttgaccatcacccaccacaaacagcgaatagcctcaatttgttatctttaccgcgcttgcgtggacagagaacgctcagacctcgaagatcgccgcatattcgcgagagaacccgcctagtcaatgagatatggattgaaaacacgctcggtgacggggatatggagcatcagcatggtgccgtaaccaagaatcaccagcaggaacagtccaccgggcatgtagaaccagctggccaccagcagcgccacgaacacggcatccacgatgaccagggccacggtcatcgcgatgtgggagatgccgaagatgaaggcgttcttcaaggtgccggccacggtgttctcgaagcgtgcctgaagcgcgaacacccattcgaagccgataagccagaggatggtcagcgcgaatttgatgatgagcagcggcgtgatctgcaggacgatccatgaccagaccagtgcaatcagcaccaccaagaacggcagccacagcagtgtggctttgatgaagttggctttgaatgacttgaagtagttggcggttacgcctttgccctcgccctcgatggagcggcggcaagcatcatggccggcggtcagggccgcaccgatggtgatgagcggaatcgaagtgaccagcatcagaatgttgatccatacgccgtcaacaagattgctccacgcgcgcatgaatttcgagtccggtgccagccagttcatcaactactccttgtgtcgcctgtggctcccctctctgaggggagctgtcatcgcagatgactgaggggagacttgatggagctcaggatactcccctcagtcggcttccgccgacggctcccctcaaagaggggagccggattggtggagctcagcccttgaccgctccgccttcggccctgcaattacggactcgcctacgacgaggctcatcattagcttcgccgctgtcgcggctcagcctggagcctgctggaagcccactgggcttccagccatgggctgacgacgcgagtcgtcagcccttgacggctcccgccatgacaccagagactatatacttctggcataccaagtagaagacgatgatggggatgatggccagcaccaggcaggccatcatggcgcccatatccacggaaccgtagccgcccttgaggtattgcacggcgaccgagatggtcttgtacttgccgaggtcgagcgtcaggtacggcagcaggtaatcgttccagatccacatggcttcgaggatggacaccgagacgatcgacggcttcatgatcggcaccacgatctggaagaagatgcgcggcactgacgcgccgtcgatcatggcggactcctcaagctcctgcgggatgcccttgatcacgccggtgaagatgaacacggccagaccggccccgaaaccgaggtacacgatgcacaggccccacggggtattgagcttcagcatgtcggcgatcttggagagggtgaacatcaccatctggaacggcacgatcatgttgaacaggaacagggtgtagagcagcttcgcagcccagttgttcacgcgcacgatccaccatgcgcacatcgaggtgcacaccagaatcagcaccaccgagccgacggtgataagcagcgtccagccgaaggaggcgaagaactgcgtggtctcgatgccgcgcacatagttctcaagtcccacgaacgccttgccggcaggcagggagaaggcgttcttggagatgtacgccttctgcttgaaggagttgatcagcaccaggacgatcgggaaaacccagaacagggagacgacggcaaacagcacggtccataatgcgccatgcttcacaggcttgttctcgttcatcaggctgccacctccttgctcgtggtgagcttgttctgaatcagggcgatgaccgcgaccaggatgaagaacagcacggccttcgcctggccgacgccttcccagcccatacggccgtagaaggtgcgggtgatgttcagcgccagaccttcagacatgttgctcggcgcaccgttggtcaatgcgaggttctgatcgtagagcttgaaaccgttggtcacggtcaggaaggagcacacggtgatggacggcatcatcagcgggatgatgatgcggaacatggtctgccgtccgttggcgccgtccacggccgcggcctccagcacatcggcgggcagggcttgcaggccggcgatgtagatgatcatcatgtagccgatctgctgccagcacaccaggatgaccaagccccagaacccgtaggacgccttataggtcagggcgcggccccagtgggctagtacgccgttcaggagcagcagccagatgtagcccaggatgatgccgccgataaggttcggcatgaagaataccgagcggaacagcgtggagcccttgatcgccttggtcagcatgtaggcgatggcgaaggcgatcacgttgatcacgatggtggtcacgatggtaaacgcggtggagaagccgagcgcgtgcaggaattccttgtctttcaacgctttgccatagttcttaagccccacccattcaccgtcggtaacggtggtgaattcgcagaagcttaagtagatgcccatgatgaagggcaccaggaacccgatgatgaatgcggcgaatgtggggagcgcgaacagcgcccaccatctgcgtatcgccttgccagccatgctgatcatgacttttcctcctccttgagtccgctgcgttgcgacactgcatcgtgcgccggctgcggagttcaactcaatgcgagcctgccgatcgagaaccgcatgcacggcctgttctcgttcaagcctatgttcatagtagacgtcgaatcattatatgtcaaacgttgtcattttcagcgtttcaatctcgagcatactccagctccagcaatcttctttcaactaagataatggctatataaagccaatatgacgccgtcatagacactttgcaaacgtttgtaatacaatcgttgtcatcgccgcaaatcaatcaatcagcatgtacactgtagtcagttgtgcatgtgtattgcgattttccattcaacgcaagggggctgcaatggctacgagcattcaggatgtcgcccgcgaggccggcgtctccatctccaccgtctcacgttccttcaccagaccggatctggtgtcggccaagacccgcgagcgcgtgctcgccatcgccgacaaactcaatttctcactctcccgctcggctgcggccctgaaatccggccgcgccctgcgcatcgcagtactgatgagcggccatatccgcctgtggttcaccgcctcggtcatcgaggggctcaacgaggtgctgcacacgcagggctacgatatttcggtattccagatttccagcatcgaggagcgcaaggaattcttcgagatgttgccggtacgccgtaacgccgatgccgtgattgtggcgtctttcgatatcgacaacaacgaaatcgcacaactggcttcggtcggcgtgccgatcgtcggcatcaattcagtcgagcccgaagcccgcggctttaccgccgccgtcaatatcgacgatgtgcagggctccacgctggccgcccgccatcttatcaatctcggacatcgccgcatcacctatatcagcaccaatcgcgaggtgtcgctgagcttctccgtgcaaagccgattcgactcattcaccgcctgctgccgcagggaaggcattgagccgcaggtcatcgtctgcaaggtcgatgacgatggacgttatgaaatcagcgacgtggtcgaccaactcatgagccaagacgagatgcccaccgccatcgcatgccaggaggatggcatcgctttgccgcttatgttccagctggagcgcaatggattctccgtgcccggcgacgtctcgctggtcggctacgacgatagtttctacaccggcgatatcggcctgaccaccatccgccaggatccggtggaaatggcccgcgtggcagcccgcatgacgctcgatctcattgacgagaagccgattgagcaaccctacatcgtgttcccggcccagctgaaggtccgctcctccacctcccgcgttaagtaggctcacacaacaaagcccaccatagaaaaagcgtgaggcaaccgcacaataacgctcaatcgcacattgtgggaaatggcgaaaaatcgccaatccatggacccacagtgtgcgattgagcgggtgcgtgcctcacacttttctgcggcggacgattttgtgcgagactcagcaatacaaagcggcgcccctggagaaggaaaggcaggggcgccgcggattgttacttatcggctatgggactctatgagactcagtgcgaggcctcgtattcggaagcccaaccgtccacgaaggcggtcttgacggcatcccacttgccggtgccctgcgcgtactcgagcagcgcctggccgaccttgttcttccattcctcggacggcatcatggtgaagttccaagaaacctgggtcttgccggactcctggtcttccacggcggcctcggtcagcgggttgtcgcttttgacgtcatcgaaggtcttgaacggggtggtgaagcccatgtcctgagagagggccttcttgccggtatcagaggtgatcacccacttgaggaagtcctcggtggccttcttgtcggcgtcggaggccttgtcattgatgcaccagtagttctcggaaccggtggtcagaccctgcttctcctcgcccttgacgccgatgtagatcggcatcatgcctacctgatcggcggtcatgccggccttctgcaggtcggtccaggcccaggtgccgttctggtagaaggcggcctcgccgagcgcgaactcggagttcgcatcatctccggtcttggcgctcagctgggtgggttcggtggtggagtcggtgatgtacaggtcgaagatcttcttgtagttcggcaggtaggtgcccttgatcttggccggctgctcggtgacgttgtcgtccttgaactcgtagtaaagcggcagattggccaggtgggtcttgaagcgccagtcggagctggagtcgaagccggcggaggtgaacgcgcccttgatgccgagctcgtccttgcgggcctgcatgtcgtcggccacggccttcagggtgtcgaagttgtcgatttcgtccatggacgtggccttggcgccatccagcgcgaagtacttgttgaggatgtccttgttgtagatcaggccgtaggtttccatcacgtacggcacgccgaccaccttgtcgccatccttcagggccacatcttggttggtgagctccttgtacacatccgtattggacatatcggcggtgtacttcttccagttctggtagccgaccgggccgttgacctggaacaaggtcggggcttcggttttggcgatttcggacttcagggtctgctcgtaggtaccggaggccgcggtctgcaccttgacctcaacgcccttttccttggtgtattccttggccagagcggtccactgatcagccgcttccggcttgaaattcaggtagtagaccttgcccttggcgtcatcgccggaggtcgagcttccgcaggccgccaaagcgccgagggacatcgcagcgacagccgccatcgcgactgctgacttgactgtacgattcatcatcgaacctttctctttcatcgtcgacccggccgtccccggtcgggacaggtacgctagcacgcacctttacgactatcgacatgcactattgtgcaacggtttgcttctttttgcaaacgatagcaatatcggcgcgtcataaatcatcattttcaggccattgtcaacaaatatcccattaattcagtcatttttgcctcattatcgcaatgcaagcgttcgcaatcatgagagcgctaacatatctttcatggcaatcgattgccacttatacccatcaaaaaacaacacgccgacgctatcgtttgcaaatcatttatcgacataccgcaattcccgccacaaacaataaaggcccgcccgcagtagcgggcaggccagcgcaatcgcagcgcaaccggggctaggcgttccaccgttcgatgacgttatctcccttatagacgctgagcaccgagtagtgcgccgtatccaaacgcagcaaccgtgcgaaatgcgggtccacgcccagccattgcgaggtgaggatgcgcaggatgtgcgcatgagccaccaacagcacattatggccgtctttcagcagcggcgtaatctcgtcgatggcgctcttggcgcgtgccgccgcttcttccagcgtctcgccaggcccggcatggaccggcacctgttcgcccgaaggcaaggtctcgacccagtcgccctccagcgtgggcgtcagcgagcgcggcccgtcacgccacacatcccattcaaaaccgctggcctcactcacctgctggcgcgtacgcccctcggctcggccgtaatcccattcagcgatgccgtccaacacaccgtggtccgcaaaaccagccaattcagcggtttggcacgcccgcttcagcggactggaaaacacacagccctggctgaatccttcggggaaagcctcgcgcaggcgccttccggcatccgctgcctgctgctcgccgaccgcggtcaacgggatgtccgtgcgcccggtatgctgcccggattcgctccacacggtctggccgtggcgcagcaacaccaaaaatccattgccgccacgagagttctcgacggcaacggtgccgttcacgttctgttcgctcatgcctccactctagtctgcgctcgttcatgactccaccattaacgcccatcttttgcgctgagatgattgagatgctattagactgagagtcatgagcgacgaaacgaacaccgacttcccctccagcgccgaccgcgcggtcgacagcctgcaccgcatcgacgagaaggtcaacaggctgcgcgaggaccggctcaacgaccctgattctctgggcgacaagctcatcaagtcggcagtcccagcgctggcaggcttggttgccggcaaagcattccagatgatatgggacaagggcacaagcaaacgcaatctgcgcaagggactggcggcagacgcgccgcaaagtctggcaatgagtctggcattcgccgccgtttcggccgcactcggcgcagtggtttcgcagctgtcggatcggggctccaaggcgttcgtcgaccaccgccatcgcaagcccagccgctaatcccccggttggatgatggtttctgttggctgactgatgactcatcgctggaatttcgtcaaggaaccatcagtcaatcgacaggaaccatcagtccagcacagttccgccacacaatatcggcatttcactgtgaggtaatccaccgtggcgtccggcgtctgccgtgcgacaataaagccatagttaccaacgcaacaatcgaagctcttctgggccgccgctccatccgtaagttcaaggacgaggccatcgacgacgatacccgcgccacgctcgaaaccgtcgcccaacatgccgcgtccagccagttccttaacgactggtccgccatccgtatcaccgacccggccaccaaagccaagctcgccgaattcggccatcagccgtatatcgccaccgcgccgttgctgtacgtgttcgtcatcgacgagcaccgcaacgcacgcatcgccgaacgcaagggcatcgatcccgcttccgacgaattccatctcaagtacagctatcgcttcacccaagctcagaacgacgcagtgctggccctgcacgccatggagaccgccgcctattcgctgggactgggctgcgtgattctcggctctctgctcaacaacatccccggccttatcgacgtgctgaatctgccggaatacacgtatccggtgctgggtctggccatcggcaagcccgatcagaacccgaccgtcaagccgcgcatgccgcgcacgatgcagttcttcgagaacacctacccggctgacgccgatggcgtactcgaccagctgcccgccttcgacgaggaagttcaccggtactacgatctgcgccaagccgaccgtccggtggacgctttcagcgatcaggtcgccacgatcagtcggcaggatgtcagccatcagacactgctcgacaaggccgccgctcagggcttccgtctggatcagtgagaccagaaccaacgagatagcctcggataggctcgtcactgagtcgtctcggtctcagcactgcgacgactcagttccaacacctcaacatttcatcaccggataccggcaaaattgcacaaccatcccgccggtgtcgcaccatcaacaaacgttcacatatcagtcccattatgcggacaaccaacggccagttttgcaagaaaacccgccaaaccagcagtatccgcaccagtggtgggaatagactgcatgtggccgcaatgactacgaaccggaaaagagggactggatgcggacggtttggcaagtctttctacgcgattgcagacgtatcttacgcaatcccgttgccgttgtggtgacgctcggcgtagcaatgctgccctcgctgtacgcatggttcaacattctcgccaactgggatccctattcagccaccggcaatctgcaagtggccgtagccaatgaagaccaaggcaccaccaacgatctggtcggccatctcgatgcgggccggcaggtcgtcaagaaactcaagcagaacgacgaactcggctggcgcttcgtagacaatgaggaacaggccgtccacggcgtggagaccggcggatactatgcagccatcgtgctgcccaaggatttcagcgccagcttggtcgaatcggtgaccggaacctccaaacagccgaaaatcaagtattacgtcaacgagaagaagaacgcgatcgcgccgaaaatcaccgacaccggcgccaccaccatcgatgagcagatcaactccgccttcgtcaccacggtagccaccaccgttgcctcggccatttccgaaaccggagacgatctcggccaagccactggcaaagtccagcacgatacgatcgatgatctcaatacggtgatgtccacgctgaacaccgttcaggattcactcaccgacttacaggacacgctggcccaatcagacacgattctcgccgacgccaaacagaccaccgcctcactcaagcagaccgtcgcggccgcgcagaatgcctcccgccagtccggcacactgttggcggaaacacaggccgggtcacaagccttctccaccacactggtcggcgcgctcgacagcagttcagcacaactctccggactggccgtccacgtcaacaacgccgccggcagcatcaccggctccttcaacagcgcgcagaactccgtcgacaccatcaccaacacactttcggccccactgaacgccacccaaacgtcaatcagcgatctgaaagacgcgctgaccaaagccggcatcggcaaagacaccaccgacccggtcggccagaacatctggaaacaaatcgatgcgctcgactcattgatcagcaaacagcagacacagctcaacaccttccataccgacaccacacagttcatcagctccggcaaagacgccaccacgaacctttccggagccatgaccaacaccaccaccggcggcatcgcggcgctgaataccgcgcgcggctcgctgaccggcaccgtaatgccgtcgctcacctcatcattgaacagtttcgccgccctgaacggcacgctggatggcacgttgacttcgttgtccggcaccttggatcaggccgacgggctgttcgaccagcttgtcgataccctgaaccaaacgaaaaccaccatcagcagcacgcaggattcgctgcgccaggcggccagcgatgtcgccaccgtacgcaccgatatcgccacgctcgatagttccgccgcttaccagaaaatccgggatacgctgcatctggatgacaagggattcggcgagttcatgggcaatcccgtcaccctgaccacgaaagtcgtgtacgccaccgacaattacgggtccgcagtcaccccgttctacacgaatctggcactgtgggtaggcggtttcgtgctgattgccatctacaagcttgaggtcgaccgcaaaggcattcgccgtatcaccgctacgcaagcatatcttggccgctggctgctgctggtcaccatcggattcctgcaagccatcatcgccaccattggcgatctggtgctcggcatccaatgcgagcatccgctgctgttcatcttggccggaatcttctgttcgttcgtctacatcaacattatttacgcgctggccgtggcgttccgccatatcggcaaagccatcgccgtaattctggtcattgtgcagatacccggtgcctccggcctgtatccgattgaaatgatgccgaacttcttccgcgaactgcacccatggctgccctttacctacggcatcaacgcgatgcgcggcccgatcgccggcctgtacgcgaaccattactggctcgacatgctgcacctgttctggtatctgccggcggcgcttttcgtgggacttgtcgtacgccggtatgcgatgaacctgaacgcgctgttcgaccatcgtttgggagataccgacctgatgatcaccgagcacaacagcatggtgaacgaacaggtgagcttgaactccgtattccgcacggtgtccgacagcaaggaactgcgcgatatcatcgctcatcgcgcgcaccggttcttcgcgcggtacccaaagatgatcgttgccggtctgacattgctgaccgtactcccgttcgtattcctggtactgctgttcgtcacccaagagaagatcgccatgctgacctcctggattctgtcgattattcttatcgacgcctatctcattgtggttgaatacgcacgcgaaacctacgccatgcagcttggcgtcagtgccatgagtgccgacgagttccgcaatgtgatgctcaacggatatgtgtggcggcgtttccacggccacggacgtcacgaagcggcgatgggcagcaatccggatatcggcgaaaccactgaacgactcacactgttcggcgatcaggccgccgagccgactgcgcacaccgcacagttcgagcagtccggtcagtctgggcagtctgggcagtctgggcaaggaggcgcacgatgaagcttatctggaaaatattcgtacgtgacgtgcgccaagccacccgcaatgtgatcgccgtaatcgtggctatgggattggtgattgtgccggcactgtacgcctggtacaacatcgccgccagctgggacccgtacggcaacaccaaggccttgaaggtcgccgtggcaaacgtggataagggctataagtccgatctgatgccgatcaccatcaacgtcggcgaaaccgtgaccaatacgctcagggccaatcatgaccttgactggcagtttgtggatcgtgctaaggccatcgatggcgtgaactcaggcgaatactatgccgcgctgattattccaaagagcttcagctccgatatgatgacgctgttttcaccgaagatcaagcacgccaagctcgaatactatctcaatgagaaaatcaatccgatcgctccgcatatcaccgaccagggtgctaccaccgtggccacgaccatcgaccagacatttgtgaagaccttggcgagcgtggcgctggatttggtttccaacgtggccgattacgcgcaaagcccgcaaatggagcagtacgtcaacaacgcctccagtcatattgccaccatgtcgtctcgtttgaccggcactgcgtcgcagatggattcctatgccaatctgctcggggccgccaacagcatcattgattccaccgataagctgctgggatcaacaggctcagctgcggccacaaccaaaaaggcgttgaaacagacccgcaacggcgtctccagcctcgacaaggcattgtccggagccaccgatggcgtcggtacggcattgcagcaggccggttcatcctacgacaccattgccaagcagatcgatgccgcttttgccgatgtgggctcacaatcctcgcagatatcaaacaagctgaccgatatgcaatccaaagtggaggctcaggccgacagctttggaaagtatgccgccgctttacgagatctcgccaaacaagcggcttcactgcccgtgggcggagataccgttgccgctcaactgaacgcggctgcagaccaagccacaaaggcgcagcagagcatgcagcaagccgccaccgcgttgggcgatgcggccacgcacatagcaaatggtactgccgatgccgatacagcgcgtcgagatctgaaatcacaaatcgccgccgccaaacaatcgattactcaggcttcagacacgtacaagagcacgctgaaaccgcaactgaacaatctgacctcgtccatggacgaagtggccacgcaggcaagttccgtaatcgacgggcttgcgtcgaccgtcagcagcgtgtcaggtctttctggcggcgtttcagacagcctgacggatatccagtcggccttgactgacgcagctagcgctttgacccgttcggcgaagaaactcgacaacttgtcttcccaactcgcctctatcaccagtggcggcaccaacgacctgtctgtgatttcctctgcgaagcccgatgccattgcttccatgctggcggcacccgtagcggtcgaccgcatcgcgctctatcccgttgccaactatggttccgcgatggctccgttctacacgattctgtctatctgggtcggtgcgatcattctggtcgccatgttgaaagtatcgatttccgaccatgagaaggcccgtatcttagggttgggcaatgatctgccgctcggttcgggagtgggtcttcgcgaggccatgattgccgggcggattgccggaccggccgccgcgttggatgtgctgaagaagccgcgtgccgagtcttccggcaatgcgcggcagttcggtttacgcttgcaccacgaatatttcggccgatacatgattttcggtttccttgctttgctgcaaggtacgctggtgtgcctgggcgatatgttctatctcggcgtgcagtgtgagcatccgattcagtttttgatggtcgggtggttgtctgcactggtgttctcgaatattgtgtatacgctggccctatcgttcggtgatatcggcaaagccattgccgtggtactgctggttatgcaggtagccggttccggcggcacattccccattgaaacactgccgacgttcttccaggtcgtttctaaatggctactgttcccctatgcggtggatgcgatgcattcggccatggcgggctcattcggcatggaatactgggtttccatgggcaaactggcactgttccttgttccctcattgctgttgggacttatgttgcgcaagccggtaattcgcttcaacgattgggttatccgcaaccttgaaagcaccaaggtgatgtgagtgttggacggagtgtgtccgagcgccctgaacgcttagcagcctacgacctggcgtgtttggaccgtaacctgcctcagatacggcgttggcgaggcctgtggagcttctgacgctaacgtctacgtggcttgtagccctttttacgactgtgtggtttgagttgctggttcagcggtacatgccggtaactggattgtggatcgcgatgtgtgaggtgccagcatccgcaatattcgcaacggtacacccatagctcggctccacgctcgatcaggctttgatcagcggcacgctgagcctgcgccttatcgtggtacatgattttattcgacgtggcgcaacgtttaggggtgaagtaatgcatagcagaagccagtgtagagcgaccccataaccaagccagtttctggctcccctctggaggggagctgtctgcgcggcggaccgggggcctgggcgtcgggctcccacggtcgcggacgcgccgcgccgttcggcctcgccgtcggggctggccgggaatggtcccgggcgtgggtctcatgggtatgcggggaggtcccggtgcccgtgcgggttcgggccggggccggtttcggatataggggaagccccggtacctttgaggggtatcggggcttcctgtaagtgtggtgcggcggcgtgctactctcccacaccctgtcgggtgcagtaccatcgccgtgccaggccttagcttccgggttcggaatgggaccgggcgtctcacctgggccatggccgccgcaaatcttctcttgtacggtcagacgctggggtctgccggccttgtggcggcctgggaaccggataggggacgcgatgccgttgatgtttcgtcttgtggccagacaatgctcattgccgtctggtgtcgtttgcaggaggaagatgcggtccaaccgccaggggttggaatgttggtgttgcctttcgtccgttagtaccggtcggctccacccctcgcggggcttccacgtccggcctatcgaccacgtgttctgcatggggactacagcagctcgaggctgcacggaatgcttatcttggagcaggcttcccgc

SEQ ID NO: 616 - DNA, 23925 bp, Unknown
  R14_15m  MAG No. k141_5229
cccgaaaagtacccgcacctgaccgtgcgcgtctccggctacgcggtgaacttcgtcaagctcaccaaggagcagcagctcgacgtcatctcccgtaccttccaccagggcgccgtcgtcgactgatgaccaaccccgcgaaccgcggcaatgactaactgaaggggtggggcacggctccaccccttccttattttccacagactttcgcatcatttggaacaggaggacaactatgcccgcaacacccacgttccgcaccacgaccaggcatatgctcaaggaatcgaagacctatgcctcgcagactttgatgggcggcctttccggctttgaatccccaatcggactcgaccgacgtgaccgcctttccgccctgaaatccggcgatatcggcttcgtccactcttgggacatcaacacctccgtggatggaccgggcacccgcatgaccgtattcatgtccggctgcccgctgcgctgccagtactgccagaacccggacacttggaagatgcgcgacggcaagcccgtctaccttgacgccatgatcaagaaggtcgatcgttacaaggacctgttcaaggccacgcatggcggtatcaccttctccggcggcgaatccatgatgcagcccgccttcgtctcgcgtgtgttccatgccgccaaggagatgggcgtgcacacctgcctcgacacgtccggcttcctcaacacgagctacaccgacgagatgctcgaggacatcgacctgtgtctgctcgacgtcaaatccggcgacgaggagacctatcacaaggtcaccggcggcaccttgcagcccaccatcgattttggccagcgactggccaaggccggcaagaagatctgggtacgatttgtgctcgtgccgggcctgaccgactccgaagagaacgtcgaaaacgtggcgaagatctgcgagtccttcggcgatgccgtcgaacacatcgacgtgctgggattccaccagcttggccgcccgaagtggcacgaactgcgcatcccatacccgctggagaaccagaagggacccaacgccgccacccgttcgcgggtggccaaccagttcaaggaccacggcttcaccgtgttttaaattgcagggccgaaccgcgcgtaaataccacgattcggctcgttcgcccataccctagagatatggccgacatctacgcatttcctatgggagcgtccaacgacggacgccccgtacgccctcagggtgtgccggatgaagtatgggcagctgtcgaatccgtcagcaccatgaagcgcatccatgacgtgcgctatcgggagattcccgtgccttccaccttggccgattatggtatcggcgtggaattcgaagcgggagagcgtgccctcggcgatgccttttccgccggtcttggcaacgatgccgaatcacgaatcgccacaggctggatcatgatgctttatgctcatgagctgcgcattgaccgggattccaactggcgttgcgtggcgttcgcgcggctgccgctggaaaccgccgaaaacgattctctgacccccggcatgtactgggatgacatgtgcgactatttcgacggcatcgagccggattcggtatccggcacagtcaccgtgacccaaaacacggcttttggttcgatggccggctccaccagcgccgggtgtgagattcgcgtctcatggaccccgcttgacgggaccggaccggacggtactatggacgccggcgcacaaatccgctcgtgggccgcattcatcagatccaccatccgttttgaggaggatgacgccagttgagtgacgtccgtgacaccgaaccccgactgctgaaagagcctcgcgggggagtgcccgatgtcacttcgtcgctggatggctatcatcgtgcctgcgatgcgctggccgaggcgacgggctcgctggccgccgacgccgaacgggcgtccggattccgctatggacatgaggattggctgattcagttcaaacgtgaaggtgcgggcatcgccttgcttgatcccgtcgccctgacacgggccggagctgactggaatgaattcaatgacgccgtgggcgatgctacatggattctgcatgattctctgatggacttgcccggattcgccgaaatcggactcaaacccaaggccttgttcgacacggaaatagcggcgcgattgctcggcctgcaccgcttcggtctggccgccgtcaccgaacactacctcggcatcacgctggccaaagagcattccgccgccgattggtcctaccgtccgctgccgcgcgactggcgcaactatgcggcgctcgacgtggaggtgctcatcgaactcgaaaccttgatgcgtcgtgacctgaaagccgcaggcaaggacgagtgggccgctgaagagttttctcacgctttggttgcgggccttgccccgcgcaaacctcatccgattccttggctgcgtatctcgcgcatcacccagctgagtcgtgatccgaggggcttggccatcgccaaatccctatgggaggagcgcgaccggctcgcccggcgatacgacatcgctcccagcctgttattgaccgattcgtcaatcatcgaggccgcgaccaacaagccgcacaatgccgcccaattccgcgcactccgatccctgaacgagcgtgtgcgcattcataccggcaccgagcaggacaaaatgttcgagcggtacgcgccgattcagcgtacggtcaagccgaaggtctggaagcaggccatcgaccgcgccatggccctgaagcccacccaatggcctaccatgcccgcccccgaacaggacgaaaacggtgtggtgaacgcgccccgatccatgcgactgtggcaacagcgccatccggagcgttatgaccgtctgcagcgggtacggcgtgtgatcaaccgcatcgccgaagacacccgcacgccggccgagatgatcatcaagccacagatcctacgcaacctgtgctgggtggaagacccggtggaagtggacgtcgagacgttcctgatcgagcagggcgcaagaaactggcaggtgaaactcattgcaccgtccgtaagtggcgttatcatgtagaggttgccttacggcagaactgtaagaaataacgacttttgaggagtcattagcgtgaagatcagcgttcgtaacctcgagcccaccaaggtgaagctcaccgtcactgttgaaccggaagagctcaacccgtatctggatgcggcccgtaaggaaatcgccaagcaggtgaacgttcccggcttccgtaagggccacgttcccggcaagatcatcgaccagcgcatcggtttcgccgccgtcgccggtgaggccgtgaacgacgcggtcccggagctgtactccaaggccctggatgagaagaagattcgtccgatggctcagccggagttcgacgtgcaggatgttccgcagtccgccaacgacgagaccaagctgaagttcaccgccaccgtcgagcgtcgtcctgacatcgaactgccggaaatcgacggtcttgagatcgccatctccaagccggaagtcaaggatgaggacgtcgacaagcgcctcgagaccctgcgtcagcgcttcggcaccttggtcggcgtggaccgcccggccgccaagggcgacttcgccaacatcgacctgactgctgagattgacggcgagaccgtcgactcccaggaaggcgtgagctacgagctcggctccaacaccatgctcgacggtctggacgaggctcttgacggcctgtccgccggcgaggagaccaccttcgaaggcacgctggaagccggcgagcacgagggccagaaggccaccgtgaaggtcaaggtcaactccgtcaaggctgaggaactgccggagctgaacgatgagttcgcttccgaagcttccgagttcgacactctggacgagctcaaggctgacatccgcaaggctgccgctcaggacgccgaaggtcgtcaggccaccgaggctcgcgatgccttcatcgccaagctgcaggaaggcctcgagatcccggtgccgaagggtgtcaaggccaacatggtcgaagagcagctcaagggcatgaccccggacccggagaaggccaccaaggagcagaaggctcaggccgaggagaccgtggagaaggatctgcgcgatcagatggtgctcgacgccctggccgagaagctggacgttcaggtgtcccagtccgacgtgttcaacttcctcgcttccatcgcccagcagtacggcatggacccgaacaacttcatccaggccatcatcaagaatggccagcttggctccgctgtgcaggaagtcggccgttccaagggtctgctcgccggcatgcgcgccgtcaagttcaccgctgatggcgaggttgtggacctctccggcttcctgggcgaggccgctgaggacgaagagtccgagtccgtcgaggccgcttccgctgctgccgccgtggccgacgaactgtccgccaaggatgacgccaaggacgctgagtgagcatagcctcatcgcgttagcgtgattgtttgagcccggaatcgtgtttcacggttccgggctcttcctattctggtaaaaggactatttctttggctcccctttggggggagctgtcgggcgtagcgagactgaggggagttcccaaggcatactcgttgcatagcgtgcggaggttgacatgcagccaacggttactatcaaacgccttggttggctcgctgcggcgaccattgtgctcggcgtgctcatcggtgtgggagcaggtctgctgaccctgttgctctacggcgttgaacatgtgctgctcggctacatcgaaggcccagaattgtctggtccattcggcgtgcccgctgcacgccgtgtgatatcggtgaccgtgggactcggcatcgcgggcattatctggtatctgctacgacacaaaacgactgtggtgccctcagtcaagaaggccgtggcgggaaagcgaatgcctttctggcaaaccattgtgcatgtggtgttgcagattttcatcgtcggctccggtgcctcgatcggccgagaagtcgccccacgcgaactcggcgccatgatcgcgcaacgtttttgcgacctgttccatatcgagggcgttgatggtatcgaccggcgcatggtggtggcagtggctgccggtgccggtctaggaggcgtctatgacgcgccgctggccggcatgttcttcaccgtcgaaatcctgttggtggatgtgacgatcgaaaaggttgcgtttggactgggcgtgtctgccattgccgcattcgtggcggttgcgatcaaagggcattgcctgttctacgacatcaccgccatgcaaccggaatccacgccaacgttaatgctgttcgctctgatttgcggtgcggcatgtggagtgggcggcgcattgttccgaaaaggttcgcaatgggcggaagcacacaagccgaccggcaaggccattctgtggcagatgccgctggctggtctcatcaccggtttggtggcgattgttgtgccgcaggtgatgggcaacggccgtgccgcagcgcaacttggattcagcacgttcattcctgaaaccgccggcactgctgttgccatgcagtcggcatcttcagcggccgcctctccatggaacttgctgacgggcggcggtaatgtatccgattcggcctctggcgggggagcgggctctggaatggcctcgttttgggccatgcttcagggtgggagcggctcttctggatccgtgatgaacgccggtttcccgctgtcccagtccaatatctggatgttgctgggtgtgttggcactcacctttgtcgccaaggcgctggtgacgctgatgaccattcgctccggtgcatcgggcggtgtgctgcagcccggcatcgcattaggttccacgctgggtgcgatgctcggcctcgtatggatactgatgtttccgactgattcggtaaccgcgtgtgccttgatcggtgcggcttcgttgctttcggcctcacagcaggcaccgcttatggccatgtgcttggtgatggagctgaccgaagcgccgattaccttcttcgtgccagtcggcatggccgtggccacgtcgtcgttgatatcaaagtggttgctgagtcgtaagtaagtagatgcatatattctggctcccctctctgaggggagctgtcgaacacagtgagactgaggggagccgaggtaaagaaagctatgtcagaaaacaccgaagtccgtgcggcacttgaatcgcttgccgctgagccgctcactgagcagattgactactatcgaaagccattcatggtgttgtgggccgccattcaggaggccgccagcgatgtggccgaagactacgacttgcctgcggatatggcccaattatgggtggccgaacagatgcgccaagtcgccgattcactggtcgatcggctcgcggaaaaagccgtggcccatggtgccagcaagtccaacgtggcgcgagccgccggtgccagccccgccaatgccgcccgtcgcttcccgcgtctgggcgacgatgccgcctcccagacccgcctcctcattgacgacgtcctcgacaccttggaataacccgaaatccctacgctacccgccaaaaagcacgcgaaaagccgccttcagtcgcttcaaggcggtagtctgaacaatgttcgagtaattagaaggagaatcaaggtgagcaatacctttgcgaccttgccggtcatggcgggcgatgacgtcccggccggccccgtcgacccgattttcaaccgtctgctcaaagaccgcatcatctggatgggtgaagaggtcaaggacgatatggccaaccgcatctgcgctcagctgctgatgctggccgccgaggacccgaagaaggacatctggctgtacatcaactcgccgggcggctccatcaccgcaggcatggccatctacgacaccatgcagctcatcgagcctgacgtggcgaccgtgggcctgggcatgtgcgcttccatgggccagttcctgctgagctccggcaccaagggcaagcgttacctgacctcgcacgcccgtgtgctcatgcaccagccttccggcggcatcggcggcaccgccactgacgtgcgcatcaacgccgagctcatcatggacatgaagaaaaccatgagcgagctgaccgctgagcagaccggccacaccctcgaggagatctatcgcgacaacgaatacgaccactggttcaccgcccaggaagccctcgactatggcttcgtggacaagctcgtgaccacgccggacaccatcggcaacaaccagcagggggagtgagactcatggcaagtgaagaagcaaagttcgccgcccgtgccgaccgcttggccggccgtcatggcgtagccggtttcatgccggccgccgcccgcgcagcccagcccgcgccgaccaaccgttacatcatgccgcagttcgtggagaagaccccgtatggcatgaagacccaggacgcctactcccgcctgttcgaggatcgcatcatcttcctcggcgtgcaggtggacgacgcctccgccgacgacgtgatggcccagctgctggtccttgaatcccaggatccgaaccgtgacgtgatgatgtacatcaactcacccggcggttcgatgacggccatgaccgccatctacgacaccatgcagtacatcaagcccgacgtgcagaccgtgtgtctcggccaggccgcctccgccgccgccattctgctggcctccggcaccaagggcaagcgcctgatgctgccgaacgcccgtgtgctcatccaccagccggccatcgaccaaggattcggcaaggccacggagatcgagattcaggccaaggaaatgctgcgtatgcgcgaatggctggaggagaccctcgccaagcacaccggccaggatgtcgagaagattcgccgcgacatcgaagtggacactttcctgaccgctcctgaagccaaggaatacggcatcgtggacgaggtgctggaacaccgccagtaaaacttccgaacattgcaataccctcggtcggcaacgaccgggggtattgtatttcaaggatgacaatgataatgcgcagcgtggcggttcgacggtgcggcgcggtcggcaaaggagaatcatgggacgtgtggtgagctacaacgaggacgtaccccgttgcacgttctgcggcaaaaccgaacgtcaggtcagaaaactggtggccggtcccaacgcctccatctgcgatgaatgcatcgccctgtgcgtggacatcatctccgaggagcgtgtcaaagatgccgaggtcaattcgctgagcctgcccaagcccgctcagatcttcgattatctcaaccgctacgtcatcggtcaggagaacgccaagcgcgcattgtccgtggccgtatacaatcattacaaacgcgtcaatatggagcttcaggagtccgctgagcagcttgacgggaataacgggcacggtggccagaccggcaaacaagccaagcaatccgctcccgcccagacgcgtgctacccgccgcaacagtgaccctttggctgacgttgaggtcgccaaatcaaacattctgttgctcggccccaccggtgtgggcaaaacctatcttgcacaggcgttggcccgcgtaatgaacgtgccattcgtcatcaccgacgccaccaccctgaccgaggccggctatgtaggcgacgatgtggaaaccgtgctccaacgtcttctccaagccgcggatggcgacgtaagccgagcccagcacggcatcatctacattgacgaaatcgataagatcgcgcgcaaatcaggtgagaacacctccatcacccgtgacgtgtccggtgagggcgttcagcaggcgttgctgaagattttggaaggcaccatcgcctccgtgccgttggagggcacgcgcaagcataaggagcaggacactgcgcagatggacacacgcggcatcctattcatctgcggcggtgcgttcgtgggactgacggatattgttcgcaagcgattgggccgtcgagagaccggcttcggcgcgaattggcacgacgccgacatgaaagacgaggaattgctcgaacaggtcaatgccgatgatctggccgagttcgggctgttgcctgagttcatcggacgtttgccggtcaccagtgtgctgaaggaacttaccgtagacgatctgacggcgattctcacccagccagccaacgcgctgatcaagcagtaccgtaagctgttcgccgtcgacggcgtcgacctgcagttcaccgaacaggccattcgggcgattgctgatatcgccatcaagcaggggaccggcgcacgcgggttgcgttcgattatcgaacgtacgttgcaggacacgatgttccagttgccgagtttggatgatgtgaagcaggtgattgtggacaaggcgtccgtagagggttccagtacgcccaaactcttgcgcgaagccgtggatgtgccgcagggacgcctcaaagttgcgtagtcggttttgcttgaccgagtccgtacacatgcggcgtgaggccagtaaatacgccgttgcggtggcgattaggatggtgcgactcgccgcaacacgccgagttgcattcatctgaacggcgtgtattatatatcgagttgtctgaaaagacaacatgcgccagtagcccagcggattagagcagctgactacggatcagcaggtcgcaggttcgaatcctgtctggcgcactcccgaaccacggggacaacagtggtatgcgccagtagcccagcggattagagcagctgactacggatcagcaggtcgcaggttcgaatcctgtctggcgcacagtaagcctcgaaagcgaaatgcttccgaggcttttccaattgtattggcccgtttgagtcggccacacaggggtggggtaaggttgcccttcgcgactcagcccggagcggaacgtcctgagatattccgtactattacatacggttcatccaagagagtacagcaaggagacgcgatggccacgaccgccggcgcgaagaagggactttggtccaccatcaggcgaatcgccgcctcagaccgtatttccggactcatcatgctcggcttcgcgctcaccggcctggtgctcgcgaacctgcccgccaccgcgcatgcgttcgagaccgtcgcggaaacgcatctgttcatcccctacaccaatctcgacctgccgattggccattgggcccaggatggtctgcttaccatcttcttcctgaccgtgggcctcgaactgaagcaggaactcaccaccggctcgctcgccaatccgaaagcggccgccgtgccgatgctgtgcgcggtgggcggcatgatcgccccgcccatcctgttcctggccgtcacggcattgttctctcagatcgggcctggtgaacccggcacgctgattctgaccaccaccggcagcagcatcccgttctcggagatgtcgcacggctgggcagtgcccaccgccacggatatcgcgttctcactggccgtgctcgccctgttcgccaaggccctgcccggttcgatccgcgcgttcctgatgacgcttgccaccgtcgacgacctgctggccattattctgatcgccgtattcttctcctcgatcaacgcctggtattggttcatcggcatcgccgtatgcgccgccatctgggcatacctcgtacgactgaaaaaagtgccgtggatcgcggtcggcatcgtcggcgtcctcgcttggatcatgatgttcgaggcaggcgtgcaccccacactggccggcgtgctggttggcctgctgaccccctcccgtgaaatgcacggcgaactctcaccgcgtgccgaacgctatgccaacaagcttcagccattctccgcactgctggccctgcccatcttcgccctgttcgccaccggcgtgcacttcgagtcgatgagcccgctgttgctggcttcgccgttggttatcgcactgattgtggctttggtggtcggcaaacctttgggcatcatcaccaccgcatggctggccacgcatgtgggcgggctcaagatggccaaggggctgcgcgtgcgcgacatgattcccgctgccgtcgcctgcggcattggcttcactgtgtccttcctcatcgcctcgctggcgtacaagaacgcggaactttccgctgaggcgcgcttcggcgtgctggtggcctccctgatcgccgccgcgatttccggtgtgctgctgagccgtcagtccaagagattcgagaaggccgcagccgcagcagcggccgatgcggaggatgacgaatcgattgatggcgatggcgctggtcagaccggtcgcaccacaaagtccaccacgcccacggaacaccccggcaccctcgccgacggcaccgccagtgtggagattgacttccgccactgatggcttagacgatccctactccattgttggccttgtttcgtgaaaaccgtacgctgagtgtcactcaccgtacgttcttcacgagatgaggccttatttcgtgaaaaccgtacgctgagtgtcactcaccgtacgttcttcacgaagtcaaggatgatttcgcggaaaacgtatgcagagcttcaggcgctagaatgcgaagagtcgatagcaccgtacaggaggatattggatggcaaagaagcagaagaaatccaagaagaacgacggcaaaaaggccgctgaagcaaagaatctagccgaggccgcatccaagtccacagtcgtggacgatatggaaccattggaagccacagccgcgaatgatgcggcaacgttggaggccgagacggcaaccgaggctgccgcaacgctggtgaacccggtcgacttggaggacgtctcgccgctgggcgacacctatcatcgcggcccggtgattctacgcggccagatgattccctcggacaataccaccgccaatctgctgaaacccgaccaggacaccgactggctgcacatggacccatggcgtgtgctgcgcatccaatcggaattcgtggacggtttcggggcgctcgccgagctcggacctgcggtctctattttcggctccgcacgcacccagcgcaccgaatcgatctacaaggcggcccggcgcatgggtagccagatagccaagcgcaacatcgccgtcatcaccggcggtggtcccggcatcatggaagccgcgaataggggagcggcactggctggcggcaaatccgtgggactcggcatcgaattgccgcacgagcaggggttgaaccagtgggtgaacctcggcatgagcttccggtacttctttgtgcggaaaaccatgttcgtcaagtattcctccggcgtgatcgtgtgcccgggcggcttcggcacactggatgagatgttcgagctgctgaccttggtccagacccacaaggtggcgaatattccggtggtgctctacggcaaggaatactggcaggggctctttgactggctcaacggtccggtggccgagcacggcatgatttcggcaatcgacccgaaactggtcaccgtgaccgatgacgccgacgaagccgtggaggtggccgtcagcgcaattgtgaggtaagcgagatagagtggctcccctctccgaggggagccaagggcagagttactttttgtaggcgatgagcaggcctgtgccgtcaggggtaagcgtggactcgaaaccttcgtcatcttcgacggtggtgagcagctcacgcatggcgatggccttgtcgctgcggtcggccggattaatcatgccgccctgaccgtcctccaacgccagcacatcggtgaacacgatcacgccgtgcgcgcgcagcagacgggaggcctgggcgaacgtggcggcatagttctcggcgtcgcccgccaccacgatcagatcgtaatcattggcgttgaggcgcggcagaaacacgctggccggggcgttcaccgcacgcaacgtggtgtcggtctcatcctgcagttcggcgaacgccttgcgaatcagcgcgatgccctgagcggtggaatcgaccgcagtcagcaggcccttgttatccagcgcatgggcgagctgcaaggtctccaccagtgagccggtgcctacggcgatgaccgaagcggcgccggtgatgcgcaccagcatgcccagcagacgggcctgcgcggccgaaccctgcaactggccggacttgtcggcggccgtacgggcgtcggtcaacgcattggattcacgttcgcgcgcgtgttcctcggtgaattcccatgccttggcgaggttggtgtactgcgttctgtccataattcgttcctttatgtcttctctcgtgcgggcacccggtggatgtatcgactacgtgttgcagcgattgccgtagctggtcgtggcgcggcttagcgctcgcggaccttggccacgatctgccacatctcctcgcccacatcgatgccgcgcgggcagtggcgggagcaggcgcgcacggactggcaggcggccacgccgtcggcggtgtcgatggcgtccatacgctccatggccttggtgtcgcgcgaatcgttgacgaaacgggaggcccaaatcagcgaggccgggccgatgaaagcgtcgccgccggcgtacaccgggcaggcgccttcgcacacgccgcaggcgatgcagttgctcagcagctcgtatttggcgagttgttcggggttctgcaggtattcgaacacgtccaccttgccttcggcggtggtggcgagcacgccgtccgcctgaagatatggggtgagcttccttatttggttgagcatcgggtcgatgtcggcgatgaggtcgcgctgcggcgggaagccgggcagggatgccagttcgatgactcccagcgagccgtttgcggccgagtcctggtcggctgccgcgtttgcgccgttttccgcggaatcgtcggattcttcggactcggtgccggtgtgccggaacccttcgtcatcgacttcggggatggcgccgggctgcttggcccaatcgcggatggtggccgtgcacagcagggtgggggtgccgttgatggccacggcgtccgaaccgcacatgccgtgaccgcacgaatagcggaaggccagcgtcgggtcgacggtgcgtttgatggtcagcaggcagtcgagcacggtgtccgaggggcgcgcgggaatcgtgtattcctgcacccactgcttgccgcgcggacgacggcgtgccgccgaatccgagccgccgccgaatggggagcttttcttggcgaacgggctgccgccgcgtgcacgttcggcgcgctcgggtcgcggcgtgaaacgatgcacttgcagggtaaccgtcgtgttgctcgcctcagccatgttctgcctccatgaaacagtgggatgtcaagtccaatatcagccaacctattgtgccacaagccctaggcggcttggtattaccaccagcggatcagtactcgcgcttcttgggtggatagtcggtgatgtgcaccggcttgaaacttgccggaccatcatcggcgaccatcgagtgagcaaggaaatgctcatcgtcgcgttcggggaaatcaagtcgctgcatggatccgcgggattcctgacgggattcggaagcgtgcagcatggcctcggccagttcgattagatgacggacttcccagatggcggtgacctcctgattgagagcggcggtcttgtcatgggcccgcaaggtatcggcaaccggtgtgatgtcgttgttgatctgagtcaacgccgtatcgatggtctgagcggtgcaacgtacggccagagcctgctccatcactgatccgagttgggccatgagctgataaggattggcggtgggcccgccatcgtctgaatcgtccatcggtccggcgagcagttcgtcaagctctgccttgcgggaatcggcagcctgatcggcggcatcggtcagcatgtcatcggtcgaatcatcggccatgggggagtcaaccgggttctcgacgatgcgtgcggccatcgtctgaccagcacgtgtaccgaacaggcaggcgtcgagcagagaattgccgcccagacgattcgcaccatgtacggagacacaagagcattcgccagcggagaacagtccatcgactacctgcacggcaccgtcggcccaacggtacacctcgccattggtggtgatggggatgccgcccatcgtgtaatgcgcagtgggcttgataggcaccaggtccttggccggatcgaggttcgcgtactgctcgatggtttcgaccacctgcggtagcacttccttcatacgttcggggtcgatgccggtcatgtccagccagacgcagtccttcggaccatccgggtccttcgggtcggcgacgccgcggccggcgtcgatctccgccatgatggagcgggagaccacgtctcgcgcggccagatccctatgctccggggcgtagcgttccataaacggctcaccgtcggcgttcctcaggatgccgccctcggcgcgggccgcctcggacagcaggatgccggtgtgcgcgagcccggtggggtggaactgcacaaattcgatgtcctccagctgcaggccggcggccaaggccaatgccatgccgtcgccggtcaggtcccaggaattcgatgtggtatggaacagtcggcccgcgccaccggtggcaagaagcacgttgcgcgtgtggatggcctgaatcttgcccgaatgcgtgtcaaatgccacgatgccggccgcctgcttgccgtcgtcggcgagcaccaggtcggtcacataccattcctcggcgaactcgacgccggcggccacgcactgctgccacaaggtgtgcaaaatctggtggccgatgcggtcggccgcataggcggcgcgcttgaccggggcaccgccgaactcgcgcgtgtggccgccgaaccggcgctgggcgatatgcccgtcatcggtacgggagaaggccacgccctgacgctccaggttgatcacggtctgcggcgcgtattcggcgagcagtttggccgcgtcctggtcgacgagccagtcgccgcccttgatggtgtcgtagtaatgccagtgccagtcatcggactccacattgcccaggctcgcggcgatgccgccctcggccgaaccggtgtgcgaacgcagcggctgcagtttggagaccacgaggatcttcgggtccacgccttgttccttgagctcggtgatttcgggggagcgcagcagtcccaacgccgccgacaggccggccgctccggcgccgacgatcaccgcatcatacatatcttccaaacgtttcggactcatgggttcgattctcgcacacccgccgaacagtcttcgagccgtgtcatgaaagccgattagccgacacggctgctcagcttgagtatgccggcatcccgctcgatcactcccttcagctccaatgcgccgagtagctcaagtatggtgccgatattgggaatctcgtcgggtaccgtctctcgcgccacacgcaatagtgcgtccggggtgacgatgagatgtcgtttacggcattcacgaatcaatgccactaatgtgcgttccatttccggcagcttggcgataatgatacgttgttgggcttccttctcgggatcgagcttcggcttgacacgaagatccggcatctgatgcgacgagggcggctcttcacccttgctcttgttggcaccggcctcggcagttgcgctcgccggcccatccttggattgaacgagtgtaggctgagtatgcttggtcctaagacgtttcgaatgacctgaatcttgtgacgactcctgtgacgccgatgattccgaggatgctggcgataacggagtcgttgccggcacttccatggcctcctcgttttcggacgagtcctgacctgtggatttcggtatgcctgggcatgccgccataacgggcttatgccgttcatggcatatatcctcagtggatgtggcggcacacagaatcatcgcccggtggtcgccgatcatcttattgcacccggcgttgcaaggctgattgatgtcaccgggaaccgcatacacttcgcgcagcaattcgcatgcccatcccgcggtgttgagcgctccggaacgcaaccgggcttgcgtcacaatcaatgtggaagacatggccgcgataatgcggttgcggagtagaaaacgacgggcttcgggaatcgtccctgggcacagttcactgatcagtgcaccaccctgcgcctcgatacgttcgaacagcgtgcggttacgcatcggtccgatatggttgagcccgccggcgaatacggcaacggttctgcccacattggcgggcattctgccgtgcagcgcattcaacgctccccaatgtgccgccgcatccgtgcccattgcgcctccggacacgaccagatgcccggcaacgactgcctgttcggctacggtgtgtgccacataccggccgtattcggtcacgtcccgtgaaccgacgatgccgaccggtttggcgcaactggtcaatgcgcgtggatcgcctttgatccacaaacacagcggtggcgcccaatcggagcgaatggacaggtcggccaactgcgagggccaacatggatggccggggccgataatccattgcgtgccatccatagtgaaccagtcggccagttggatgatgtcttgcgagggcaggtccatcatgcggttatgccagccggccagtgcattgcggaaggagcgcatcgcgttcgccgacgccttgcggccccatcgggtgaggccatccacgaacatgcggtcaatacgtgacagcgccgggccgcagattccagatggctggcttggatgggattgcgccaacgcgtgccagagggattcggcgctttccgcgcctttgagcgtggcgtacatcatcacatccgccccatcaagacagaacgtgagcgcggcgcggtataacgtatccgtgggaggcatgggaatggtgcgcgaaacagcgaggcccgtatcggtgtgatccacactgcctgcggtgccgccagattgtcggatatcagtagcgttactcatgtcatcctcgttctcatttcgatgccctgatggacgtcctgctcggtgggggatacgcggccggccagatcggcgagcgtccaagacagacgcatggcgcgatcggccccgcgcaatgtgagttgatgattggacagggcccgattgaccaattccatcgctttcagcgacgtattggcgtgcagccatttgcccgaagcttgcgcgttgcacacccatccatactgtctgaaccggtccttggccacttgacgggcgcgaatcacacgagcttgtatcccggcactggactcgccgatcgtctcgctctgcgcggcaatgcgcgagaccggtggcaccgccatctgaatatccacacgatccaatatcggtccggacaatcgcgagaaataacgaatacggtctttttcccggcaagcgcaacgttcgccggtaccgtaatagtatccgcacgggcaggggttggccgccatgatgagttggaatgaggccgggtaataggtgctgccttttgaacgggaaagcgccacatacccggattccaatggttcgcgcaacgtctgcagggcgcgtgcgctgaattccggtgcctcgtccagaaacagaatgcctcgatgcgcgcgcgtgatcgcgccgggaacggcgatgccgctgccaccacccaccaaggccgccgtgctggcggtgtggtgcggtgcctcgaacggcggcatgtcggtgatgccgtactgaggcagtatgccgcacagcgaccgtatcgacgccacctccagttgttccgcctcgttcaacgggcacatgatgccgggcatacgtgaggccagcatggttttgccgctgcctggcggtccggtcatgatgagattatgtccgcctgccgccgccacttgcagcgcccatttggcatgttcctgacccagaacctcgttcatatcgccacaatcgttgggatggcttgtgggcgattgatccgtggtggtctcgtcggcaaccggtgtatcgggaatcgtataggtggcatcgccgcccatcagttcgatgagctcacccacatgcctcacgcccactacatccagtccatccaccatcgaagcctcgtcaagattgcgatggggaacaatcattttgcgcacgccacgttcctcggcatgcagcatgatcgggagcagcccatgaatcggcagcaccgagccgtcaagattcacttcgccgagcacaatggtatcttccaagcaatcatgccctatggcacccgccgcgcataggacgctggccgcgatggccagatcatgcgacgaaccacgtttgggcatggccgcagggctcatgttcacggtcacgcgggtttgcggccaaccgaatccagtggcttgacacgccgatttcacgcgctcgcgggcttcggacaacgatgcatccggcaatccgatgatgctgaagtatggcaagccagggctgatgaaagcctgcacttggacgatgaaggccttaaggccgatcagtccgactgagagagtgctgccgatagccatgtctactcctttcgcaatgtgtttcgcaacgtggctgttttttgggggacgaattcagaaggcgttttcgatgtgatgcacgagcggtctgcccacccgaagcacgatggtgacgacatcgaaacgggctgccgtatgcggcacacgattacgccggtcaagcagccaatcgcaggcggctttcctgagattgtgctgtttcgccggcgtgatggcctcttgcggatatccgtaatgcatggaccggcgtgatttcacttcgacgaacaccaccgtgtactcgggattgagcatcacgatgtccaattcgccgtaacgggtatgccaattgcggctcaaggtcgtccaaccgtgttcctccagccacgcggcggcatactgctcgccgagcgcaccgaactgtttgggcgtcagattgcggtcgcccatcgtggccgcaatccgttccgaaggcagcgttgcctgcggatcaggtgaagccagcatgggctggtgaaaggcaagaccggcgtcgatgccggacttcgtcgtcggctgggtaggtggtaaagcgttcatgattccactgtgcgggttacttatgtaagagcacaagcgcaaccggcaaatgtggatactatgacgcggtttggcgtgttgtggataacgtgtggatgaaaacctggttatccaccattagttcagaaggtttaccaaggctccccagtcggcttccctgtgacgacagacaacccgccgagttgttcgctgaatacgtcagacccagtgagcggagaggggagccaaggtgcggtcacttcaccaaatcggtgagttcgccgaggttcagttcgaagctgacgccacgatcctcgaaatgcggctggttacgggtgctgaccatggcgtggcgcacgaactcaccggcgatttcggccgactcggccaggccgcggccggccatcaccgcgccgcacagggcagatgcgaaggcgtcacccgtgccgtgaatcatgtatggcagcttttcatgagccagctcgatcttgccggcaacaccggtggaagcgctgaccatatagttgacgattttgccatcgccatggtcgatgcccttcaacaccacgttcttcgcgccaagctccagcagcgcgcccaacagctcgtcaaccgtggcttcatcgatatcctgaccggggtagtcacgcttggtcagaatgctcgcttcggtgaggttcggcatcagcacatcggcgccgtcggccagcgcacccatcgcctcgcacagttccggcgtatacgtgggatacatttcaccggcgtcgcccatcaccgggtcgaccagacgtagcgcattcggatattcgcggtagagacgctgaatgatcgccacctgatcgggggagcccaggaatcccgagtacacgccgtcaagctcaacgtcttccttctgccaggcatccagatagccggagaggatatccgtggtgtcatggaacgtgaacaccgcgtacttcgtgtgtgcggagaacagggcggtcggcaccgggcagacatcgcagccggctgccgaaagaatcggaatcgcggcggtcagcgagcacttgccatagccacacatgtcatgcacggcggccacgcgtggaatatagctcggatcacggtcatacagtgttacatcggtcatgtctgttcgaaccccttcaccatgttggcggaataattcattggcgatgtttgactgtagtcgttcgtcatgtaaaccatgtaaccgggcggcagaaaaatgaaacagacgtcatcgccgagcgggcaaaccgtcttggtgacgggtggaacaagcaatcatcacggacacttgagccatacgcgaaaggcatggtagcgatatcaccgtgaccgcagtcgaccgtgaaagcgcatgcgtgcggcccggcgtgtcgcgataatttcaacgactttttcgtgacttctgacagtctctcacgtcaatgatcccaaggctttataagcccttataggcaagcccgataacgttcggcttgcgccgcgcggcccaagcgtcgtaacttcataaccaacacctcgccaaccgcccgaacacggcaggcgggtggcaaggaaaaatcctcgcgacctagcacaaccaaggagaaagacccatggccgagaacaacaagaagtaccgttttgaaaccctgcagctgcatgtgggccaggagcaggccgacccggccaccgactcccgtgcagtcccgatctacgccactaccagctacgtcttccacaacttcgaccacgccgaggctcgcttcggtctcgctgacccgggcaacatctacggccgtttgaccaacaccacccagggtgtcttcgaggaccgcatcgccgcccttgaaggtggtaccgcaggccttgccgtagcctccggtgcagccgccgtggaatacgcggtgcgcaacatcacccagtccggtgaccacatcgtcgccgccaagaacatctacggtggaaccttcaacctgctgcgccacaccctgccgcgtgacggcatcaccaccaccttcgtttccgccgagaacccgcaggagttcgaggacgccatccaggagaacaccaagctcgtctacttcgagaccttcggcaacccgaacgctgatctgccggacttcgaggccatctccgaaatcgcccacaagcatcacctgccggtgatcgtggacaacaccttcgccactccgtacctgttccgcccgctggagcacggcgccgacgtggtggtcgagtccgccaccaagttcatcggcggccacggcaccaccctcggcggtgtgatcgtcgaaggcggcaagttcaactgggccgaggtgccgggcaagttcccgaccctgaccgagccggacccctcctaccacggcctgaacttctacgaggctctcggcggcaccgccttcgtgacccgtatccgcgccatcctgctgcgcgacaccggcgccaccctgtccccgttcgccgccttcctgctgctgcagggcaccgaaaccctgtccctgcgcgtcgagcgccacgtccagaacgctctgaaggtcgtcgagtacctgcagaccgtgccggaagtcgagtccgtctcccacccgtccatcccgggccgtccggatcacgacctgtacgagaagtacttcccgaacggagcaggctccatcttcaccttcgatatcaagggcggaaaggatgcggctcgcgtcttcatcgacaatctgcacctgttctctctgcttgccaatgtggccgacgcaaagtccctcgtcatccacccggcttccaccacgcactcccaggagaccttggaagagctcgaggaccagggcattcaccagggcaccatccgcctgtccatcggcaccgagaacatcgaggatatcctcgatgacctgaagggcggcttcgaagcccttcgcgcttccggcttggccaagtgaggtcgacaggagggttgacggcccgatgagaaggggcgcgatgctaatggggtgcatcgcgaatcatcgagccgcatggggtgccttccgcctgatcgcttgacccaaggagtagaaagctcgcactgacgtcatgcagtgcgggctttcttgcgtctgtatgcctcacactgtttgcgcagaggcatgaatagtgtgagacctgagacgacataatcctcaaggatgagggccggcgcgtggcccctagcccaattcagtctggcgcacgatggggcgcgccgttatttcttcataagttggaatcgtcatccgggcataaggtccggccaaatatggagaggcattatgaacgtgcagaacccgtccgcatcgcgcggcatcgctattcaggccgtcgacttggtcaagaactacggcaccggcagcaatatggttcacgccctgcgcggcgtgaacgtgagtttcgaacgcggcaaattcaccgccatcatgggcccatccggttctggcaaatccacgctgatgcacacgctcgccggtctcgactccgccacttccggccatatcttgttcggcggcgccgacctgacccgcatggacgacaagcagctcaccttgctacgtcgccacaagatcggcttcatcttccaaagcttcaacctgttgcccatgttcaccgcagagcagaacatcctcatgccgctgactttggccggtgataagcccgaccgtgcctggttcga

SEQ ID NO: 617 - DNA, 4203 bp, Unknown
  R14_15m  MAG No. k141_5289
gggaccgtattggggtcagttcggcggccgctatgtgcccgaggccctcatcaccgccctcgacgagcttgagcgtgtctacacgcaagccaaggccgaccccgaattccacaaggaattcatgacgctccagcagcgttacgtgggccgcccgagcccgctgaccgaagccccgcgcttcgccgcactcgtcaaggaaaagaccggcctcgacgcccgtatcttcttgaagcgcgaggatttgaaccacaccggtgcgcataagatcaacaacgcgctcggacaggccttgctcgtcaagcgcatgggcaagacacgcgtgatcgccgaaaccggtgccggccagcacggcgtggccaccgctaccgtgtgcgccatgcttggcctcaagtgccgcatctacatgggccagatcgacgcccgccgccaggccctgaacgtggcccgcatgcgtatgctcggcgccgaagtggtcgaggtgaccctcggcgacaagattctgaaggatgccatcaacgaggccctgcgtgactgggtcaccaacgtcaaggacacgcactacctgctcggcaccgtcgcaggcccgcacccgttcccggccatggtgcgcgacttccagaagatcatcggcgaggaagccaagcagcagcttcaggactggtacggcatcgaccatccggacgcgatttgcgcttgcgtgggcggcggctccaacgccatcggcgtgatgaacgccttcctggacgatgaccgcgtgaacctctacggctacgaagccggcggcaacggccccgaatccggccagcacgctatccgcttcgcccccggcaccggccagctcggcatgttccagggcgccaagagctacctgctggaaaccgacgaaggccagacgctcgacacctactcgatctccgcaggcctcgactatgcgtccgtgggccccgagcacgcatggctcaaggatatcggccgcgtgaactacagctgggccaccgacgaggaggccatgaacgccttccgcgacctgagccagaccgagggcatcatccccgccatcgaaagctcgcacgccgtggccggcgcgtacaaggccgccgccgatctgaaagccaagggctatgacaaggccgtgatgatcgtgaacatctccggccgaggcgacaaggacatggccaccgccggcaagtggttcggctacctgaccgacgatcaggccgccgcgcttgatgtgaccggcgcccacggcaatactgtcgcctgaacaagaagaggagattgttgattatgaccaatgaagcaaccacgccgtccggccagccgctgggcatcagccacaagcccagcaagtcaggcgctatgttcaccaagttcaaggccgagaacaagcccgccttcatcggctacctgccctatggcttccccaacccagacgtctcgcttgacgccttcaaaacgatggtcgagcacggcgtcgacgccgtggaaatcggcctgccgtactccgacccggtcatggacggcccggtcatccaggctgccgcctccatcgccctgaacaacggcgagaccatcaagcgcgtgttcgaggccgtcgagaccgtggccaacgccggcggcgtgccgctcatcatgagctactggaacctcgtgtaccactacggcgtcgagcgtttcgcccgtgacttcgagaacgccggcggcgccggcctcatcaccccggacctcatcccggacgaggcgggggagtgggtcgaagcctccgaccgtcacggactcgaccgcatcttcctggtctccccggactcgtccaccgagcgcctcgaaaccgtggcccgcaacgcgcgcggtttcgtgtatgcggccgcccgcatgggcgtcaccggcgaacgcgccaccatcgacgcctcgcccgaactgctcgtggagcgcacccgtcaggccggtgccgagaacgtgtgcgtgggcatcggcgtgtccaccgccgaacagggcgccaaggtcggctcctacgcggacggcgtcatcgtcggctccgcgctcgtgcacaccctgctcgcggacgacaacaagaccgcacgcgacccgaaggaaggcttgaagctgctcgccgccaagagcgaggaactggccgaaggcatccacaacgcccggtgaacacccggtgcgcctcacgcgggttgtgccgtgacacggtagggtagtcacagagcatcaagcacaacccgcgcgtggacacaccatgagcaccagcaagtagaggcacgatgaatctggcttatattccctcgccgaccttctccaagttcgagatcggcccgttcaccatccacatgtacgcgatctgcatcctgatcggcatctgcgtggccgtatggatcctcaccacacgttggaagcggtacggcggcaccttcgaccagattctcgacaccacgctcgtcaccgtgccctgcgcgctggtgggcgcgcgcctctaccactgcatcaccacgccggccgactacttcccgcccaccggcaacttggtcaacatcctcaaggtgtgggaaggcggcatggccatcttcggcggcatctccgtcggcaccttggtggcgttcctgtggtgccgccacaagcactatccgttcgcgatcttcgccgatgccatcgcccccgcgctgcccgtggcccaggccatcggccgactcggcaactggttcaaccaggaactctacggctggcccaccacgttgccgtggggcctgaagctcaacgacgcggacgccatcggcaaatccgaaatctgctattccggcgcgcaatgcccggactacaggaccacgctgttccaccccacgttcctgtacgagatgatctggaacctcatcggcgccgcgctcatcatctacctcggccacaagctcgccgaccggctcaaggccggccagcagttcgccatgtacctgatgtggtacggcctgggccgcacctggatcgaaaacgtgcgcatcaactactccacggtgattctgggcctgaggaccaacatgtggaccgcgatcatcgtcttcgtgctcggctgcatcctgttcgtcgtgctctaccagtacgggccggaccccaaggcgcaggcgcgcgggcttgcggcggtcaccgccgacgagctcgaacgccagagcatcgaagaggaacagcttcgccagaaaaagcaagccaagcgcactaagtgacaccacgataaacagcgccgaaacagcgcgaaacacgggaccccaagtcccattgcacagataaggtaggaaaccatgagcaatatcgcaatcgcacccagcatcctgtccgctgacttctgcaacctcgaacgtgatctcaaggccatcgccaacgccgacctggtccacgtcgatgtcatggaccatcattttgtgccgaacctgaccctgggcgagccgatcgtcggccgcatctgccaggtcaccgatctgccggtcgatgtgcacctcatgatcgaggacccagaccgttgggcccccgaatacgccaagctcggcgccgcctccgtctccttccacatgggtgccacccacgcccccgtgcgtctggcccgccagctgcgcgacatgggttgcaaggcctgcttcgccgtgcgtccggccgaaccggtcgagccgctcttcgatatcctcgacgagttcgacatggtgctcgtcatgaccgtcgagcccggcttcggcggccagaagttcctcgacaaccagatggccaaggtccgccgcctgcgcgatgagatcacccgccgtggcttgaagacccgcatccaagtcgatggcggtgtgagccccaagaccgcgcacatcgtggccgaggccggcgcggacgtgctggtcgccggctccgccgtgtacggcgccgagaatcctgcccaggccattgacgacatccgcgccgaggccgaggccgcgttcaaggcctgagctccaagcctgaaccgcaatccacctttcatccataaccacaagagaagaatctgaatcacatgaagacgtttgaatccctgttcgccgaactgtccgagaaggcccagacccgccccgaaggctccctgaccgtcgacgagctcgacaagggcacccacttcatcggcaagaagatcatcgaagaggccggcgagacctggatggccgccgaatacgagggtgcggaccgcaccgccgagga

SEQ ID NO: 618 - DNA, 13931 bp, Unknown
  R14_15m  MAG No. k141_5408
ccatgcctcggacggggtgcggctgtccgtgtggatgtcctgcaggacctcgcgcatccggcaggcgcggccggtcttcaaccgttgcctcgtcaggttgcgcttggtctccacctgcagttcggtcaggctttcctcgttgcacagccacaggtacttggtccgtttgagcagcgggttggagcggccttccgtcttcctgaccttgtcgacggcctcgttggcgtgcctggccacgtggaacctgtcgacgatccgccgcgcatggggcagatgctcacggatgcccttccggaagcccaggctcatgtcgcaggcgaccagacgcacatattccgggaccccgttgtggtccatgaaatcacgcgagaaccgttcgaccgtggtcgagtccttgcccggcgtcacgttgatgacatcgtgctccacgagatcggcgaccacggtgatgtaattgtagcccctgcggctggtctcgtcgatgccgattggcccgtacccgcacctcgtcacagcttgtataatcacgattatactaatcatgatacaataaatcgtgatgcgatagaaatacgccggcgtatggcataaaggaggcgggcagcatggcattcatcggacgagacgatgacctcaagcaactgcaggaatgtttcactgagcgtagggcacagcttgtgttcgtctacggccgcaggcgcgtgggaaaaacagagacgcttattcaactcgcaaaagacaaggaaaccttattcttcgcggcgcagaatgccactaaagatgaacagctggcatcgttctcccgtctcatgttcgaggcgggtgccccgggcaaggattatctgagtcaatatccttcttgggaaagggcgttaaccgagttaacccggctgccagagccgagcgatggcggccgcaggcttgtgatattcgatgagtttccttatctggtcaaatctgatccgtcattgccgtcagtgctacagaatctttgggaccacacgttgcgtcatgcaaatctgatgattgtgatttgcggcagtgccatgagcttcatcgaaaaggagctgttgggagaaaaatcgccgctatatggtcgtgcgaccggcatcctgaagatgctgccgatgccatattgggatgcagcgcaattcttccccaactatagtagcgaggataaggcgctggcctacgcaatactgggcggtatcccgcgttacctagaggaatttgacccagatgagaccatagacgcaaatgtcaagcggcatattctgagacgcattgctccgctatacagcgaggttgaatttttgttgcacgaagaactgcgggaaactgcgaaatataacagcgtgatacgggcgatcgcgctcggcgcaacttcgctgaatgagatcgcgacacacacgatgatggcaaacgcaacagtatcgtcgtatctcgccaatcttatggaactggggattgtggaacgtgagttcccagtcacggcaaagcctaaggagcgggcgaaaggttcgcgtgggctgtatcagctgagcgacaatttcttccgattctggtattcgtttgtctttccgtatcgttcggaattggagcggggcgatgtggaaggcgtatacgagcgtcatatcaagccggtattacatgattttgccggcaaaccgttcgagggtctgtgccgtgaatggatgtggcgtgagagtgctgctggacggttgcccttccgtgcgcgtgcggttggccgttggtgggatcgtcaggatgagatagacgtgatggccgttgacaatgcgtctgatgctgccattgtgggcgagtgcaaattccgcaatgcgccggtggaccgttccgtgctgaatctactgcgagaccgtgctgcgcgaaccggtatcggccagcgaacatacctgctgttttcgctcggcggtttcgatcaatcactggtcgacgatgctgcggcgtctcaatccgacgttcagctcgtcggcatcgatgagctgtttcatgaataaatcccatttgcgaatagctctcactgagtgctcatcagtgagagctattcgcaaatggagccttacttcttcgcctgagtgagctggtaggcggcgaagaggatggccagccagatcacgccggcgatgacggcgatgcggtagctggtggagaagcacatcagcaccacgaccagcgccaggaacgccagcaccacccacggggtcaccttggcaaacggcagtttgaagtgaatcgcgtccagtgcctcctggccgctcagaccggccagctcggaatcctcgggagcgccgcccgcggcgaccaccttacggaacttcatttcggtgagcatgatcatcgtccagttgatgatgccggcaatggtggcaatcgacatcaggtagttgaacgcgaactcaggccacacgaacaccacgaccacggcgatggcggtgatcgcggcggacgtcagcacgccggccactggcacgccgcgcgagttgagcttgcccaagtaagcgggcgcattgccctgcttggccagcgagtacaacatgcgggagttggcgtacaggccggagttgtagacgctcatcacagcggtcaggcacacgaagttcaaaataccggcagccgcgtgaatgcccacggaatcgaagatctgcacgaacgggctggacttgccatcgatggtgttccacggcactacggccatgatcacacccagagcgccgatgtagaacacgaggattcgccaaataatatcattggtggcgcgcggaatcgtggtcttcggatcctcggtttcgccggcggtgatgccgatgagctcggtgccgccgaagctgaacatcaccacaaccagtgccatcagcaggccggtccaggaaccgtcggaattctgccccatcaggccgttcgggaagaagccgttacccacggtgaaccagttcgcgaagcttgcgcgcacgccggatgcggtgggcaggacaaagatgatgacggccaggccgccgataatcatggcgatcacggccacaatcttgatgatggcgaaccagaactcgaactcaccgaatttagagacgcccagcaggttggcggcgcagatgatcaccaagaacacggccgccgacacccatgtcggaatcgccgggaaccagtagttcacaaacgaacccaccactgatagctccaccatcgagacgaggatgtagttgaaccagtagttccagccggaaataaagccggcgcgcttggaccagtagcgggtggcatagtagctgaacgcgcccgccttcggatcctcaacggacatttcagacagtgcacgcacaatcgcgaaaatcgcgaggccgccaaccaagtaggcgagcagaatcgagggtccggccagcgcgatggattcactggaaccatagaacaggccggttccgatggcgccgcccagcgcaatcagctggatgtggcggtttttcaatgacttgcgcagcgtggccggcaccggcacgtcgtcggtttcgcgcggcttcttaggcgcatcagtagtactcattgtgctcttctctcacatttcttgggtttggcgcacgcggggcttgccgtgatgcgcaacgttcgttattctatgccgccgtatcgtctcagaaatggtcaatcgtctatttgtgcgctattgcaagcgcgggcgtgggcgcggccggtgagcaggcgaagctatagcgagcgatgcttatgaaaccgcacgcttcactgagttcactgagttcactgtgctcactgcgtggcaggcatacacatggtgaagatggtgtgggacaccgattcgggagaggccgcgagatcgttggcgagccaatattgcaaaagcccaatgctgccggacacggcgaatcgcatacgcatctgcgcctcggctgggtaacccgccgaagattgcaactgttcgcctacaccgcgctggctgtaaatcaatcccagcagctgctgctggaaaccgatatccgctttcgggctcatcagcacttggagatgattgcgattgtcggcaatgtactggcagatgcgctcaataacatgctcgatgccggcaggatctggctgggcgagtagctgttcgagtgcggtggtgacccaggccatggtttcgtcttcaatgtcgtgcagcagttcctcgatgctcgcataatgcgcgtaaaacgtggaacgattcacatcggcccgctcgcacaacgctttaacggtgatggagccgagcggctgatcgcgcagcaactcgataagcgcgtcctgcatggcacgtctcgtgtaacgggtgcggcggctttccgtcaattctttggacatggccttctccccaagttccgacaacccacaatccaactgttggttgcagaaccgacacagtgttgttttacttgagtatagcaggaagttctggcggggcctatggggctaggtggctgccacgagcgcgttggaggtgtgcgatggcgtatatcgaattcgaccatgtggtcaaggaatatccttctggcagcagtgtgattcgcgcgctcgacgaggccagcttcaccgccgaacaaggcgaattaagcgtgattctggggcagtccggtgccggcaaaaccacggcattgaacattctgggcggcatggataccgccacaaccggccgcgtagtggtcggcggacgcgatattacgggtctgcggaaaaaggaactggtgacctaccggcgcaacgatatcggcttcgtcttccagttctacaatctggtgcctaaccttaccgcgctcgaaaacgtggagctcgcctcgcaaatctgccctgaccatttcgatccagaggaaacgctgcgcaaagtcggactgggggagaggatggacaacttccccgcgcaactgtccggcggcgaacaacagcgtgtatccatcgcccgcgcgattgccaaaaagccgaagctgttgttgtgcgatgagccgaccggtgcgctcgattacgagaccggcaaggaagtgctgcagttgctgcaggatatttgccaaacacaaggcatgaccgtaatgatcatcacgcataattccgcgcttgcaccgatggctcacaaagtgattcgcttccgctccggcaaggtgaccagcgaggaggtcaacgcaacgccgcggcccatcgccgatatcgaatggtaggtgattggcgatgctcactgcaagacactctgtgaaacgccccgtgaaacaagcgaggcgattcgtgaaacaacctgtgaaacattctgtgaaacggcggaacctcgacgatagcggcggtcgaggagcgggcgtttctgcggtatttgccaaagatacgttgcgttgctggctgcgcagctggaagaggttcgtctcgatcgccgtcatcacgctgcttggcgtggccgtgctgaccggcatctacgccggatgccgcgatgcttttctggcggccggtcgtttttacgatcagcagggactgcatgacctgcaggtgctatccacatacggcctgaccgatgatgatgcaacggcactgcgccgaatcgacggtgtgcaaaccgtgcagcccgaacgttctcagacggtgaccacgttggtggacggcaccaagaaaaccgtgaccatgcaggaaatcggtaccgaagggcttgatcagccgtacatacggcagggcaaactgccgaacaaggccggcgaagtggcggttacgcagcaattcctgaacgatagcggactcaagattggcggcaccattactgtgacgccacaagacgcctcttcatccgtcatatcggtagcggccacggagactgacgattccaataatgccgatacggtaggtgtcgccgccaatgcctcggcatccgatgcgaagtccgacgccaatacggacgccgacgccgagcaatccccgcagttccccacgaaactcaccatcaccggcgtcgtactcgacccgcgcgacctcaacaatccagacggctattcgggcatgacctccttccggtccacctcatccgaggactatacgttctttgcacccagcgacggcgtgaccggcaatatatacactgcgatatcggttgccgtcactggtgcgtccgattttgacacgttttccgatgcctacgatgaagccatcaaaaccgtggccgaccgtatcgaacatcagatacaggccacacgccagaaagcccgtcgtcaacagatcgtctccagcgcgcagcgcaaactggatgatgccaaagacgaggccaacgagcagctggacgaagcccagaagcagatcgacgacaactgggccgagctggaagccaacaaaacgacattgcaagatagccgtaccgaattggagaacaacaggacaaccattaccgatggcgaacggcagctcgccgatggacgtgcgcagattgcatcggcccgtcaacagatcgcgcaaggtcgccagcagatagccgaagcgcgcacccagctcgaatcgggcaaagcgcagctcacctcggctcgcaaacagctcgatgcggcgcaaacggaactgactgccaatcgcacgaaaatcgaacagggcattacccaaatcgaccaaggcgtggcacacattgatcagatgctgtccatgattcaacaggccgacaatctactggcgcaacttgacccgaatatcgacttcaactcacccacatggcaggccatcaagcaactgctcgcgcgccttggcattaccctgcctgaagtgccgtcaatcagtgagctgcggcaacagctggccgccaagcaaacggaactgcaaacgcagcgagacagtctgacccagcagaaagccgatttgcagcgcacattaaacgaaaccattgcccccgcacaatccaccttggaccagcagaacgcgcaactgaccgccaaggaacaggaagcggctgcaggagaggcacagctcaataccaaatccgcggaactcgaagcgaatgccgcaaccctcgaaacccagtcggcgcaacttgaagcgcaggccgcccaactggccagcggcaagcagcagctcgaagaaggcgagcggcagctggaagaaggcgaacaacagctcgcggacggcaaggcgaaactggatgatgcgcagtctgaactcgatgcgaagcgaagcgaagcggaaagcgaattcgccaagcagcaacggcgcatcgacgatgtggccaacgcacgttggtatgtgcagacgcgcgcttcgatcgacggattcagctcgctcaaatcagacgtcagttccatcgaatccatcggccgcgcattcccgattgtgttcctgctggtcgccgtgctcatgagcctgaccaccatgacccgcatggtcgaggaagaccgcggacttatcggcacctaccttggactcggctatggcggactcgccgtgtccagccggtatctgctgttcgcgttgctcgcctgcctggtcggcggcggcatcggtctgctggtcggattccttggcatcccggcattcctgctggtggtgattgagggactgtatatattgcccggtgtgcgactcgaatacgactggctgtacggttcggccggcatcgtgctgttcgtggtcggcgtgggcgtggccaccgcgctcgcctgtcgcgaggagatacggcacacgcccgccgcgctgatgcggccgaaggcaccgaaagcgggcgctcgcatattgctggagcggattcgcccggtatggagccggctgaacttcctcggcaaagtcaccgcgcgcaatatcttccgattcaagtcgcgcttgattatgaccgtgggcggcgtggccggttgcacggcgttgattatctgcggatttgcgattaatgacaccgtcgacacgattggcgtcaaacaatacgagcagatctaccagtacgacctgatggtcgtggccaatgacgatgacgccaccgcgatgcgcaagcaggtggcacaagatggccaaaccaccgaaacgctgaatctgcgcgtggatagtggcgagatgagcaatgcggcgcaggaaagcgaagccgtgcagctgatgaccgtgcccaacgattcgctgaatatcttgaacgatatggtcacgctggaacaagctggcgatgatggatggtttgggctgcccaatatcttcggcaaagcgggtggcggcactgtagcgctggacgatagtggcgtgattgtatcgcagtccgccgccaactcgctgaatattcatgccggcgacaccgtcacgctgggcaatggcggcagcagccgggccaaggtgcaggtcacggccgtgacgcgcaatcttattggctctgatgtgtacatcagtgagcgactgtacgaccagaagtttgcggccggcggtgtgacgtcttcggcttcgggagatggcactgcctcgaccttgacgtggaacgcgatgctcgccaagctgaaaggttccgagaccgaacaggccgaatatgcggatcggttgggcgaggaatcgtcggtgctcaaggccgtgagctgtgcgcatctggccgccacgtttaagttcgatttgatgggtgccgtggtggcgctgattgtggggctcgccggcggcctggcgctggtggtgctgtttacgttggccaatacgaacgtgtccgaacgcatccgcgagatggccacactgaaggtgctgggcttctatgaccgcgaggtgcacaactacgtgaaccgcgagatgatgatattgaccggtatgggtgtggtggttggtctgccgcttggcaggtggataggcggattactgactgctgcgttgaatatgccgtcgctgtatttcgaagtggaagtgcactggtacagctatgcgattgccgtggtggcgacgctggcgttcgcgctgctggtgcagctgttcaccaacccagtgctcgatcgcgtagacccggtcagctcgctcaagtccgtggaatagagacagaagttcaatttggtgttggtaaattgaactttttggcggaatatttacagcatcatcgcatgtattcttgagctgagcgttttcgtgacatatttcggtgatacagtccgaacttgttttgaacgagtatcgcgtccggtgcgtaacaatcgggcggcggagaagagaaatgaaatcagtatggccgatacgaatgtgaatggtggtacacggcaggctacgggcaaactcaagtctgtcgaaagcctggaccggaccaacgagatggagcgcggcctgaacaaccgccacgtgcagttcatcgccatcggcggcaccatcggcaccggattgttcctggggtccggcaagtcgctggcgctgaccggcccctcgatcgtcttcgtgtatatcctggtcggcgtcatcatgttcttcctgatgcgcgccatcggcgaaatgatgtaccgcgatcccagccagcacaccttcatcaatttcatcacccgttacctgggcaacgggtgggggcatttcgccggctggacgtattgggccgcgctcgtgctgctgggcatgaccgagatcacggccgtctccacgtacttcatcaccttcttcgacacgttcggcatcgacctgacccattggaaatggctgattgaactgtgcttcctggtgtcgctggtgtccgtcaacctgatcgccgtcaaggtgttcggcgaggtggaattctggttctcgatgatcaagatcacgctgatcggcgcgatgatcgtcaccgccgtggtcatgatcgtgatcggctaccattacccggccgcgcggattcatggcgtggatcatgtgagcccggcgggccacgccggactcgacaacctgttctccggcttctcgttcgccccgaacggctggatggccttcctcatgagcttccagatggtgttcttcgcctatgagctgctcgagttcgtgggcgtcaccgtctccgagaccaagaatcctcgtgaggtgctgcccaaagccgtcaacgagatcatcgtgcgcgtgctcatcttctacgtgggcgcgctcgtggccatcatgtgcatcgtgccgtggacctcgttcaagccgaacgaggacggctccttcgcctccccgttcatcatggtgttccagtatgccggtttgaactgggcgtccgccctggtgttcttcgtggtgatcaccgccgcgtcctcgtcgctcaattcgctgttgtattccgccggccgccacctgtaccagctgtccgaggtgtcgccgaacccgatgctgaacaagctcggcaaggtgtccgaccgcaaggtgccggcccgcgccatcctggtgtccgcggcgctgatcctgctgtcgccgatcgtcaacgccatccccggcatctcgggggcgtttgtgctgttctcgtccgccagctccgcggtgttcctgttcatctacatcctgacgctgctggcgcatcgcaggtaccgccgttccgccgatttcatcgcggacgggttcgtcatgcccgcgtggaaggtgctcaacacggtggcgatcgtgttcttcgtgttcatctacctgacgttgttccttgcggacgatacgcgcaattccgcgattgccggcctggtgtggcttgtgggcttcggtggattctctatgctgcgcgaacgctaccgtagccgcgatttgaaggccgcactggaacacaaggagtgattggacgggctgattggctggcggctattagttgggtggctgttggctgttggcggctgactggctagcggccgatagccaatgaccgggctgatcgtcagccaatcggctgcctataggtctcattgatacattcggtcatccgattagtgcatttgcgcggacaattagtgcattcgatcatcggattagtacatcagtgtgcaattattagtacaattagccgcctaattagtacattaggacataaaacaatgtcctaatgtactaattagatgctaaaatacgataagtgccatgtcctaatgtatgaattatcgctatgaagggcggaatgcgatgatgcaggatgaacttatgcaagtgctgcaggccggtgaatcatctatggtcgagttcaagcgctgcagcgaattgcctcatacggatacttttgagactgtatgctcattcgccaatcgttctggtggcagcatttatcttggcgttgacgatgacggtcaagtgctcggcgtcgattctaagcgcgttagtgagatagagcgcaacgttgtcaacgtagtgtctaatcgtaagatgttcgaaccggctccaatggtggaaacggaacatatcgagtacgacgaacggattattgttcgtatttgggtagctccgagttcttcggttgtgcggttcaagggcgcagtgtttgatcgcattgctgatgtggatacacacatcgaaagcgatatccagattagtcaaatgtatattcgcaagcagaactactattccgaacggcgaattttccgttacgtgactccgtttgatttgcgtcctgagctgattgcgcgaatgcggcagctggcggtcgctcagcgagctgggcacccttggggaactatgtctgacgaagaactgttccgcagcgccaagctatacgatcgtgattacacgaccggcgaagagggctttaatcttgctgcagtgctgctcttgggcaaggatgaagtcatttcctcggtttgcccagcgtatattactgatgccgtggttcggcgagacaatattgaccgatacgatgaccgacttatggtgcggaccaacttgttcgattcgtacgagcaactccgtgaatttactgagcggaatctgcctgaccgctttgtgttaaagggcgataagcgagtgagcccgcgtacgatgatcgcccgtgaattggtggcaaacagcctcatgcatcgggagtattccagtccggtggtggcgcgtgtcaccattgataatgaatccatccggacggttaatgcttcgcgctcattctttgaaggtcgaatgaagctgggcgagttcacgccaatgccaaagaatccgattatcgctaatgtgtttgtgcagaccggcatagccgagcagctgggtagcggactgcggaatctgataagagcgtcccggcaatatactgagcgagagcctgagttccgcgatggtgacatattcgaggcgacgattcctattgttcctgcgctgaagaccgtggatggttctggttttgctagcgtgagatctgtagttgagaaagatgccgaagagggtgcgaggctcattggcggggaacgtgtggatggtaagaaagcagatgcaaccgcatcgggtgaaattgattcgcgggcagcgatgctgtcggcgatgaatcgacgcttgacagaggttgactatgtgactgtacctgaactcgccaagataacagagctcgataacagaacagtccgtaaattcctaaacggtttagttgcgcaaggaaagctgattgctgaaggcaacacgcgtggtcggcgttatcggaagggatagcgggcgcgatatctcgatgcagtgggattcacttaagggctacggcaaatatgattcgtagcgattgggccagcgcaattcgaatggctcatgactttgtgcgtcgtttgtggtctctgaagttgtttgctgggtgacggttttgtgataaaatcgctcatatcaaaatgtttgcgtaaacattttggctgcgccgaaagaaggagtcgacgtaggtcatgtatcaggcaaagaggccggcgcagtgaagcaaaggccgatttttccggtataaggcggatagcaggaacactaaggagaccaatgaaggtactgagcaaatcgcttgctgcaatggttgcggcggcaacactagtgggaggaggggcgtttgcggttgccggcactgcgtatgcggctgataacgatgccattaccgtgaccccgaacccgtggtatgccaacagtttcgatggctggggcacctcgctggcctggttcgccaacgccaccggcagcctcggcgaggaatcggccatcaccaccaatctcggcgatgacgcttccaaggctaaggctgtggaatacggcaagtagctgcgcgaacagttctaccagtccatcttcggtgatgaaggactggacctgaacatggcccgctacaacgtgggcggcggcaatgcctccgatgttgcctacggctacccattcatgcgccaaggcgctgccgtgcctggcacgtggaaagatgacgccaccggctccggcacgtatggcaatggcgtaaccaccaagcaggccgacaaagacaagctggctgcggcattcgacccgactgacgacaaccagtatgacttctccaagtccgccgcccaagactggtggattgagcgcggtgccaccggcgataaccccgacatcaccgatgtagaggccttcgccaactccgctccgtggttcctgaccaacagcggttacgccactggtggacgcaactccggtagcaataatcttgcaaaccctgagaaattcgctcagtacatggccaagaacgtcgagcacctcgaaagccttggcgcaaacgttgacacggtcgagccgttcaacgagtccgagaccagttactggggcactccgggcgacatggcttcgaagtacaccgatgagagcgatgacaacaccaagctcattaacaactactgggataagtactactccgacaaagataagtccgtcaccccatactctaacgcgctgaagaagccgcaggagggtatgcatgtcagcaacgcccagcagcagcagacggcaagaagctgtcgatgagcgaggtggacggctcctggcagtctggctcctacaacccgtacggtttcgacaacgcgctgggcatgatgagcaagatcagctccaacgtcacccgcctgcagtccaaggacttc

SEQ ID NO: 619 - DNA, 13115 bp, Unknown
  R14_15m  MAG No. k141_5567
ccggcttcagcggaaatatgttctgccatggcccatctccttaactcttcccggctcacgccgtcattggtcaattacgccgaggagcttcaataaaagaaccccctacaagaaactaagcatactcccacattctgttcagccaaagcccctgtcattgtcaagaaagggaacaaggacgagcagcagatgcccaggcccggcaaaccagataccggaccggacatgacgaggcccccaacgatgccgtacagactgtacagatggcgtgcggcatactaaaccggcggcgtccagcccagctgctcgcgccagccatcaggcgggaacgggtccgtgttccacgcgccagtgcccggaacatcattgagcagtatcccccgatccgggccgaacagccaatccgcaagccccgcacggcaacgggccgcgcgaaacccgacataatccatcgcagacggatccaaccccgccacaccaccgcgcacccggtcgaacagcatatcgcgatgttcctgcaataacggcacatacttggggttcgtggcatcggacgcacggaacacggactggcagaacgtacgattgcgatccgatatgctggagctgatcatcgattcggcccacccatgcagaccgaccgtgaaccactggtccaacagccagaaagcacccagatcacgcgcgatcccatccaacggcgtggcacagggcaacttccgctcccacttcagcaatgacctgtacgtgcgccgggcacccaccggcatcaacagcgaatccggccgatcgtaacaataaatacgagacggaccatacttgaaaatatgacgcgtgggccctgacgacctctcaaagaacggcatgacaccaccatacgaccagcatcgccgcgtacacaatacacatcacacgcggccggcaagaaaaccgcacaactcctgcgccaccggtagcatctgcgactccaaaccggggttcatgaaacggtcgtagatattccacctatcgcacagggacacccacagatacgcccgccccgaagcaacaatcacattggggcgcaacggatgagcggacaatacctgcaacacattctgcggcggccccaccaactgtggccgaaccgcatgccccaacaaatcgcttaccgagcaccacgcataccccctgcgaacgagccggcacaggcaacaccaccacctgcatataccgcatggcgtaattactcaaaaagccattattgtcatacacattcagcgtgaacgtcagccacggtcccttgctgtagaacctgttcacccgcatattacgcacggcttcgccacgaagcaccaccgtgcttccagcatcgacggtccgtttggcctgccaatcacgcgcatggaccgaatacgtgaccgaagaaactccgggagccggctcataacggatctcaaccagcacaggaaccccgaaaccacggaaaaaacccaacacatcatcgcaatgcaaacgcacgccaccacgaacgacgcgatgacgccgttgcgataccaataccgccacgtcggccacatgcgctgcctgacacggaccatacgccagccgagcaacgaaccagccaccacgaacacgcaccagacaacaatgccgtaccggaaaaccctacccacccagaaaggaaaaccagatttatcagcattcagcagccacagcacgccgacgaacaccacggcctccagcatgcaccacggccaatccaactgccgacgaacaaccgcaccggcaacagcatccacacgatcccacatcatcaaccttctctcatcaaaaaccgcttcgtaaggcaaccatacagtcagcagtacggacaacaagccggctatcacacgtaccagcacagctcctgtgccacacaagcagcatctgcgactccagcgccaggggccatgtaccgcgaatcattgtcgcacacattgatcggcgtccacaggcaagccaggccattcgtcaccttcatgctgtcatgatttccgtggaaggccggggtgagcgctgcagaagcgcagacgatggccagtggggtctgttcgtccgtccgccatggacagtggccggccgaatacagcctcatgcctgtgggacggcacgcggatttggccggtttccgcgcggcgtcccgcaggaacgtgggatggtagagaaatcaatcgtttgacgttcgtggcgttccacactatcaaccgccagaaccgcgcaatcacgccaatccccgttacggaccataatcatcccccgggctctctgcgggacggcagacgaaaaaccgcgaaatccgcgcgtcgtcccgcacttcgcccggtccacgaacaggacaagcatcaccgatagaccgaacacacatctacagccgcgacaagaaccccaacagctagccgcccgccccggatatcgccgtccaatagtaaatcgagcccaaaacgcaaacccaaagcactgactcagataataaaactcggattttccaccacagacagcgagaaactctcccctataccaagtagcgtacgtgccaccttgctcgatagacgaacaatgagaagtatcggttaacgggcatgccgggcaggtcgatgggctctggcgcgggaacgaagacggcgtaccagcacgaatgggccggcaaacgtgatcgtatacaacacgacggcgaggaacacgctgagccatgcggtgaacatgcccaacggcatctcctctaccggagtggtctcggctatgcatgcaacgatctatcactccgatgttgtggtcagtatgcgcggcagttgttcgtcacggttgaggaaagaacgcgtttggcaacgaagtagcgtacgccggccttcctcagtgcgggtgtataccatggtgcaatgcgtcaggcagcggtccaactgccggcgcagtatttcggcgtcctgctggcggcgggcaaatatggacgggaatgggaagcttacaccgtacgtgcgcacgccccattccttgccgatgatgacatatcgcggattgttgatgggcgcgagtagctccttcataacgccggcgaacagcacctgctcgcgccgcgaaccaccaatcagcatggcacgcaacgccgtgaatctgcgacgtgtctggcggatcgaggaagtcactcacctctttgcctaccgcgttggtttctaggcgctcaggttccgcagtcgccaaatgccagacattggccaccttatcggggtctgcggccacgctgcggttggcggccatgctgtatgcttcactgcatcagtgtaaggcatgaatcaataggttttgagccccagatcgatggtgagaatgatgccggcgattacggcggcggcgcgcatgatgtttgcgggaatcttgcgggtgatgggcggggcgatgtacccgccgatgaagcagccgatgcacagcatgatggcggccggccaatcgaccgcgccttggatgatgaataccactgaggcgctgatgttcgcgcctgtgccgatcagggttttcaatgcattgatcttgtggaatggcccgattttggcggcatcaagcatggcgagagccagggtgccggcgcccgcgccgaagtagccggagtagatggcgactgccaccacgcccagccatacccaccaggaatcctggctcatgggctgcacgagttgttccggcgggcggtgaggtgcggtaggggtggttgcgcgcttggcggcatcagtggcatcggtggcttcagtggcttcgatgtgcttgagttgcgcggtggcatccgcggcggcctgcttggcctgcatgcggccgcgcggattgatggcgatgatcagcgagctcagcaaaatcagcactggtgcggcgaattcaaagacactcgggtcgagtttgagcaacagaaacgcaccggccaccccgccgaacgcgccaatgaccacatacgtaatggagcgtaccgcttggcctttgagttctttgcgcgcgcccatcacgccaccgatgcccgtgccgaccacgccaacggtgttagaagcgtttgccaatacaggcggaatgccgaacgcgagcaaggccgggtatgagaccagtgacgatgcgcctaccgcatagcccacgaatcctgcgccgattccggccaacagaatcagtagcaatgaagttatggaaaagcccgcaatcattccccgtatccttgtcgctcatcgaccggcacattgccggccttgagcgagaatacgctgttgaggattggttgcgggttttatgttggaatgtggacgtagctcctcgcggaagcgattccctcagtcgcctgaggcgacaactcccctcgcacccgaggggagccagaaggaaatcagagcgcttcgttgtattcgcgaaccttgagggtgcggtgggaggatgccacgttttcgacgatcagacgcttcagggcgttgtcggcggcaatgtgctcgtccagccaggcgtcaccgagcttgaccagcgtggcgggatcggcgtaacccgggtacaggccgttgagcaaagcctcggccatgtgataggtcttgttggcccagacccagtccacagtctcgaagtacttggcggcgaacggctcggccagatcggggcgcggggtggcggagaagccacgggccacggcttcgagctgggagttggtcagctcgtcgttgtggagtgcctgatcccaagcccattccttggcttgcgtcgtggccatggaggcgcgggcgccgtaggcgaactcgcggttttccgtggtctccttcttggcgagctgcgcgtccacgtcgtcgttggtcatctcgttgacggaggtgagcgcttggacgatggtccacgtgaagttgttgtcgatttcgaggccttcaagacgcacggtgccgtccagcagaccgtgtgcgttggcggcgaatgcggcatcgccctcctcgccatagcccaggtaggcggtggcgagctggaactgggtgtccgagccggcttcggcggcgttggccagggtccacagctcggcggccacgtggcgcagcacatcgtcgcggcgggctggcgccacgtagtggtgggcggtggtgctcatgcaggccagcgcgtaacggaaggtggtggattcggtttccgtggccagaagacgcagggtcatgtccacgaagcgttcggccgggaattcgccgtcacgggtcatatcccagaaggcgagccaggtcacggcgcgggccagggcatcgtcgaaacgatgcaggttggcttcggcgaatgcctgggattcggcgtcgaaacgaatcttggtgtaggtcaggtcatcgtcgttgaccagcacgaatgccgggcgcggcttgcctgccgcggcctcgacgatggtggtttcgccatccacgtcgagttcgaactgctcggtgcgcacgatcttgccggtttcggcgtcttcgttgtagaagccgacggccaggcgatgcggacgcagcaccgggtgttcggccggcgcgctctgggtgagcttcaattcggcgatggtgccgtccgcgtttacggtcaggccggtggcgatcgtgttgatgccggattcctccagccacttggcgctccaggccttgagatcgcggccggaggtcttctccagttcgctcagcaggtcggccagggtggcgttggagtaggcgtggcggttcaggtagttgtggataccttcgaagaactgcgtgcggcccacgtagaatgccagctgcttcagcacggaggcgcccttggcgtaggtgatgccgtcgaagttgacgtaggtgtcgttgaggtcgttgatcggggcgacgatcgggtgcgtggtgggcagctgatcctggcgcaacgcccagctcttctcaccggagcagaaggtggcccaggcgtcatgccattcggtggcttcggcagtggccagcgtggaggtgaattcggcgaaggactcgttgagccacaggtcgttccaccacctcatggtcacatagtcgccgaaccacatgtgggccagctcgtgcagcacggtcaccacgcggcgctcggccagcgcgtcggtcaccttggactcgaacacgtaggagtcacggatggtgaccatgccgatgttctccatagcgcccgcgttgtattcgggaacgtagatctggtcgaacttggcgtacgggtagggcacgccccaggtcttggcgtagaacgcgaagcccttcttggtgatgtcgaacaggtagtcgacgtccttcgcgaaggccttggccaacgactgtcggcagtactgggccatcggcacggtgcgaccgtcttcgttcaggtattcggtgtgccattcggcgtacgggccggcgcagatggcggtcaggtaggagctcatcaccggggtcggctcgaagtcccacagacgggtgctttcgttcggcttgtcgccgagggtgccgtcgagggtttcgcgcggatcgtcctcgatggtggcaaccggcatgttggaggtgacgatccagctggcgggagcgagcaccttgaaatcgaaggtggccttcaggtcaggctggtcgaacacggcgtagacgcggcgcgcgtccggcacctcgaactgggagtacaggtagatgttgccatcggacgggtcgaccgagcggtgcaggccctcgccggtgttggagtaacggcacttggcttcgacggtgacctcgttcttctccttgaggtcggtcagttcgatgcggttgtcctggaaggccacggctgggtccagggacttgccgttgaggtcgatggatgtcacttcgtcggcaatcaggtcgaggaaggtcgacgaaccaggcttcgcgttgaagcagatgagcgacttggaaccgaagttcttcgcgccgaccgtcaggtcaaggtcgacgtgataatgaatcggcgcttcgataacggccttacgttcttcggcttcaatacgagtgagattagaaccgggcatgacttcaattactccttacggtcgtccctggataatccggactacttggtttctacggtttcgacgtcctgggcgatgtcggccacgacgggcacgatcatcggcttgcggtgcagctggcgcgcaacccagctgccgagcgtgcggcgcatggtctgctgcagcttgtaggtgtcacgcgcgccctgcatcatctggtcgttgagctgttcgacgatctggtgacgcaccttgtcgaactcgctttcgtcctcggccacggcgttcaggtagatcttcgggccggtgacgacctcgtggttgtcggtgtcgaccaccacgaacgcggatacgaagccctcggtgccgagaatgcggcgcttttccagctcgtcatcggtcagctcgccgacggaatcgccatcgacgtacacgtaaccgcacggcacggagccgacgaccgcggccttgccgtgatacaggtcgaccacgtcgccgtcttcggccaagaccacgttctgcgggtccacgccggtcttgacggcgatcaggccgttggccaccaggtgacggttctcgccgtggatcggcatggcgcacttgggcttgacgatgttgtacatgtacagcagttcgccctcgttgcagtggccggacacatgcacggcggcgttgtcgcggttgacgaccttggcgccgagctgcacgagcttgttgatcaccttgtagacgccgtgctcattgcccggaatcagggagctggcgagaatcacggtgtcgaactcgttgatgtggatgtcgcggtggttgccgtcggcgatgcggccgagtgcggccatcggttcgccctgggaaccggtgcacatgaagacgagcttgtcgtcctgaatgtcgttggcctgcttcaggtccacgacggtgccttcggggatgtgcaggtagccgaggtcggcggcgatggacatgttgcgcaccatcgaacggccgacgaacacgaccttgcggccgtacttgtgggcggcgtccaccacctgctgcacacggtgcacgtgggaggagaagctggcgacgatgatcttgcgggtggcctgggcgaacgcttggtcaagggccgggccgatggaggtctcgggcttgacgaagccgggcacctcggcgttggtggagtccatcatcagcaggtccacgcccttttcgccgatcttgccgaattcgacgaggtcggtgatgcggtggtcgagcggcagctggtcgagcttgatatcgcccgtgtcgatcagggagccggccggggtcttgacgtagacggccagggcgtccgggatggagtgggtgacgttgacgaattcgaggtcgaaggggcccaccttgagcttctcacggccggcaacctcaaccttggtggggttctggtggtgttccttgcacttggcgtccacgaaggcgagggtcagcttggagccgatcagcgggatgtccggacgcagcttgagcaggtagggcacgccgccgatgtggtcctcgtggccgtgggtgagcaccagggcgtcgaccttgtcgagacggttcttgatgtagctgaaatcgggcaggatgagatccacgcccggctgctcctcctcggggaagagcacgccgcagtcgatgagcagcaggtgaccgttgtattcgatcacgttcatgttgcggccgatttcgcccaagccgccgagcggcgtgatgcgcatggagcccttgcggtacttcggcggggcgatcagcacggcatcctgctggggtgcggtggcctgccgggtggcgttgatcttacgggacggcgtacggctgttggatccgttggcgttgcggccgcgcgcggaaccgcgacggcgagaattcgtgttcttgcttgttttcttttgttcttgtgccataacctttttgggatttctgttgtggtgcctctgctctgtcatgcaggggcggcgggctggcaacccgtatgcagcgtttcgggcttacagcagtccggcagcgcgcatgccctcttcagccttgtcaagctgagtggcgtcgggaccgatgttcggcagacgcatggtggtggaggggataacgcccttgaccttgagcgcagccttggccatgacggcctgatagccgtcgccattcaacgcgtggacaaggggggcgagctggttggcgaggcgacgggcggtggtgatatcgccgcgatcgaatgcctggacaagctgctgcatggggttggaggcgacgtgggcaatcaccgaaatgatgccgacggcgccgatggagaggaacggcaggaacaggccgtcatcgccggaataccaggcgaggccggtgcgctgctgcttctccactgcggctgcaagatcgccggtggcgtccttgacagccttgacgtgttcaagttcggccagtcggtcgtaggtttcgaccttgaccttcaagccggtacggccgggaacatcgtagacgatgatcggcttttcggcggattcgtcgacggccttgtagtggccgacgataccgtcctgcgaggggcgggaatagtaaggcatgacgacgagcaccgcgtcggcgcccgcttcctgagtctgttcgaccatacgcacggtgtgtgcggtgtcgttggagccggcgccggaaatcaccggaacgtcgacgacctccttgacggccctgaccagctcgaccttctcatccatatgggtgacgggcgattcaccggtggtgccattgaccaccagaccatccgcgccatcggcgacgaggtatttggcgagcttctgcgcggcggcgaaatcgacgctgccgtcggatttcatcggggtgaccatagccggcagaatgcggccgaaaggtgctggctcaagaaggtgcatgtcatgctcgctcatagtgttcaccgtacttcccattgtggactcttatactacgtaccttgattgttgctgaatgcgtggcattatggccggagccggtggcaatgccgtgatgcgcgtcccggcgcgcttccctgcctgaaatgcgggggcgactactggtcgactgcgggtcgattacaggtcgaggaagtggtcgaggccgatggtcaggccagccggagcgtcgccggcgagcttgcgcacggcaagcaggacgccgggcatgaagctggtgcggtcgaagctgtcggcccgaatggtcagctgctcgccggcgttgccgaagagcacttcctcgtgggcgttgaggccgcgcagacgcacggcgtgcacgtggatgccgtcgaccacctggccgcgtgagccgccatcggtttcggtggcgtccggcacgggggcgagtcctgcggccttgcgcgcttcggcgatgccgtgggcggtgtgaatggcggtgccggagggggcgtccaccttggtggggtggtgcagttcgatgacttcggcggattcgaagtatttcgcggccttggttgcaaagtagtcggccagtacggcggagatcgcgaaattaggtgcgatgaagaccttctgggtttcgggcttcgggccgttggcgatggcggatttgacctgggcgagtttctcgtcggtccaaccggtggtgccgaccaccacgtccacgccttggccgatcagggtcagcacgttgttcaggctgacggacggcacggtgaattcgacgaccacatcggtgttgtcggtggtgacctgggtcaggtcgtcgccggcatccaatgcgagcgccagctgcgtatcctcggcgttgttcaccgcttcgaccacgtgcgagcccatgcggccctttgctccgaccaccgaaaccttgatcatgtcttcttccctgtctacccgtacctgcccggcaatgtacccggaacgttttccaatcggcaatcagcctatcaccgccaagccctcacgccaatatcccgtccacagaatcgagctccctctgacaagccgaaccatgaagtcgagctccctctgatgagccgaaccgtgaagaaaacgccggaggcgtttttaggtgagggcgaacgacagtgagcaataattcagttggctgaaagccatcatctaattgcgttcgagctggccgcgaagcggactgagggagagacccccggcgaagccgccaaccatccatcaggcgtagcccgattccgtttcacccacgccgcttggccaaggcccatccggccaacgccaatggcacggacgccagcgtgaagatgaatggcagcatcatgcccacatgagggttggaggcgtcaagcacaatgccggccacggacgagccgatcgatgtgccgaccgtgcctgcggtggttacccagctcagtccttcggtcagggattccgccggcaccagatccttgacgatgaggttgccggtggcgaacgtcggcgagacggtcaggccggcgaggatttcgaagacgcccagcaggatgagattgtccattgacagccggaagaacacgtagccgacggtcagcagcgacaggaacatcaccatatgcgcccaatgggagcctttgagtcggcaagagccgaacaccagcgcgccgatgcacgagccgaccgcgaacatcgccaattgcagaccgaggaagggctcaagtcccatggatttcatggtggcggtgatggacacgtcgaaggacgtgaagctcatattgaacacgatgaacacggcgagcaacggcagtacgccggcatagagcaatacgctcttgggcttggcgccgctgcgtttgagctggcgcagggtcagctggtcggcatcttcgcttgcagcagggctgccgtcatcgtgcgcggccacggtgacctgttccacgataaccggtggctgggtggatttcagcgagaagaatatggtgccgccgataccgcatgccacggtgggcacgaacagttgggataccggatgcacggaggtggccagccaagccgccagaatcggccccagaataaagacgatctcgtcaatggcggcttccatggcgtaggccgtgttgagcagctgttcaccatcttccacaccgcgcaacgcataggaccagcgtgttcggaccaatgcgccgaatgagaactgcgtcagacccatgatgatggccaggacgaacagcagcggaatcggcacgcgcaccaacgccgcgaaggcgaaggcgagcatggccacgatctgcacggcgagcgcaagccggcccacgcgggcttggccgaaacggtcgaaggcgcgggcgtagaacggggtgacgcagctcatggccagcacataggcggcgctcatggtgccggcgatggtccaattgtcgtagagatggttgagcgccagaacgatgccgagactcatcatggagatcggcaatcgtgccaccgcgccggacaggcagaacgccttggctccgggcagcatgaacaggcgctggtagggcgagtgggcagcggacgacttcgaaaccgcgcgagtcgtggacacaataactccttactggtgcgttgtccggcacgtgcgcccgcccacacgtgccatccgagggtagcggttccctagcaacgtcacgcggtgcgtttcaaccgcggaccggtacgtggccagtcgtcttcatcgtcggagatgccttgcgatgcataaggtctctccaccggtgaaggccgtccgatgctgtacaggtcatgagcctttgggctcagtcgttgtcagattgttcgggaatgccggagctcaactcggtaaggatttcctgtttggttttcgcgcgggcgtgaagctcgcgcaagccctcgtcgggctcactgacatagtagagagtggcgtcgatactgtccaattccacaccttcgaccgctgccagcagcagtcggtacatgtcgagctgggcaagtttgcgggtgatgtcgtctggcttggtgggccgacgaccggttttccagtcgaccacggtaaagcgtgcggtggtgctggacgggtcaagtccaccgatgaataccgcatcgagtttgccattgaccaggcccacgcccggcacgtccacgacgatggcacgctccgtccacgccgggatgcgcttggcccacgatgattcggccagtctgcgctgccacgccaccagcttggactcggtggcattgtcgctgcttatggaagtggcgga

SEQ ID NO: 620 - DNA, 8131 bp, Unknown
  R14_15m  MAG No. k141_6322
aaaagaccctctgcggtggaatgaatgcagagggtctcgtggagctgacggtagtcgaaaccgcgacctcttcgatgcgaacgaagcgctctaccaactgagctacagccccttggatgttactttgctccgcaaagcaactcgcaacaatatagtacggagtgcggtcaaacgcaatttgacgccgaagtgtcgcacacatgtcggcacggtaacgtttcggtgcaggcacccggatcaagcgccgacgcgccgcacgcactacgatggtggcatgactggcccgacacaacgaccgcacgaccgaccgccgcacgaccgaccgcacgtgcggctgaccgaccgtctgccgcacgtcgctgctttccccgaagcgctgggcaccgggttgctgctgcacaccgacgccccgctggcggacgggcttcacgaccggctcggcgcgttcatcgacacgtatgagcggacgctgtcccgattcagggacgattcgaccgtgagccggatgcgcacggccgcgcgcggcggcgtcttcgactttcccgactgggcatcgggcctgttcgacctgtacgacgccctgtactcgggcaccgacggggccatcgacccatgcgtgggcgaggatctgatccgactcggctacgacgccgtctattcgttcaccgtcgagcccgacgcccgcggcgggcgtctgggcgccatccacggccggcccacctgggacggcgacgtggagcgacatggcgccacactggtcacccggcgtcccgtcgcactggatttcggcgcgtgcggcaaaggatatctgctggacctgctcgcggggatgctgcgcggcgaccggaggcgaacgcgccagtcggcgcacgatgaccgccaatacgtcatcgacgccggcggcgacatgctcatacgcacggtcaagccgatcaccatcgcccttgaggacccgtccgacccctccaacgccgtgggattggccgaactcaaccggggcgcattctgcgcgagctcccccagccgccgccactggtccgacgccgccggccaccagctccaccatctgctcaacgccatcgacggtctgccggttgacgatgtagccgccacatgggtggccgtcatgccgcacgcagcatctttgagcaccgcactggccgacggactcgccactgctctgttcaccacctcggccacccagctacgcgctcatttccccttcgaatgcgccatcctcaacgccaatcgtgccgccgcccaatcccccaattttccgggcggttttttcacacactaatgtacgaaatcatcagtatcacatccagtggagcattccctcgggcggaccgatgggttgctcccttcagtcagctacgttgacggctcccctcggagaggggagccgagtatagctaatctgctaatccgctaacgcaggaaacaatccgtcagtcagcgagtgcgaactggctgttgtacaggtcagcgtagaagccgcccgcagccagcagctcgtcatgggtgccgcgctcgatcacgtcgccgtggttcatgacgagaatcatgtcggcgtcgcgaatcgtggagaggcgatgcgcgatcacaaagctcgtacggcccacggtcagcgcatccatggccttctggatcagctcttcagtacgggtgtcgaccgaggacgtggcctcgtcgagaatcaggatcggcgcatcctgtaccatcgcgcgggcgatggtgagcagctgcttctggccctgggagagcgacgacttgtcatcgagcacggtgtcgtagccgtccggcagcgaacggatgaagtggtcgaggcccacggccttgcacgcatcctcgatctgcttgtcggtcacgccgggcttggagtaggcgatgttctcgcgcacggttccgcggaacacccacgtatcctgcagcaccatggagaactggtcgtgcacgttccagcgcggcacggacttggtgtccacgccgtcaatcgcaatcgagccgccggaaatctcatagaagcgcatgagcaggttgaccatggtggtcttgccggcaccggtcgggccgacgatagcgaccttctgcccggccttgacggaggcggagaagtcgtggatgatcggcttgcctggttcgtaaccgaactgtacgtggctgaattccacgtcgcccttcacttcgtggccgttggtcccaagcaaagcggacttgccggattcgtcctccatctccggctcctcaaggaagccgaacacgcgttcggcggccgccgcgcaacgctgcaggttctggaaggcctgggcgaactgcgccaacggctgggtgaacagacggacatacatcatgaacgccacgatcacgccgaactcgatctgcccgtcgagcgcgagcgccgcgcccaccacgcacaccaccacgtagccgaagttgcccacgaaattcatgagcggcatcatcaggccggagaggaactgcgacttccagccggactcgtagaggtccgagttgtacttctcgaagcgacgaatcgaatcggcctcgccgttgtatgccttgacgatgaggtgaccggcgtacatctcctccacgtggccgttgacgtcacccagcgccatctgctgccgggcgaagtacttctgggaggacttcatgatggccatcatgatgatcaggccgatgaggctggcaccgatggcgcacagggtcatgatcacgttgttgtagaacatcatcaccagcgcgcccacgaacagcgtcaccgaggtaatcagcgagccgagcgactggcccagcgtctggccgatggcgtccacatcgttggtgatgcgcgacagcacgtcgccgtagctaaccttgtcgaagtatttgagcggcagtttgttgattttgaccgagatggactcgcgcagtcgctgggcggtgcgctgggtgacgttggccatcatccagctttgcacgtagccgagcacggcgtagcccacgtacagggccaccaaagtccaggcgatgtggcccaccgtgccgaaatctaccgagttcatcaccggtctgccgttaacgatggcgggcagacctttgacgatctcgttggtcatgtccttgagcttgtccgggccgacgatctggcagacggtgccggccgcgcccaggatgagcgcgatgatgatgacgggaagatagttgcggcagtagttcacgagtttgcccatgactttgccgaaatcatggggcttttcgacggcacgcctgccgcccattggtcctcttggcatttgttttactccttaaaagtccgtattgacctccctctgatgagggaggtggcgcgaagcgtcggagggagagaagccgtacgcgactacccctcagtcagctgtgctgttttattcgctcgcttatcagctcgtcttcgcctgggaacagcccactgggctgttccctttacggctcagcccctgacatggggagctaccgctgccgcccccccctacgccgtaagctccgactggctgagctgggattcggcgatctggcggtatacgtcgcagttgtcgagcagttccttgtgcgtgccctgacccacgaccttgccgtcgtcgagcacgacgatgcggtcggcgttcatgatggtgccgatgcgctgggccacgatgagcttggtggaatccttggcctcgcgggcgagcgcgtcgcgcacttcgcggtcggtcttgaagtcgagcgcggagaacgagtcgtcgaaaatcaggatttccgggtgacggtacaccgcgcgcgcaatcgacaggcgctgcttctggccgccggacacgttcgatccgccttgggcgatcgcggcggaatacccgccgtccatgcgcgccacgaactcgctggcctgcgccacgtcggcggcggccttgacgcgattcagctgctcggccggtatatcggcaccttccgcggcctcgccagcggcgatcaacgcggcctcgcgcttgcgcccggccggggtggaggtatcggccatctcgacctccgccgggtcgcccggctgatcgccgtagctcacgttggaggccacggtgcccttgaacagcacggactgctgcggcacgtagccgatcttgtcgcgcagggccttcaggtcgtagtcgcgcacgtccacgccgtcgaccaacacctggccttggctggtgtcatagaagcgcggcacgagattgataagagacgacttgccggagccggtggagccgatgaacgccaccgtctggccctgctcggcggtgaagttgatgccttccagcatcgcctcgcgcgaatccgggtaggtgaagctgacgttgcggaattccacggtgcccctctggccggttttggccacgtcggcggcggttttggtgccgttctcgacgattggctcagtgtcgagcacctccatgatgcgctgcgcggacacgtcggcgcgcggccagagcacgaacaccatgctcatgagcaggaagctcatgatgacctgcacggagtagttggagaacacgaccatgttggagaacacggtgagcttgtccttgagcccggcggcgtcgatgaggtaagcgccgatccagtagacggcgagcatcaggccgttcaggacggtgttcatcaacggcatcatgaacgccatgacgcggttggtgaacagctgggtctcggtgaggtccttgttggccttggtgaatttggcttcctggtagtcctcggcattgtaggcgcgcaccacgcgcaggccggtgaggttctcgcgggccacgaggttgatgttgtcggtcagggtctgcatgaccttgaacttcggcatgaccatggccatcatgacggtgatggacaccagcaggaccgccacggcgatgccggtggcgagcgtccattcgaagccttcgccggcgatcttgcacacggcccatacggccatgatcggcgacttgacgatgagctgcaggcccatggtgatgaacatctgcacctgcgtgacgtcgttggtggaacgggtgatgaggctggcggtggagaacttgctcatctcggccgggccgaaggactcgaccttgcggaattcgagcgagcgcagacgctgggtgaacgaggcggccacgcgcgcagcgatgtagccggtgatgatggcacacgccacggatccgagcgagatgagcagcatcttgccgcccgcgatccagatgtccttcatgtcgctgcccggcgtctcgaccagcgtggtgatgtctgacatatagtcgggcagtttcaggtcgaagtagacctgcccgacgatggtcaccagggcgatgagcatctgaccgatctccgctttggagaggtatttcatgatgcgaaacattggtttccccttgtgttggttgggttggttattggttattggcgattggttcttaagttggctgggttatcggtgattatcggttcacgatgtcttaatagtttccattgtttgattacttacactgtgagatattatacgcacttctgtatgttcgctgtgagcgtcctcaattacctttacctccctctgacgagggaggtgtcaccgcgcagcagtgacggagggagagacccgccagcgggaggaagctagtctcgctcagcctccgcgcgcttagctgccatgtgttcagccacgcgcttgtcccgctccacgaatgcctcacgcacttgttcagccgtcggccgaggccgccccggatggcaaatcgacatatatgtggtgaactcagacaccaggtcaacgaattcgcgcgtgcgccgctcccccatttgcgagaaaatccagcaaattgcggaacgcatttcctctatcatccgatgagactgctcgcgcccggaatcagtgagattcacgcgaataatgcgccgatccttggaatcaatgtcacgcgtgacccagccttttttctccagagacgacagcacagtggagatgcggccggaactggcctgcagcgccgatgccaattgcgacggcgtttgcgtccccttcatggacagctcccggagcacgaactgctcaccatgggctccacgagtgaattccctctgcatcgtcgaacgattgccccacacgctggcatacagttcactaactgcttcctgctcaaatcccataagagcaccatccattcccattcgccacacggcagagcgccgcaaacaccccaagaatatctcacaccgtaaacaattcattactagaaactatttttggaacgcataatgcacacactccacgctctttgatattctgaaagccgcatagatattcacttcggggcgtcgtctaagaatatttgctgggccaacggtagcgacgttggcattgtgctccatgaggtatctggtcgaaaaggcggacgaagacaggccagttgggcggagcgcgcccatacctcaaaaccattgcaattattggctttgaccattttcgtggagtcacgaaaatggtcatgaaaaacataaggacacacccatgaaccgcgacgaaatcacacgcaaaaccagcgaactcagcactatcgcacacaccaccgaggactccaaagttgagtattggtatgcacgcgagctaatgacctatatggggtacgacagatgggaaaacttcagcaaagctattacacgagccaagcaagcttgcgacaattccggcgtatccgttgaatcccatttccgtgacactacgcgagacgtgactctcggcagcggtgccacccgctccatcgcggacgtcaagctcacccgatacgcctgctatctcattgctcaaaacggtgatccaaagaaagaagaagtggcacttctccagagctattttgccgttcagactcgcaaaacggaaatcattgagcaacgcatgggagaaatcagccggctcgccggccgagaggcccttgccactgcagagaagaaactctatccgtatacccaaatcacacacaacaaaaccacacaagagcacatgtacacgcccaaccacgccgcagaacgccggcaaggatgtgatacaggccacagaaagcgttgtaccgcctaggcaatgcaacaattgtccgctatgctctgaaggcagatggcggcacggatgccatcccaaagagggggtatgaccatgattcggggtatgaacctatgcagcatcgccggctgcacgcacgaagcagaagaagcgggcatgtgcaacatgcatttcacatcggcgctggttcacggagcgctgcactacactgcggacggacgtccgtcgcactgctgagcgcaacaacaaagcaaaacaaccagtaacgctcaacggcttccacatgttcatgctctaattgcatgtacttgcagacacaatggccggtctgagccagctgccctcgcatggagcagctggctcagaccggccattattgttgctttgtactgtttgcactgtattgcgcctgcattgcgcaagctcgggcgcactcgggtgcactcgctgagtggcgtgaatcgcagattgctcaatagcaacgcaatccacgccactcagcagttgccatggttatgcgcggcgtttgcggatgacgagcaaggcaccagccgcagctgtcagcaccacaaccacgaccgcaatggcagccacggcaacacccgtattcgaaaggggcgcagcgccattagcagccggcttattcgtggcagtgttaccgggcttagcagtgttgccaggattgttggtatcgccgggcttctgctctccagggccgggagtgacctccgtggccgtgaccgtgacttcgaacgtcgcgttcacgccacgataagagacggtgatggtcttcgtgcctgcggtggcagaatcaaagccagtgaacttcagatcaccatcagttggatcaatcagcttgcgcagcgtttcagtatcgccgactttgtaaatggcggataccttcacatcggcagcgttgaacttatcgccgacctgataggaatccttggtcacttccacagcaagctcggccaactgaggcagttcgccgaatgtcactgtgtaggtttccgccgtgccatcctcagcagttacagtcaccgtggccacgccgctgttctcggtcgaagcctg

SEQ ID NO: 621 - DNA, 53408 bp, Unknown
  R14_15m  MAG No. k141_7005
gacaaggctgccgccgaggccgcctacaaggttgccgcccagaagctcgacaaggctgctggcgctggcgtgatccacaagaaccaggccgccaaccgcaagtccggcctcgctgttgcgatcaacgctctgtgagcataagcctcttaaggttttagcaagtcccgcaagtcatctggcttgcgggactttttatatctccgttcaaagaggtacattggcggtcttgcgaaatgacatctccgttcagaaaggtaccgaatccgagaaagcccaagtataaacgccgtcattgcaacgcttatactcgacgtttcgtgcttcaggcacctctttgaaagcagttgtcattttgcagaaggccaaatgtacctctttgaaggcagttagccctgaggcggtcttgaatcatcctgaggcttgtcttcttcgtccttggtggtatcgccgggatcgacggtatcggcgtgcggatggatgaccgggcgcttgagatatcggctttcgctgggcaggtagacgcgatgacgctcgacggctccgggcaaggtgacgttgaagccgaccgagagcaggcgcagcgccaccacgatgatgacgatcagcacgtcgagcagcatttccgagcacatgtcgaaccaaccgtagtgcacaccacgccatacaagcacggtcagaatgcaaccgatgaacgagggcacggcatagaggtgtttgtctcgaataatcattggcacatcgccgatgaagatgtcacgaatgaggccgccggccagtgctgtgaacatgccaaggaatacggctgtcatgcctgaggaaccgtaggccagagcttttgcggtgccgctgactgcgaatagtccgaggcccagagcatcgatgacagtcatcgtccatttgagtttggtgatctccgggtgggccaccaccgcgatgacgccagagaacagcgtggtgagcacatagcctttgtcggtgatgccgaccggcggcagggcaccgagcatcacgtcgcgcacaagaccgccgccgagtgcggtaagccatccgcacagcatgatggtgaagatgtcgtagcccttgcgaatggcggcaagtccgcccgacaatccccaacacaggattgctaaatactcgatgaccacaaaaacgatgttgttctccaacaccacctgcatgagccgctcccctctggtaccgcttcggttcgtctcagtccgtcttcgttctgttcccgttcatccttattcggcgctacagcccgtcgtacccgagcctacaacaggccttgcctgacgcaattggactagagaacaaaccgaataaatgctattgccggttcgactccacacttttttcttacagcgtcgccagcgcgccaaactttgagcagccaccgacgttagtccttctcatttgtcggaggttggccaaagtttggcacggcaccgacgatcacgcgctccagtgtcgttgccgtgccaacttatgtacagctaacgacgctaagcccctttttaccgtcgtttgatcgccagaacttgacccgttaacgacgctaaggtgtctcagcgacgtcagcagtccaaaccttgaaccattactgacattaaacatcccccagcgtcgccagaagctcatgtcttgtctcaccaccgacgcaacgccgtcgctgcctctgccaccggcttcagtttcgagcaatgctcgaagcctgacggcaaacggtaggctgaagcatagtattccgtcatgtcactcatcttgctcatagggtttgctcctgttctcatctggatgaaccataaccaacccccgcaacgtgcagaagacctaaatcatattatttgttgcgaaatgttgctaaatccatctgtacccctctagccaagaacatttccaatacgccaagaccccttggaattgttgacattctaaggggtcttagtcggaaacaaaaggtgctagttcagcacaccttccacatccagttgtgcgggtcctcgacttcgccgagctggatgccgagcagctcgtcgcgcagttcgcaggtgagcttgccggagccgccgtcggcgacggtgacgtcgaacttctcggacttgaagcgaccgatcggggtgatgatggcggcggtaccgcaagcgaacacctcggtgacttcaccggacttgatgtcctcgagcagctggtcgagggcgatcatggtctcgaccacgtcgtggcccttgtcctgcagcagctgaatcagagagcgacgggtcacgcccggcagaatgttgccggtcagggacggggtctccacgtggccatccttgtgcacggccatcatgttcatgccaccgagctcttcaaggtaggtcttagtggcggcgtccacaaagcacacctgctcgcagccattctcaacacccttgtactcgccgagcagggaggcggcgtagttgccgccgcacttggcgaaaccagtgccgccagggccggtgcggaaccacttgtcttcaacccagatgctcaccggcttgacgccgcccgggaagtacgggccggacggagaggcgatcacgcagtagtcgacctcctgcggggcgcgcacgccgaggaacggctcggaagcgaacatgaacggacgcatgtacagcgtgtactcgcggcgggacggcacccagttggcgtcgcgcttgaccagcgcggccacggaaccgaggaagtcgtcaatcggcagctcaggcaggtacagacgcttggcggagttctggaaacgctcggcgttcgcatccgggcggaacagccaggtggagccgtcggcatgacggtaagccttgaggccctcgaagcactcctgggcgtagtgcagcacggaagcacccgggtccatcttgagcggtgcgtacggttcgacgcggcggtcggaccagccttcgcccttggtccaagtcatgtgggtcatgttgtcggagaacacctggccgaaagccggcttgtcgatgagggactggcgcttctcatcggatgcggggttgtcgttcggcagtacggtgaacggttcggtgagcttgtcgagtgctgccggatcgtggtgcgtgttttcagtcatcactagctacttcttcttgactttggcggcccgaaagccaccatatggggtgtgtgctgtgcgcttgtggcgcgaactctgttgcatacttttgcacacccatgtgttactcgtgtggcagagttcacatggtgaaaaacgaagaagcccacaccgttctcaacggctgcgggcttccacgtttcagttatgttctgaattgttcgctatcgaagcgaccgactcacttggcgtcggcagccggagcagcggcggcgtcagccggggcggcagcagcttccggagcggtggtggactcggtggcatcctccggcacctcgacggtgacgacggactcttccggatcctcgacgtccagctcgacgccctcaggcaggacgacatccttggcgaacaccttggtgccgtcggtcaggccttcgacgctgaccacgatcttctcgggcaggttggtgacgtcggcgcggaccttgagctcctgaatgtcgacgaacgccacggcagcacccttcggggtgccttccacgaacaccggcacctcgacgtcgatcttctcgccggccttgacctcgaggaagtcgatgtgctcgatgatgcgcttgaccgggttcttctgcacgtccttgacgacggccatcttggtgttgccgtcgaaggcgatggtgaacagggcgttggtgtgacgcagggccagggtggtctcgcgcatcggcaaggtcacgaaggcgggctcttcgccgccggcgtagatggtggccggaatcttgttggcaacgcgcagacgacgagcaacgcccttgccgaactcggaacgggcctcgccctcaagcttaatggtggtagccataatggatactccttgtatcttcgtttcgtactgtctcgctcagacgccacgacgcgccgaaagacaccctacaaggagtgaaatacgccgagtcgataacggaatctgtgtcatgtgtcagcatgcacacttccctcgccaaagcaacaattgtcaagtatacgccaaccccggactttgcgtaatgatgcttcgatgacactgcatataggccgtcccagctacgtcaacgtacggtttccgcgaaataatccctaactttgtgaagaacgtacgcttacccgttctcatcatacggttttcacgaaatcgttcgccatttcgtgaaaaacgtacgctcagcgacactcagtgtacggtctttcacgaagttggggatgatttcgataataacgtacgatggtgagtaccatatcgggaggttgatatgactcgttcggacgacgtcatcaatgaggatggccatgacgtcatcgccgcacacactcgcgttgtcaggggcatggctgcggcacttgccgcgatagccgccacaggagccggcgtcacagccgcggccgccaacgtcatgttcatgttcgcgctggacaccaaggccaaacgttcgatgttcaacatgccgcacgaggagacgccgaaaggcatcgaattcgacatgtccgagcagcttgaggccggccggtggttcgaggaggccaagcaatcggtcacgctgcgcagccatgatggattgaaactccacggctggctgttggacccggattgttccgacccacagccgcatctatacgcgatctgctgccatggctataccggagagcccgcggaaatggccaaatgggcgcatcgctatgcgcaactcggttttacggtcctgctacccgcgcagcgcgcccatgaattgagcgaagggcgttacgtgggtatgggattgctggaaagcgacgatctgttgggctgggtttcgctgatcaccgcagctgatccggatgcacgcattctgttgcatggcaattcgatgggcgccgccacggtgatgatggcggccggcgatgcgcgactcccccgcaacgtcgtcgccgcgatttccgattgcggatacagttccgtggtctcacagtttacggataatgccgaggcgatgttccatttgccgcactcgttggccgtgctgctggtcaaagtggccagtcatgtgtctaaacgcaaggctggataccggtttgaggacgcctcctgtgtgaaggcattacggcacgcgactattccgatgatgttcattcacggcggagcggatacttttgtcaatccgaagtatctggacatcaattacaacgcctgcgccagcatcgaccgcgagaagctgctgattcccggcgccgaccacacgatgagcgccagcaccgatccggaccgctattggcgtcgcgttaacagctttgttaagcgggtgtttgggttgtagtagatatagagcttggctcccctctgtgaggggagccaagaatggttacgcgagcagttccttgacggcggcgatgacggactgcagactcttcttcgcgtcaccgaacagcatctgggtgttgtcctcgaagtagagctcgttctggataccggcgtagcccatgccgcggccacgcttcatgaccacgacgttctgggacttgtcgacgtcgagaatcggcataccggaaaccggggtgccaggacggcgagcggccgggttggtcacatcgttggcgccgacgaccagagccacgttggcctgcgggaactgcgggttgatctcatcgagatccacgagctcctcgtagggcacgttggcctcggccagcagcacgttcatgtggccaggcatacggcctgcgaccgggtgaatggcgtaggagacttccacgccatggcccttgagcagttcgccgaggtcagcgagctcgcgctgggcctgagcctgagccagaccgaagccgggcacgaagatgaccttctgcgcgtagacgagctgaacggccagatcgtccggcgtggtctccttcatggtgccttccggaccgtcgccagcagcggcggcgtcagcaccaccgccgaagccaccggccaagacggagagcagcggacggttcatggcctgagccatgaggatggacagggtcacacctgcggaaccgacgagtgcgccggccacgatcagggcaacgttgtcaatcgccagaccggacatagccacagccgtaccggtgcaggcgttgagcacagagatgacgacgggcatatcggcgccgccgattggaatcacgaagaccaagccgtagcacagggcgaacacggtggtcagaatcgaccacagcagacgctgttcgggctggacgcacagcatgaccagcgaggcgacggacagcacggcgaacagaatgttccatacgcccttgcccggcaggttcagcttcttgacccacttgatgccctgtagcttgccggcagcgatgagcgagccggtgaaggtcacagaaccaatgagaataccgagaccagcggtgatgagcaccacgatgtccggggtgccttccttggtcaggatgtcgttcagggccacgagtgcggcagcgccaccacccacggtgttgaacacggaaaccagctgcggcatgtcggtcatcttcaccttcttggcggagacgacaccggccacggcaccgatcaggatgccgacgaccagcaccaccacggcgacaatgttcacgaagcccttggcgaaaagcacgatgaacgccatgagcacggccacgaccatgccgaacgcggagatctggttacccttgcgggcggtcttcggcgaattcatgaaatgcagaccgaccacaaacaggacggcagagaacaggtagacgaaccatgcgacgatgtcgatggcgccaacggttgcggaggtcattacttcgactcccccttcttctcgttcttgctggacttgaacatctcaagcatgcggtcggtgaccacgtagccaccaacgacgttcatggtgcccagcacggcggccaggaagatgaacacgtaggccagtgggctattggcttcggctgccacgatcacaacgccgacgatgacgatgccgtggatggagttcgcgccggacataagcggcgtgtgcagggtggcgggcaccttgccgatgacctcgataccgatgagcagcgcgaggacgaacagggtaatggaaacgacgagagtaggcatggtattccttcttccttacttctcggacttctcggcatcggcagcagctgccggggcggcggcacgaccggcaaccaccagcgcgtcgtcgagttcttcggtgagatcctggccgagcttgccgtcacgcacgaagtgcacgaggatgtcggccacgttgcgcgaaagcaagttggatgcggtcgtggagacgccggaggccaggtagggagcgccgatcagcttgacgccgccctcggtgatctgctcgccgacggcggagccctcgacgttgccgccgaggtcggatgcagcgcagtccacgatcacggcaccacgcttgagacccttgacgccggctgcggtgagcagcaccgggggcttgcggcccgggaccttggcggtggtgatgatgatgtcaaagccggcggccttctcatcaacggcagcctgctgctgagcctgttcttcggcgctcagcgcgcgggcataaccgccctcgccctggcccttggagaagtcaagtcccagatcaaggaacttcgcgccgagggactcgacctcgccctgggaggcgggacgcacgtcgtacgcggtgacgaccgcgcctagacgcttcagcgtaccaatggcctgcaggccggcgatgccggcaccgagcaccagcgccttggccgggcgaatcgtgccggcggcggtggtcatcatcggcaggaaggaaccgtaagcatcggcggcggtgatggctgccttgtagcccatcacggagttctgagaggtcatctcatccatggactgggcgctggaaagcttacggggtagcttttcgatggcgatgcccaccagaccggccttctcgagcgcggccacgtaatcggcatcggtgaaggaaccgagcatgccaatgacccactggccggccctgagcttggccacggtctcggcggacggacggtccacaaaaccgagcgcgtcggcttcggcgagcacctcgtcacggctggtcaccttcgcaccggccttttcgtaatcctcatcggtgtattcggcggcaatgccggcaccggcctcaataatcgaggagacaccgctcctcttcagccgggtgacgatatccggcgtcagcgcgacgcgggattccgtttcggacgtttcgttcaaaacgccgaacaccacggtggcttctgggttttgcgccatgagagccctttcttgttctacttcaaaatggacatggttatccgcatagaaagtgtagtcggaaggtaaagaccatgacttgagattccgccaatcgaaacagaaacgaacccgaaattagtgagaaatacgaatgtgtccatgtgcattgcggatgaattgctcggaagtcgtccaacaatcacccggcatcgatcagcaaccaaccgctcagtaattatcgacaatcaccgtttcgtagctcacggttactcaacaatatcgggacctgtgcaatattttgccacgcactcccctaacccgccagaatcctacggttgcgtaaggtgacgagttcggtttgggcgattacaatttgaactttgagaagcgttcgcctcatggctggacgacactgaaaggtttacaggagcaagacttgtcggttatcaattccttcacgcagcacactatcaatctcacccgtaaggcgctcaggttgggatccgacttcgtccacccggtccacgacgacaccccggacgagcccgattacctgtccaatgccgacgtgccggtcgagaccaatatcgctttgcctcacagcgacgattgggacgacggccacctgaccgtcaccgacatcgaccccatcaccggcctgctcaccacctccaccgaaggcaatccgccgctggacgaaggtacgtccatctacgacctgtatgcggaccgcgccgaacgtatgggcgatgagccgctgtacacctacaagtccggcaacgattgggtgaccgtcaccgccaacgagttcctggctgacgtgcgtgccatggccaagggcctgattcattacggcctgaagaagggcgatgccgtggcattcatgtgccgaacttcctacgactgggacctgaccgacgcggcgatcatggcgtgcggcggcgtgctcgccaccatctatgacaccgattccgccgagcagattcgcaatatcgtcaacaactccgatgcccgactgctgatcgtgcaggacacggacatgcgtaagaaggcggatgggtccgtcgaagagtgcccgtccctggagcacatcatcaccatcgagaccggtggcttggacgaaatcaaggcctacggcaccacggtctcggacgaggagctggacgagcgcatcgattcggtcaagaagaccgacctgtgctccatcgtgtacacctccggttccacggccgcgccgaaaggcgtggagatgacccacgagcactactgccaaaccgcgctgaatctgccggcctacatgcccgatctgctgcacgacaagaggaacaccatcctgctgttcctgccgcaggcccattccttcgcccgcgccatcaactacatcgtcgtctcctcgaacgtccgcatctacatcgccaccggcatcaagacgctgatcagcgatctgcaggtggccaagcccactctcatgatcgtggtgccgcgcgtgctagagaaggtgtacaacgccgcgtcccagaaggccggccacggccccaagggcgtggtgttcgcctccgccgtggtggccgcgcagaactatatgaaggaagtctccgccaacggcaaggcaggtgcactgacccgcactcgccgcgctgccttcgatccgattgtctactcttcgctgcgcgaagtgctcggcggtcgcgccaagtggattgtggccggcggtgccccgctcgaccccgaactgctggctttcttccgtggcgcgggtgtgcctgtatacgagggctatggtctaaccgagaccaccgcaccgtgcgcgttcaacccgctgggtacgccgttccacgctggttccgtgggcatcgcattccccggattctccctgcgcatcgccgaggacggcgaaattcaggtcaagggtcgtgccgtgttcccgcgctatcacaagaacgacgaggccactgagctgtcgttcaccgaagatggctggtatgccaccggcgatctgggccgcatcgacaacgacgggttcctgtacatcaccggtcgcaagaaggatctgattatcaccgccggcggcaagaacgtctcccccggcccgatcgaggaggtcatccagcgttgcgagatcgtctcccaggcgttggtgctgggcgacaaacgcccgtttatctccgccctggtgacgttggacgagaagtcgttgcgcccgtggctcgccgccaaggggcttgacgagaacatgtccctcgaggacgcggcaaggaacgccgccgtgcgcgccgaagtgcagcagtgggtcgatcgggccaacgagggagtctcccgcgccgaatccgtacgcaagttcatcatcctgcccgaggagttcactcaggagaacggcctcatgaccgcttccatgaaggtgattcgccccaaggtcatcaagcgctactccaccctcctcaacacccagatgtacaccaagaagaagtaaggaggactcgagtgcagcaaaagggagattccattggaatctccctttgttataaccggccgaaggccgattcctagaagcctaggcgttctagttgcttggggtcggactgccagcctttggctaccttgacgtggaggtcgagcttggctttttggccgacgatgcggttgaccggggtgcgtagcttcttcttgacgtaggtgaggttcgaggcgcccttgccgatgatgatcggcttctgtgagtcacgctccacgtaaatggacacgttgacctgcgccttgccgtcatagccctgaccggtctcgttgtcttccggatagtcgatggaatcgaccaccacggccagcgaatgcggcaactcgtcgtccagggtctcaaggaacgcaccgcgcacgagttcggcgatggtgtcttccggacgctcctcgctgatctgatcgtccgggtacatctgcgggccctcgggcgtgtgctcaatgagcacgttcttcacttcagccagattgtcgtgcttcagggcgctcaccggcacgatgtccgagaaatcggcgaaatcgttgatttcgatgagcttgttgatgagttgctgacggccaagctcgtcgatcttggtgacgatggcaatcagcgggatgcgccacttgaacgtaccgtcctcacgcttggtggcgaagtcggtacgcagtcgggaaagaatacgcttgtcgccggggccgatttcctggtcggcgggcagcaggaaggccaccacgtccacatcggccaaggattcgtcgaccacgtcgttcagacgctggccaagcaacgtacgcgggcggtggataccgggcgtgtccacgagcacgagctgcgcgtggtcggcggtcaggatgccgcgaatcgccttacgggtggtttccgggcgagaggatgcgatggcgatctgcttgccgatcaacgcgttgatcaacgtggatttgccgacgttcgggcggcccaccacggccacgaatccggagcgatacggcacgtcctgcttggtcacattctccgtttcaccggtcgcgtcgacttcggcaacgccggcaacatcggaagcatcggtgacgtcaatgtcatcgacgtcgttcgtgctgttgttctggtcggtcatatcactccttgctggcggtatcatcgccttcgacgggctcgccgtcagtttcctcatgggtcctgctattttcctcgccgccctcgacgtgcgccggttcgacgacgatggtggacaccttcttgcggcgtccggcggagtccacggcggtcagtcgcagaccgcgcgtcacggccgaagcaccgacaatcggcacgcggcccagaatcttggtcagcaggccgtacacggtatcgacatcgtcctcatcaatgtcgatctcgaagatctcctccagatcggcaatcggcgtacgggcgggcatcttccacttgttgtcgccgattttctccggctcggtacgctgggtgcggtcgtgctcgtcttccagctcgccgacgatctgttcgatggcatcctcgatagtcaccatgccggcgatgccgccatactcatcgaccaccacggccacatgttggcgggaacgctgcatctcatggaacaggtcgtccaccggcttggattcgggaacaagcagcggctgccggacgatggattcgaccgtgcgttccatggccgccgggttgaaggcggtggcgcgcacggcgtccttcaaataggccacgccgatcaggtcatccacatcctcaccgatcaccggcacgcgggagaaaccggagcgggagaacagtttcagcgcggaagacagtgtggagtcgcgctccatgcagatcatatcggtgcgcggcaccatgatctcgcgagtcaacgtatcagacagggtgagcacgttgcgcaacatttcggagacttccggatcgaagtcgttggactccaccagccggtcgatggcggccttgccctgctcgagctgaatcttctcaagctcctcgtcgtcggacagatcggagtccttggagcgacggcccgaccccttggaaccggacttgtcgccaccgatgcgtgcgaacggcgtgagcttggtggccaacgacacgatgcacgagttggaaatcatgatgtcgaccggcttggtcatgccggcggtgcgcgggcggaccagtacggagaccacggctacgataatcgcgaacaggaatccggcgagcagttcaacccacagttccgcaccccacagggatgcgatggaagacaccagtacgccgtcgagcacattgcaggcgatgcggaagaacgcacagctgccggcggtggcgtaacggtcggcgatgagccgttgcacgcgatgaatcttgtcgatcttcttcatcttgaggaactggcttgcttcggagtcggtctgcacctcgaggatgagattgttgaggctggctcgcgttacgcgggccacggcaccttcagcggcggccatggtcagcgaaagccagacgaacagggccgccacaagtacgagaatgacggtgacggcgatcagcgtggtactggaatactccataatgatttttcggtgtccttgaatgtccttgaacggtagagaataatccgaatttggtgtgattgatttggaagtttatttggaatcgaggtcgcggccagcaccgtgcgcggcgtcgtacagggccagcgcgtcgggtgtgccggcgggcagcgtggcctgcacgttggcatcgtggcgcagggcgaagaaggtgagcagcagctgtcgctgcaggccgaacatctggcgctcctgctcgggggtcacgtggtcgtagccgagcaggtgcaggatgccgtggatggtgagcaatagcatctcctgcatggtgctgtgcccggctgcggcagcctgttgggcagcgacccacgggcagatgacgatgtcgccgagcactccttccatcacggttttgccgtcgcctgggcgcagctcgtccatcgggaagctcatcacgtcggtcggaccttcgaggttcatccaacgcatgtgcagttcggcgatgggatcgggatccacgaacatgatggtcaggtcggactgggtgctcacgcgcatctggtcgagtacccaaatacccaaatcggagaagaccttggggtcgatgacccactgggtttcattggtgacgtcaacgctcatcgtctgtctcactttggttggttgaatccgcttgctggcgggcatcgaagtcggtatggttgcggcggcccttgcgttcgatgtcgcggtggtcgccggcgatggcggagtgacggtcgtaggcggccacgatctggccgaccagctggtgacgtaccacgtcctcggttttgagatgcacgaatgcgatgtcgtcgatgccgcccaggatgcgttcgatggtggccagtcccgagcgcggcacggtcaggtccacctgcgagatatcgccggtgatgaccatcgtggtgttgaagcccagacgggtcaggaacatcttcatctgctgttcggtggtgttctgagcctcgtcgaggatcacgaacgcgtcgttcagcgtacggccgcgcatgtaggcgagcggcgccacttcgatggagccgtcgtccatgtaccgcttgagctggtcggcgccgagcatgtcgccaagcgcgtcgtacagcgggcgcagatacgggtcaaccttgtcgttcagcgtgccgggcagaaagccgaggctttcgccggcctccacggccgggcgcgtaaggatgatgcggcgaatctgcttgtcctggaaggcacgcacagccttggccacggccagatacgtcttgccggtgcctgcgggaccaatgccgaaggtgatggtgtgcgattcgatggcgttcacgtaggccacttgtccggcggttttcgcacggaccggcacgccggcggcaaaggtgatgacgccgggaaccgtgggcttgcggtacgtcgggtcgtgggagccggcagaacgtgcatgggcgcgttcgtttgaggtcgattgcgccagtttgtcacgcaccgggccgtgaccgggatgttcgaggcgcacgtggttcttgagcacgttctggtcgagcatgcgacgcacggtgtcggcgtccataggcgcggtgtaggcggcttggatgatggagttgaccaaatcctcggcctgtgcggcctgggcttcggtctgcttggagcgggagacgatcgccacgcggttgccgcgcacgataatcgtcaggtccggaaaggcgcgctccacctcgcgaatgacctcgtcaaccgggccgagcacggcgacggggtcaagttggggcgggatggtgatggtacgtgtagtcgttgccacgaagcggatattcccctactactcgtcgagcttttcgccggtcatcacgtgcgcgtgcacgtggaagacggtctggccggcgtcgagaccggtgttgaacaccagtcggtaggcgccgtgaaattccttgtcggcgatgttctgcgcgatggagacgatgtgggccagctcggtcgggtcgtcggcggcaagttcggcgacgttggcgtagtgcttcttgggcaccacgagcacgtggaccttggccttggggttgatgtcgttgaatgcgtaggtcgtctcgtcctcgtagaccttgctgctgggaatctgccctgcgatgatcttgcagaacaggcaatcgtcggattcgctcatcatgctccttggtttgatgttgctacgcaccagcttagcgcgtgggcgttactcgtaacgtcccaacacccgagacaacagcgacaacgctacaggaccggccgtcgcggctctcagaatattgtgccccagtacgcagctcaccgctccggccttgacgaaatcagctacctcctgctcactgatgccgccctcaggcccgaccaccacactgacagtccgcggccggccgtcctggagcgtgcgttccaccaactgcgtaaccttctcctccacgccggaccacgtatcggtagcatcctgatgcagcacaatcaccacatcgccatgcacgcaggccctgcggcagatggccacgacctccttgctggacgcgcacgcctccagttgcggtttaaaagcgcgccgcgactgctcggtggcggcatccagtaccgaattccacttcttgtccgtacggccgaccttccacttggcaatggatcggtccgcctgccatggcaccacttggtcgacgccaatctgcgtagccatatcgatggcctgctcatcatggccggttttcgccaatgcctgaatcagcgccaaacgggtgagcggctcgggttcgcgccccacttccacaacttcagcaagtccggcttcaggatcggccatcactgcctggattctcaagccgttgccgtcggaaagttgcaggctgtcccccgccttgagtcgcatagcctgcacagcatggcgcttgatgtgcgcgggcagggttagcttccagccggcgtgaagttcgtcgctgttcaccgggacatcgtcgacctgcgggtcgaaaagaaaaagggcatcagtcatgacttcaaggctacacgcgacacgccgggcacacgcgcgaattgcatccctgtaatttcatgctaagctatttactcgttgtccaaacgacacctgcccgggtggcggaatggtagacgcgctagcttgaggtgctagtgcctattttatacgggcgtacgggttcaagtcccgtctcgggcacaggtaaaccccttgcattgcaaggggtttttcgttatctgcacacacgaaaggccaccaatgcagttcatcacgctggacaccgttgacgacccgcgcgtcgaagcgtatgtgagcctcaccgaaatgcagttgcgcaatcgcttggaaccagccaagggcgtgttcatcgccgagtcccccaaggttatcgaccgcgcgctggccgctgaccgcgaaccgctgtcactgctggtcgaggaaccttggctggagggcatgaaagacaccttcgacttcatcgacgggcgctggggcacggacattcccgtctacgtggcctcacctgagcagctcaagcgactgaccggctatcgtctgcatcgcggcgccctatgcgcgatgcgacgctggccgctgccctccgtagccgaggtctgcaggagcgcccgccgcgtggcagtaatggaaaacatcgtggaccacaccaatgtgggcgcactgatgcgttcggcagccgcgctcgatgtggatgccgtgctggccacaccctcctgcggtgatccgctgtaccgacgagccgctcgtgtgtcgatgggcaccgtattccagattccgtggacccgtatcaccgggttcaacgacgacggtaccgaaaacaagcattactggccgttccagggcatcgacgagttgaagtcgctgggcttcaccaccgtggccatggcattggaggatcgttcgatttcgttggacgagctgacacgccgtctgcacgcgcctgctgaagatccgacgcatatcgacaagctcgcgctgatcttcggcaccgagggcgacggcctgtcccaccatacgattgcccgcgccgatttgaccgtgaagattccgatgagccacggcgtggatagtctgaacgtggcggcatccagcgcagtggcgttctacgcgacacgctaaggaatcgcacgcgctcctaaaaggccgaatccttaacaaatctacgaaactgttcatcgcaagttcacggcacgcggggggcgaaagccttgcatgttcgaatttttctgcaattattaactatgtaaaccgaatgcaaggaagcatccggcccagcagtgcggtgtcgaaagacgctcagtaacagagaggacagttacgatggccaagaatcccaagattctgtcgattgtgcttgcaggtggtgaggggacccgcctgatgccgttaacccgcgatcgcgcgaagcccgccgttcccttcggtggtgtgtatcgtctgatcgatttcccgttgagcaatctggtgaactccgggtaccgtcaggtcgtggtgctcacccagtacaagtctcactcgcttgaccgccacatctcccaggtctggcgtttctccccgctgcttggctcgtacgtctcccctgtgcccgcgcagcagcgtctcggcaagcactggtacctcggctccgccgacgccatctaccagaccatcaacatcatcgaggacgtccagccggacatcgtggtgatcgtgggcgccgatcacgtctaccgcatggacttcgagcagatggtacagcagcacatcgagtccggcgccgagttcaccgtggccggtatccgccagcccatcgaggaatcgaaccagttcggtgtaattgaggtcgatcctgatcacccgaacatgatcaggaacttccaggagaagccggccaccaccaccggtctgccggacaatccgaaccagattctggcttccatgggtaactacgttgccaacaccaaggccctgttcgaggctctggctctcgatgagaaggctgccgacaccaagcatgacatgggcggcgacatcgccccgtacttcgcttcccgcaacgaggccggcgtctacgacttcaactcgaacgagattccgggttccacggtcactgatcacgcttactggcgcgacgtcggtacgattaaacagttctacgatgcgcacatggatctgatcgcctatgtgcccgagttcaacctgtacaaccaggattggccgatttacacgatgtccggcaacctgccgccggccaagttcgtgcacgccggccgcgaccgtctgggccacgccaccgattcgatcgtctcccccggtgtgatcgtctccggcggtgaagtgcaccactccgtgctctcccccaatgtgcgtatccactcgtgggcacagatcgtcgattccgtgctgttcgacggtgtaatcatcaaccgccgcgcccgcgtgtacaaggcgattctcgacaagaacgtggtcctgaccgaaaactccactgtcggcatcgataccgagcacgatctggcccgtggcttcaccgtcacgccggacggcattacggttgtcccgaagaacaccatcgtcgatgactgattgaccagtccagacttggaaaagccccgcatcatgcggggcttttctcgtatagagctccctcatcagagggagcttactaagcgctatcagtactttggcatgttgtcgaagttgaagccaagggcggcgagctggtcgcggccttcgggcgtgatgcgctccatggtccagcgcgggtcccacgtccagtcgatgcggaactcctcgaccagaccggccagcgtggatgcgcattcgtcctcgataaggtcggtcagcgggcaggccggcgtggtcagcgtcatcgtaataatggcgcggcctagctcatcgatctcaatgccgtagaccagacccaaatcgatcacgtcgatgccaagctccggatcaatcacctgatgcagtgcctcgcgcacgtcttcggcagtggcgcggccgatatcgtcaatcgccttgatcggaatctcgctgccatcggactgttcgtcatcccggcaaccgcatttgccatggtgaccgccacacgcacaggtgtcatcgccggacgcagcagagtgctcgatcgggcgtccgttcgggaagcccttggccaaggccgggttggccatcacgcggcgagcggcctcctcgtcctgcaggacgccgttgacggcatcgaaaacggacggctgtggttcgggaaccaaattatcgttggacatatttcctcagttctttgcagcgagggctttggcgatggaatccttcagcccttcccagcctagcagagcgcatttgatgcgcatagggtatttcgacacgccttggaataccacggcatcgccgagcttttcttccaggttctcgtcgtccagaccggcaccgcgcgattccatcagcttgtggaatgtctgttccagatccatggcctcgtccacggttttgccgtccaccagatcgaccatcaccgacaggctggcctgcgaaatggagcagccgtggccgtcccacaccaatcgcttgatggtgtgcggttcgtcatcggagacttcgacatggatggtcgcctcgtcgccgcaggtcgggttgaactggtgcgattcaccgggcgtgcagtattcgtggctggcttgcacggtgacattggccgccgcgtccgcggactgttcgaccgccgcgttgggcgcaaaggattccttgccatgcggatgttttgacgcctcgaggatgacctcttggtacatctgttcgaggtcatccccgctcataccgaattcgttcatggtgttctgttttactccactccaaagaacttacggatgcccttggccgcttcgaccaatgcttgggcatcttcgaccgaattgtagacaccggaggaggcacgattggatgcgtataggccgaagtggcggtgcaccggctgggcgcagtggtgtcccacgcgaatcgcgatgccctgggcgtcgatgaactggcccacatcgtgcgggtgcacgccggccacgtcgaacgccacggtaccgatgcggtccacgttttcgcgcggtccgaggatgcgaatgccatcgatgtcgccgagcttcagcagttcggcagcgatggtcttctcatgggcctcgatgttctcgagcccgatgttcatcatccattcggcggcgacgcctgcggccaccacttgggcgaccggctgggtgccggcctcgaagcgggccggaggggccatgtattgggcctcgtggtccatgtaggcgagttcgaccatggagccgccgaagttggccggcggcagggcttcgagcagttcgcgcttaccgtacaggaaaccgacgccggtaggaccgtacatcttgtgcgcgctccaggcagcgaagtccacatcaagcgcatggaaatcgactttgaggtgcggtacggactggcaagcgtccaagatgaagatcgaacctacttcatgcgcacgcttgatgataggggcgatgttggtgatggcacccgtggtgttgcccacgtgggtgacggccacgaccttggtgcgttcggtgatgacttcgtcgaggttgtccgtacgcacacggccgtcctcggtcaggtcgatccacttgaaggtggcaccggtacggtaggccagctcctggaatggcagcagcactgaatgatgttccgcacgcgagacgacgatctcatcgcccggcttcagggcaaaacgcttggcggcttctcccccacggcccagcgacgcattgccgaatgcggtggcgagcaggttcagtccggccgtggcaccaccggtgacgacgatctcttcttcgccttccgctgcattcgcgccgaccagcttggcgaccttggcacgggcctcttcgaaagccatggtactacgggccgccagctcgtgggcaccgcggtgcacgccggcgttgatcgtacggtagaagttcgcctcggcgttgatcaccgcattcggcttctgcgaggtggccgcagaatccaggtacacgagcggatgcccgtgaatctcctgattcagaatcgggaactcgccccgaatctccttaaaatcaaccattatgttcccctacttacgtaacaattgtacgaaacgagtgggagtcggacatggcctgttcgcgaccgtaaagacttggcctgagtggcccggagcgtgtcgagaatagggcatgtcagactcccacggtcacggactcaggccagcgcggactcggagtcggcgccttcgggcaggtactggtcgtagccgttctcttcgagttcgtcggccagctcagggccgccggtcttgacgaagtggccgtcggcgaacacgtgcacgatgtccggcttgatgtacttcaagatacgggtgtagtgcgtgaccatgaggatgccgaactggttggcttccttggcacggttcacgccttcggacacgatgcgcagggcgtccacatccaagccggagtcggtttcgtcaaggatggcgaacttcggcttcagcagttcgagctgcagcacttcggcgcgcttcttttcaccgccggagaagccttcgttcacggaacgggaggcgaacttcgggtccatcttgaggcgcttcatggctgcggacaggtccttggcccactggcgaataccgggagcctcgccgtcgatttcggtcttggcggtgcgcaagaagttggtcatggacacgcccggtacttcgaccgggtattgcatggcaaggaacaggccggccttggcgcgctcgtccggagtcatcttgaggatgtccttgccgtcgaggagggcctcgccggagtcgaccacgtacttggggtggccggccaacgtgtaggcgagagtggacttgccggaaccgttggggcccatgatggcgtgggtttcgccggagtggacggtcagggtggcacccttcaggatcggcttgatgccttccttggtttcgacgtggacgtgcaggtccttgatttcgagtgttgacattgttgtgctcctaaaaatgctgttcttacttgtcttcgaggacctgtgccatggcgtcgttttcgccacgggccagtcggcggtcaatcacggtcatcagatgttcggagatggcaggaatgccgatctcctcgacgagttcgccgaagaagccgcgcacaacgagcttgcgggcgtcggtttcggggatgccgcgggattcgaggtagaacagttcctcgtcgtcgaagcggcccaccgaagaggcgtgaccggcaccgatgatgttgccgttttcgatttcgaggttcggctcggaatcggcgatggcacccggggtcaggaccaggttgcggttgagctcgtaggagtcggtgccgggggcggtgggctggatgagcgcgttgcccacccaagtggagtgcgcgcccttgccgtcaagcgcgcccttgtagaccacgcgggacttgcagtcggggtggttgtgtaccaccatcgtgcggtgttcgatgtgctcgccagggtccacgaagtagatgccgagcatgttgaggtcgccctgttcgccgccgaagtcctgatccatgcggatgcggacgatgtcgccgcccaaggtcacgacggagtggcgcagggatgcgccttcgccgacgtggatgcggtggttggccacatgcttggcggttttggcccattcctgaacgaacgtggtggagacgtgcgagtccttgccggtggtgatttccacgccttcggccagtcgtgcgtcaccgtcgtgttccacgacgacgtccgcatgagccttgtcggcggcggcgatcaccagatggaaggcgtcaaggtcctcccccgcgccgtgcaccttgacgagcacgggctgggcgatctcaccggacagttccagaatggttgcggtgtggccggattcccattcgactgcggagacgcggtcgttgggcttggacacagtgccggacaggccctcaccgagcttgatctggctgagcttcacgccttcggccaacggcgagccgtcaatcatggagacttcgatctgcgtttcgccggaaggcttgaacacggtgaagaactcgttgatgcgctcgataggcgtgtagcgccattcgtcctgcttgcggctgggctccgggtagtcgcctgcgttgaacgaacgcacggcatggtccacggaggacggcatggcggccggaatcgcgtacgggtcgttggggtcggcgaccggaatcttgatttccttgacgggtgttgtgttgtcggtcatcggaatcagcccaccgatccttccatctgaagttccacaagtctgttgagttcgagtgcgtattccatcggcagctcgcggctgatcggttcgacgaagccgcgcacgatcatgcctcgcgcctcttcctccgtgagtcctcggctcatcaggtagaagagctggtcttcggaaatcttggaaacggtggcttcgtgggccatcgagacgtcgtcttcgcgaacgtcgacgtgcgggtaggtatcggagcgggagaagtcgtcgaccagcagggcatcgcacacggtcgagttggacgaaccgtacgcgcccttgacgattttgaccagaccgcggtaggcggagcggccgccgccgcgcgagatggacttggcgacgatggtggagctggtgtgcggggcgaggtgaatcatcttcgcgcccgtgtcctggtactggcccttgccggcgaagccgagggacatggtggatgccttggcgtacggttcggcgaggatgcaggccgggtacttcatggtggccttggaaccgatgttgccgtccacccactccatcgtgccgccctcacgcacgtaggcacgctgggtgacgaggttgtagacgttgttcgaccagttctgcacggtggtgtagcgcacgcgggcatgcttctcgacgatgatctcgacgatggcggcgtgcagcgagtcctcggaccagatcggggcggtgcagccttccacgtagtgcacgtaggagccttcgtccgcgatgatcagtgtgcgttcgaactgacccatggccggggtgttgatgcggaagtatgcctgcaacgggatgtccacgtgcacgcccttcggcacgtatacgaacgagccgccggaccacgccgcggtgttgagggcgccgaacttgttgtcctccgggggcacgacggtgccgaagtacttcttgacgagttcagggtattcgcgcacagcggtgtccgtgtcgacgaagatcacaccctgcttcttcaggtcctcacgaatggagttgtagatcacctcggactcgtactgggcagccacgccggagacgaggcggttcttctccgcctccgggatgccaaggcgatcgtaggtgttgcggatgtcgtccggcagctcctcccacgacttcgcctgcttctcgatcggcttgacgtagtacttgaagtcgtcggcgttgaagccggagagatccacaccccaatcgggcatgggcttttcgaggaacgccttgaatccacgcagacgcatgtcgagcatccactgcggctcgcctttgtcggcgctgatcgcgcgtacgacgttctcatcaatgcctcgttttgcggcttcgccggcggcatcagaatcatgccaaccatagttgtagtcgccgaactggctgatgatctcgtcatccttcttgatcttgtcctcgttgacgcgggtacgatcagccacatactggctcatctccacgtcagcggcggcgtttggtgctgtgttttcggtcaccatcctgccttccttgtatcacacttaaccctatgaaaacctagcagaacccaagtgcaaacactagctgccctgacgcatattggctgtgggcttgattacatgcgggcgccatcgggccatgcggcatcacggatggcaccaaacggcgaaggcgtggcggcgaagcatcctgagatgccgtgccgtcacgccttcatcgtgcgcggaccgaccgcgcgggatccacggtcagcgggccgcctgatggccgagcgccgccttgaccagaccggcgaacagcgggtgcggcttggtcgggcgagacttgaactccgggtgagcctgggtggccacatagaacgggtgcacgtcctgcggcagttccacgaactcggtgagctcgccgtccgggctctggccggagatgcgcaggccgccttcacgcagacgatccttgtaggccacgttgacttcgtaacggtggcggtggcgctcggtgacatgcgtggtgccgtacagttcggcgaccagcgagccttcctccagctcggccgggtaggagccaagacgcatggtgtggcccatgtcgcccttgccggccacgatgtccttctgctcttccatggtggcgatcaccgggttggcgcaatcgggctcgaactcggaagagttcgcgtcttcaatgcccagcacgtggcgggagtattcgatgaccatggactgcagaccaaggcacaggccaagggcgggcagcttggtttcacgggcgaacttcagggcgccgatcttgccgtcgatgccgcgaatgccaaagccgccggggatcacgatgccgtcgacgttgtcgagagcggcggccgcgccttcagtggtttcgcaacggtcggcagcaacccatttgacgttgaccttggcccagttggcaaagccgccggccttgatggcctcggtgacagacaggtaggcgtccggcagatcgatgtacttgccgacgatggcgatgttgacctcgtgcttggggtggtggacgcgctcaagcaggtctgcccattcatcccaatcgacatcgtggaacggcaggccgagctcacgcaccacgtaagcatcaaggccctcttcgaacaggatcttcggtacatcgtagatgctcggcgcatccacgcagttgaccacgccttcggcatcgacgtcgcacatcagggagatcttgtctttgatggactggttgagcgggcggtcggaacgcaacacgagggcgtccggggagatgccgagttgacgcagcatcatcacggagtgctgggtgggcttggtcttgagctcgtgggcggcggaaatgtacggcaccagggaaacgtgcacgaacatgcagttgtccgggccgagatcgcggcgcacttcgcgggcggcctcaaggaagggctgggactcgatgtcgccgacggtaccaccgatttcggtgatgatcacatccacgtcatcggaagcctgggcgcgcatacgagacttgatttcgttggtgatgtgagggatgacctgcacgcactggccgaggtattcgccggcgcgctccttgcgcagcacttcctgatagatctgaccggtggtgacgttggccttctggctcaggaagacgtcgaggaaacgctcgtagtgaccgatgtcgagatcggtttcagcaccgtcttcggtcacgtagacctcaccatgctggaacgggttcatggtgcccgggtcgacgttgatgtacggatcgagcttttgctgcagaacatggatgccgcggctgcgcagcaaacgaccgagcgaagatgcggtcaggcccttgccgagagaggaaacaacgccgccagtgacgaaaatatgcttggtgacgtgttcttgagaattaccatgtgttcttctaaccatggaattccactctatcatccgtgtatgacccggcgtgttcatgacgtggccggtgtagtcgtgcgtaggcagcccatctcgttctgccttggccagcatatggtcgaatacacggcgtacttcgggtccataaggcgcgcccggacgaggattcgggtccgattcgtcggaacaggaatcccgggcgcaacgtcgactgctacccgggattggctggagggcttggttctattcgctcagcaagtgcgccacagcatcgagcgcgagcttgtagccgtagaaacccatgccggtgatggtgccggtggccacagggctgattacggaacgcttgcggaactcgtcgcgggcggacgggttggaaatatggacttccataagcggcaggttctcatcaatgaccatgtgcgcggcgtcggcgagagcatacgaatagtgcgtgaaggcggcgggattcatgaccaccggggttttctcgtcggcggcttggtgcatccagtgcaccatttcggcttcgtcgtcggtctggcgcacctcgacttcgaggccgaggtccttgccccattcggcgcagagcttgcgcagggtgtcgaggtcttgacgaccgtagacgtcgggctggcggacgccgagacgtccgaggttagggccattgacaacaatgactttggtcattgggactccttttgtttgtgcttctctccctccgccccttcggggcacctccctcatcagagggaggtagaaggtaaatccgactccggggcacctccgttagaggggagccaagtactttttctgaggggatggcgaacggcacggcctacggccgttcaattactgctggatacgacggaatgcttcttctacggcttcggcgggcgggttgtcgaggtgtacgacgtgaccaatctcgtcgaggaccacgaaacgcagttcgttgccacgggctttcttgtcgcgatgcatcaatgcgagcacgtcgtcgaacgagctgccattccacgacgtcggcagacccagcgaagcgagcaacgaacggtgatagtcaaccagatcctgatcgatgtaaccgatcagatgggccagctcggcggcatacaccataccgacggccaccgcattgccatgcctccagcggaagtgctcgagcttttcgatggcatggcccatcgtgtgcccgtagttgaggaattcacgcagacccttctccttcaaatcggaggagacgtggtaggccttgacctttaccgtgcgctcaatgagctcggcaaccacgtcttcgagcggcgagccgaggaatgtagagccgtcgaaagcgcgcagttcagctgcgtggtcttcgaggatatgcaggatttcggggtcgcggatgaaaccggatttggcgacttcaccgagaccctcaatgaagatgtcattgggcagcgtagccagcgtcttggtgtcagccagcacaccggcaggcgtgtagaacgagccgacgaggttcttgccctgcggggtgttgatgccggttttgccaccggtggaggcatcgaccatggccagcagcgaggtcgggcagtttacatagcgcacgccgcgcatccacgtggcagccacaaaaccggccaaatcggttgcggcaccgcctccaagccccaccacggcatcggatcgggtgaaaccttcgttgccaaggcgttcccaaatgccgttggccacggtaatggtcttgccgggttcggcatccggaatcacgatgtcggaaacctcatagccgccctgacgcaacagggcgcgggcacgatcggagtgtcgctgcaccggctgggtatggataagcgcgattttggcgggcttgggtcccagcacgtcgaccagatgattcatggccccttcgccaatgaccacatcatacggctcaattgccgatccggtaacatgcactgctcgctcagataccatatcaatcactttcttcgctgcgccctgaggcgtaagcccccgggtatggacatgaacgttggcgacctcgcggaataccgggtcacgctgcttgaacagtgtcttccaacgggagttggcattgccattgagcatgggccggcctcccccgcggttcgcgcgttccatggcctccgccggatcggcgtcaaggtagaccacacgaccgccatggtcgatgtatgaggcgagggcatgctgggtggatggcgtcatgggagcgccaccgcccagcgaaaagataccgtcgaaatcctcaagcatatcggcgatgagatcggcctcgacctcgcggaatgccggctcaccgtattcatcgaagtaggcgggaatcttcatgcccacttcacgttcgatctccacatcggcatcggcgaacggcagacgcaacatatgcgccacttccttaccgacacgtgttttgccggctcccatcatgccgatgatgacggcgcgggggcgtgcggtcataatctacgaatcctctcgacgattggtgggtacagttgctgatggttccgcggcagtcgtctcggaaccatactccacttcgttcagcgcatgtgctccggccacgaggcgagatacgactcaaggttgcgccgtgtttcggcaacactgtctccaccgaacttatccagcgcgtacttcgccaaagtcagacgcaccatggcctcggccaccacggatgccgcaggcacggcggtgctgtcggaacgctggttgatggcttgtgcggattcgccggtcagcacgtcgaccgtacgcagggccttggggatggacggaatcggcttcatggcaccgcgtacgcgaatcacctggccattggacataccgccttcaatgccgcctgcgcggttggacagacggtcgatgcggccgtcggcgttgaccacgatctcatcgtgcgcctgcgaaccggggcgggaggcttccaggaagccgtcgccgatctccacacccttgaacgcctgaatgcccataatcgcggaggccagagccgcgtccagacgacggtcggattccacatacgtgccgatgccggcaggcacgccgtaagccagcacttcaatcacgccgcccaacgtgtcggcggccttcttggcctcgttgatgcgttcgatgatgcgggcctcggcctctttatccaacgtacgcacgggagaggcatccaacgcttccagatcgtcaggtgtgggcaacggcaaatcagggttggtctgcacgccaccgagcgccaccacgtgggctacggtgcggatgccgaacgcctgatccaggaactgcttggccacctcgcccaaggccacacgggaggcggtctcacgggcgctggagcgctccagtaccgggcgggcgtcgtcaaaaccatacttgcgcatgccggtcagatcggcgtggcccgggcgcgggcggctcagcggcgcattgcggccttcgcgcggcaggtcatggtcgagtgcatcggcgctcatgacctcggtccacttcggccattcggtgttggcgatttcgatggccaccggcgagccgagggtcaggccgtggcgtacaccggtcagcagacggaccttgtcttgctcgaacttcatgcgggcaccgcgaccatatccaagtcgacggcgtgccagtgcggaaacgatatcgtccgtgctaatacgcacgccggccggcaacccttcaatcatggccaccaatgcttctccgtgcgactcccctgccgtctgccaacgcagcataacttccctcgtttcatgtgtgtacgtctatgtgtacgtctaactaggggttaatgttaagccatgccatacctgttcacgctacccggtctgctatgtgggcttgcactgtccattgaggatgttcgtcatcggcgggtgccgatcgcatgggtggccgtgggcgcgttaatccagttggccgccgatttcgcgtatggagtggtggcgaacgacctgttcgtgctgttgcaggcactgttgttcaccgtgctatgttgcctgattcagttcgcgttggcgttgctggtgccgcggtcattgggattcggcgatgtgaccgccttgatacctatgggattgtctgtcggactgtttggcctgttgcctgtggtggtctggtggctggcgatgggcgttgccggcatcacatggattgccttgtggacgcgattcgacccacaacgcacatcaccggcacatgcgggcaaggtgccgtatgtgccggtgatattggcgggcgcgattgtggcggtggtggttggggcttaatcccgtattactcccctcagtccgctttgcggacagctcccctcggcgaggggagccaatgaggtgactactggttttcggcttgccacttgcgtagttcggccacattctggtcatgttcatcggcggttacggcgaacttggtttcgccggtgtccagattgaccgtgcagaagtacagccaattgccgctttcggggtgcagtgccgcttgaatggcgctatcgccgggattgctgatcggcgtaggcggcaggccggagatcttgtacgtgttgtacgggttggactcgtcttgggtcatctcggtggtcacctgcgcgggcttgacgttattgccataggccacggtggaatccatgcccaacgacatgccctgctccaaacggttctcgatgactcgcgtcactttgccgtagtaatcggctttgttgacctcggcctcggcgatagaggcgatgatcatcacccgttcgcggtcactgccggtcggcacgcccaattcatccaacttggcgatacgcttatcgaccatggccttgaggatttccgaagcgctcttcatgctcttgacgttgtaggttcccggctccagccatccctcaaagctaccgcccgcttcattgggcagaatatccttacccttgttcttgataatcgtgtcgaattcgctttgggcaacgccggaaagcttcgcggcgtcggcgaacacatcggtagcacgttcaccgggatgaacctcaaggaagcccgccgcctggttggtgtcggagagaacggcgatcacatcggatgcggccatatgcttcttcaatgtgaacgttcccggatagagtgtcgcgctattggcgttgaccacgctggtgaacgcggcagtggacttgatgacttcggccttgagcagattatcggcgatctccgccgcgccttggccctcgctcacggtgaattcgacctcgccatagcccggtccccgatagtccgcgatggccgtcgactggttgctccggctgtcgcgccatgcgatgagcttggttacgccgaaatagccgccgccgataagcagggcgacgatggcgatagcgatgataatgccactgacgcgcttgcgcttgcgctgtgcacgtcgcttgcgcatctccttgcgggatttcggcggttctggcggctcggggccgcgcattggttctgacccctgttcgacccaatgcgtgttgtcatcaaagaactcgttaaaatcatcggtcataaccgatacctcactgctcccgggtacggtcgagtgccgtctgcaaaatcaccactgccgactgctggtcaaccaccggcctgtgcttgttcgaagctttatgggcctcgaacagttgacgatgcgcactgactgttgtcaatctctcatctatcaatgacacctgcggaatctgatactccgtagaatcactgtcttcactctctgcttgcagcctcttctccagattggccgcccacctgcgcgcttttttggcgcttttgccttctgtaccgtccatctgcagaggcagtccgacgattacatggtccacatgttcgtcttcgatgacgttcaggacctcgtcaatagcaaagaaatagtcgccggcaacatgaatgttgccagcagggtgtgcaaaggtaagctccgggtcggacagtgccagtccgacccgggcattacccaaatcaacgcctaaccacaccactggcggaatcaggctttctgcgcctcgtgctcgagcgcttcgagggcctcgtcgatcttggaggcatcgacaccgccaccctgggcgaagtccggcttgccgccgccaccgccgccgaggaccttggctgcgccacgcaccagatcaccggccttgatgccgaccttgcgggcggcctcgttggtggccacggcgaccatcggcttgtcatcctcgttcacgccggcgagggccaccaccacgggggcgtcttcaccgagctgggcgcgcacgtcgagtacggtcttgcgcagggcgtcgaccgcgccgaagtggcccacgttcttgacggccaccttgaccggggccgcggagttcttggtgtcagcaaccaacgccggaaccgaggcggccagctgggactcgtacatggaggccaagcgacgatcggattccttgagcttggcgagcagggcgttcacacgctcggcgagctcgtccgggcgagcgttgagcttgtcggacagctgggagaccaacgcgtgctcacgagcgttgaagtcataggcaccctggcccacgacggcgtcgacacgacgcacgccggagccgatggaggcttcggacaggatgttgaccatgccgatcttgccgacgtggtccacgtgggtaccaccacacagctcgcggctccagccgtcttcgccgatggagaccacgcgtacgatgtcgccgtacttctcgccgaacaggtgcatggcaccgagggcgatggcgtcgtcgaacttcatttccttggtggtcacggcgaggttgtcgcgcagcttgtcgttgacgcgctcctcgactgcggagatcacggacttggccggggccttggaccactggaagtcgaagcgcagacggttcggggcgtcctcggagccgcgctgggtggcctgcgggccgagctcctcacgcagcgccttgtgcaccatgtgcgtggcggtgtgcgagcgggcgatggcgccacggcgggccaggtcgatgttggcgttgacttcggcgccgacgaccagcgtgccttcggtcagacggcactggtggacgatgaggtccttgatgggcttctgcacgtcgtcgacttcgagcactgcaccgtcgtcggacaggatctcgccctgatcggcaagctggccgccggcctccgcatagaacggggtacggtcgagaatgacttcgacgttggccgggccggtgacggcgggcacggagcccttgccttcctgcatgatgccgatgaccttggcacgggcggacatgtccgtgtagccgaggaagtcgatcggcttggcgagcgtcttcttgaagtcgtcatagaccgacaggtccacgttgtgacgcttcttgagggcgtcggcgcgggcgcgggacttctgctcggccataagctcgcggaacttggcctcgtccaccttcacgccctgatcggcggccatttcgagggtcagctcaatcgggaagccgtaagtgtcgtgcagagtgaacgcatcagagccggagaccaccgggtcggcggtcttcttggccttcttgacagccacgtcgagaatctcgatgccgttctccagcgtacgacggaacgcatcttcctcgccgtaggccgcttcggagacatcgtggaaggtgtcgttaagctccgggtagctggcgaccatggcctccttggagacaggcagcagctcgggaatcaccggatcggtcacaccgagtacacgcatggcctgcacggtgcgacgcagcaggcgacgcagcacgtagccgcggccgacgttggacgggcgcacgccatcggacataatcatcagcgcggaacgcacgtgatcggccacgacacggaacttgacatccgcggcctcgtcctcgccgtacttgcggccggacaagcgctcggcggcctcgatgaccgggaagacctcatcggtctcgtagatgttctgcttgccctgcatcaggtaggccaagcgttccagaccggcaccggtatcgatgttcttctgggcaagctcgccgacgatgtgcaggtcggtcttggacttgacgttgtcgacctcgtagttctcgaacacgaggtcccagatctcgatgaagcgcgtctcatcggccgcgggaccgccatcacgaccgtattcggggccgcggtccacgtagatctcggagcaggggccaccagggccagggccaccggtggtccagaagttgtcttccatgccgaaaatctgcatgtgctcgggatcgaagccctcgttcttccagatggaacgggcctcttcatcgtcggtaaaggtggtgacccacagcttttccgggtcaaagccgtaaccgccctcgctctgcggggtggtcagcagctcccaggcgtagtggatggcctcttccttgaagtagtcgccgatggagaagttgccaagcatctggaagaaggtgccatggcgggtggtcttgccgacctcatcgatatccagcgtacgcacgcacttctggttcgatgtcatgcggcgcttcggcggggtctgctcaccaagaaggtagggaatgaacggcaccatgccggcgatggtgaacagcgtggtggggttcggggaaatcagggatgccgaaggcatgacgagatgatcatgtttggcaaagtaatcgaggtatcgctttgcgatgtccgcagtgcgcatgagcggatgaactccttgtttgggtaatgggcgcagttgcgcctggtattggtggaaaaagactggattatgaggactagtttgttctagctggttcagtgactagatggcaaggcggcatgcgcgtgtcagttggcgcgctcgatgtactgacggttgagctcagcctcgcgggctcgacgggcggcattgaactcgttgaccaacccttcgagtgttttcatcggcacattgtcctgatcggggccaagcaggaactggcgtgccgcatcaggtgtattggccttgacataggcctgtgccttggtgacggcaacgattccgatggccacgccgacgccgacccagaagatgcgtttgaacatcactcccccttctcgccggtgtcgttgacggtggttttcgcggcgttcttcgcaaggaaggactgacccgtggttttcagcgcgtagaaggtggaagcgatcttgatgatgggcttaccgaggaaagagccatacagatcagtcaacgcaccaacgttgttggcggtggtggaagccgcggcggaaatcttgttcacgtcttcaagcgacttgttgacctgcttgacggtggtcacgccttcgtccagcgcggggatggcgtgttcgccggactcccggaccgtctgcgatatctgatcaaacatcttgcccagcctgatcagcggatagatcatgaaaccggccaatactgcgaacgcgatggccgcgatcaggccagcgatctctccgactcccattgtttcctccttgcggtcacacttactcgcctaagggtagcactccttccctatttcttggcataccattgcacgcgcagggcgaaaaccgtgcgcgtggatgcatgcggctataggcgaaaggtgtcctgctgacgctttcgtttgcggcgtgccgccgtggaccgtacgtgctattcgatatgtattgcttgctatttgctacttgccgtacgaaacgatggtcacggcctcgccgaacggcttgtcggtgtcgaagtcgagcacggttaccgaaccattggccgggcgttcgttcagatcgaggtcagggccgccgaaccggtggccgaggctaagcagtgtgttgccatgcgaaatctgcagcacatcgtcgccatccttgagattcgggttgtcggcgataagacggaacgcgccttcgacgcgcgtccaatattcctcatcggattccgcatcgtggaagggatcggcttccttgagaaaatcacgcgaggcccccaacccgaacttctcgacgatttggttgtaggttttggcgccgtgaggcgctcccgcggcgtaccaggccatggccatgtcaagtccctcgtagtagccgtagaactgctcgcggaagtgcatgtccgtcacgagtgcggggcgcgggttacccgcggcttcgttgatgtcgagaattttctcggccgtctgccgggcacgcgtggtgtccgaacagtaggcggcggtgaacgtcaatcctttcagtcgctcaccggccttgacggcatcagcgacgcccgactcggtcagcggcgaattcgaccatccctgcagacggttgtatcggttgaaataggtctgtccgtgacggaccaaatacagatgaagaatcatggttccgattatgtcaccattccggcggtttcggtgcgggctgccggaagtcataagtcataacggcataggtcactacctgagatatgcgtaatccgggtagtatacctgacgattcctgagagtacacttagggtactatgagcataacctcgaaacctgcaccatctcaatcgtctgagcctgcccatttcaggggtatcgatggactgcgcgctctggcgattcttggagtcatagcattccacacccgcccgtcgctattgcagggcggattcattggcgtgacgatgtttttcgttatcaccggttttcttgccacacgttcagtactgaacatggtggaccgcaccgggtcctttggatatggccgatatctgatccgccgcattactcgtttatggccggtgatgctggcgaccattgccgtggtgccttggctcacttggatgttcgctcccagcctgttgcagaaagtggtttccgattcgctgccgagcgccttgttcgccagcaattgggtgtacatcttccgcaaggtgccgtatttcgaggcggccggattgccttctcctctgacccatctgtggttcttgggcgtgacgatgcagttctatctgatttggccgttgctgatggtggtgctcggcaaaatcaccaagtccaaatgggtgcgctccatggcgattcttgtcatcatggctgcttccaccgccgccatggtgctgctgtttgacccggccaatacctcccgcgtgtattacggtaccgatactcgtctcgccgagctggccgccggcgcgctgttggctatctggattgcgccttcctcgcgaggtacggaagttgcggaagctggagcggcttcgcaaacagtgcagatcggacgtcaggccggcgacaagacgggcgcccgtctcactatcgtctgcaatgttcttggcaccgcggctttggcggcactgttggccggattctggttcgccaacgggtatctgtcgtacatgtaccaaggcgggtacctgattaccgcgttcatatcgttgtgcgccttggcctgtgccgtgaacaatgactcaatctggtcgcgcgtgctgggttgcgctcccctacgctatatcgggtcgcgatcgttctcgctgtacgtcatgcattatccgctgctgcagttcatgaacccggcgacacgaacgcaggcgttgccgtggtggggttgggttcttgaggccatcgtggtgttggcggcgtcggaagccttctaccagctggtcgaggcggcccgtaaatcggtgcagatgcctcgcagccaacatgccaagccgctgccgaaagccggctaccagctgcgcccgggcgcgtgggtcatgtcggttatcggattggtgaccgttgtggtgctgacgtgggcaccggtggattggaatggcatcgctcaagcgcgagccattcagctgcgccccgaactcgcggcacccgccaagccggtcaagaaaccggcgaagcccgagcccgagtcttctgccacgaatgccgcgaacggcgaaaccaataccgctgacgcgaataagaacggttcggattctcagccgcccaccatcaaaccgattgcggaaaaggtgccaaacaatcttgacatttcgaagtacgcctatgatccggcaacggaaagctgcaacgcggatatgatgatggtcggcgattcagtgacgtcgggtacttcggacgccatccaggccgcattcccgaacgcttttatcgatggcctgccgaaccgtcagatgccgcaggcggtggatgtgtatcagcaggacaccgctgccggccacagtggcagtgtggtggtgtttggcctcggcacgaacggcgtgatttcgaatgagcaggaagtgcaacagctcattgacctgaccggcggcaagccgacatacttcatcaccatccgtatgccatacccgtggcaggagaacaacaacaatacgatgctgcgtgaggccgccaagaagaacaagaacgtgggcatcatcgattggcatgggtatagcgaaggtcatagcgaatacctcaacgatgacggcattcatccgaatatgaccggtgcctatgcgtacgcgacgatgattcgtcaggcggtgtgcggccagtaatcgccctacaacgcaggaaccccgcggcttctcgaaagaagcgcggggttcgagcggtatgtcctggatttgttgaccagagggcccggatcagcgggcgtagaattcgaccacgtactggatgttgacctgcaccgggatctcttcgacctccggcttacgggtcacagtggccttcagggacggcaggttcacgtcgaggtagccggggaccgcaggcagcacgtcacggtgcacgccttcggcggcgatctggaacggaaccatggtctggctcttggccttcacctgaatggtctggccgggcttgacgcggtaggacgggcggtccacgatgttgccgtcaacgaggatgtgacggtgcaccacgaactgacgggcctgggcggtggtgcgggcgaagccggcacgcagcaccaggttgtcgagacgggtctcgaggtcggtcagcatggcgttaccggtctggccggcagtacgggtggccttctcataagcggcgcgaagctgcttctcggagatgccgtactgagcgcgcagacgctgcttttcgcgcatacgcaccgcgtaatcggactcggtgcggcggcggtcacggccgtgctcgccaggagcgtacggacgcttttcgaagatgcgctgagccttgggggtcagtgcgatgccgagggcgcgagacagacgcacctgacggcgagaacgctgaacgttcgtcattggattaatccttctgtcgttatctgaacggaacgcttgccttgcatatgcctggcaagcgctgagccgggcctccccagcgcttcgtcgtgaacgaacacgaacgggttggttttcttgcgatcacctaccgccgacccgctgatgggctatgactccagacggtatctacctgttggcagacaccagcagactatattacaccgaggctatggacagcactccggcgtccatgcgatacacccggtctgcgtattcgagtgcatcgggatcatgggtgaccatgagaatcgccgtgccgttgttggcttggtctctgagcagacgcattacgatgtcggtgctctcctggtcgaggtcgccggtcggctcgtcggcgatgagcaggctcggctggttcatcagcgcacgggcgatggagacgcgccgcatttcaccgccggacagctcgcgcgggtagctgtctgccagatcggcgacaccaagctgggtgagcagcatgcgagctcgggtggcgaacaggtccggacggctcgcagccgtgtttgacggcgtgttttcccggtctgtgattggcgcaatgacatccggcatgaacaggtcggcggctgcttcatcattggtggcagcggcttgtgccacggcatcggtcggcgcaacagcgtccacctgagcaacggcatccgttgcttctgcgttttgggcgaacggcagcggctccggaaacatcgttgcgggcagaatcacgttgtcgagcacggtcaggttgccgagcagggtctggctttgggtcacgaatccgatggtgcgattcctcagcacggacagtgctttatcgcccaagtcggccacattgcgtccagccacgctcacggttcccgaggtcgggcgaatcagcccggcgaccatgttgatcagcgtgcttttgccgttgcccgaccggccgacgatggcgatgaattcgccggcatcgacggtgaggttcacgtggctgacggcgtcgaacggcgtgccgcggcggacgaactggcgggtcaggtccgtcaaggtcagcagatggtccggggagggcgtctcggttacgtgcggcgaatccggcgcagtcggcgcgttcggctgagctggcgtggtcggctggagcttggtcggctcaaccgtggtcagctgagtcggcgtagttgtctcagtcatatcactccccctctcgcagggtcaggtaggcttcgggccggccgagacgccacatggtggccagcgaaccgatgatgccgatgaccgtagagcacacaatggtcacggcaatgaatccgatcaccgcaaccgggctggcttgcagatacggcaattgaagttgtttgccgatcagcgaactgaatgggaaaatcaccaggctggccgcgccgacgccgattacgccaccgatcagaccgatgatggcggattccttcagaatgatgacattcaacatgccgcgcgtggcacccatgatgcgcagggacgcgaattcgcgtttgcgttcgttcaccgacgaggcgaatacggcgagcagcacaatcacgcccattacccagatcaccgccacgaaaatcttgaggtaggtgacaagcgcggtcagcgaagttctggtgttggcggtgatgccgccggggtatacgtaccccaaatcggcgaaccgggagtcaagacgcttgatgttttcagccacggtctgcgcttcgtaaccccgctgcgtcttgatcatcacggtggagacggcttcgcctgcatattcggcgggcatgacctgcttggagaccttggccgaggcggcgaccatatcaggcacggtgttttggttgatgaacaccgaattgtcgaggctggtgccggtgttggcgagctgggcgacgaccggccacttatggccgtagagttcgatggtgccgtcggtggacacgttgacgtttgcgccggcaatcatctgaccgtcttcaagggggccttcgaactgggatgcgacccatggttcgatgacgaagtcagtgtccgggtcgtaaccgatgatctgcagcttttcggcacagcaggcggcggccagcgatgatatataggtctgttcggtggcctgtgcgatgccgtcggcctgcatgacctcgtcggcgatgtctttggtgaaatagaaagtgctgggattgccgctggtgagcagcgcttcagccttctgcgcggtgttttgcggcacgaccataaggtcggcgcccaggcgcttctccatactggtcatgccggtgttgaggttcatggtcagcatggtgccgccgaagaacgtcagcgcgaggatggtgacgacggcgagcagtgcgccggtgcggaacggcttgcgtttgaggttttcaatcggaaggccgcgcaatgcgatatgggatggcacgatgagtccttatgttgcttatagtgcggttgcaataagcgagaccggagtccagcgttcggaatggctgggctccggccgtctgctcgatcagttgcgcttggcggcgcgagagtcgagccagatggcgatggccgcgaacacgatggtgagcacgccgagcacgatgagcgtgggcagcataaccatgcggcagtgcatcatcgcgcccttgcagatgccaatcaggaaggtgggtacggcgagtagtagcagggcgttggctgcggcggcgatattgaggccgatgcgaatctgcggggcgacgaacaaagccacgacgcccaacacgaggatgacgacgccgatgccggtggccgcctgctgcgagtagtggcaggcacccggcatgtcatggccggtgcaggcgtgcgcaaaggtctggggcgcgatggtgatcagcgcgccgaacagaatattgggcacggatgcaaacagcttgttcttcataactactttttcctctcccctgttcccagggctcgtaggcacaacctccgcattatgcccagatagtgatgaagaacacaagtcttgttttttgtgaatttatttggtatataactcagcccctcgtcagaggggccaatctatctacaacttctcaataggtgctacgcggagcatgaggcgtttgacgccggcggagccgaagtccacggtgattaccgaattgcggcccttgtcttgcgcgtcggtgaccttgccgagaccgtactggtcgtggctgatcatgtcgcccacggcgaagtcggcgatattcaggccattgtccttggtgagcttcgagctgggcacggcagagccggtcgacccggatttcggtgtggtgcggcgcgtggtgaccttgccgccacgggtgccgccatatgaaccggatgaagaaccggaacgggaacgcgacccgtaagacgaccccgaacgggagcgagacccgtaggaggacgagccggagcgggaatcatatgatgatgaacgggaaccgtacgaagaacctgaacgggaaccatacgacgaggagccggaacccgagccatacgacgacccataccgcgaccgcgacccataggacgaacccgaaccggacgaaccacgcgagccgaacgtcgacgacccgccaaacgtggcaccgccgaaatcgtcatcatcccagccgcccaaatcgtcggcgaatccatcggtctcccagttggcgcgcatacgctccacgccggcttcacggcgtttccaatcaatcagcgaatccggaatttcgtcgaggaattgactgggcatcatatcggcggcctggccccactgggagcggacggcggcgcgcgtgacatacagtctctgcttggcacgcgtgatgcccacataggcgagtcggcgttcctcctgcagttcagtggtgtcttccatcgaacgcgaatgcgggaaggtgccctgttccatgccggtcaggaacaccaccgggtattcgaggcccttggcggtgtgcaaggtcatgagcgtcaccttgccggagtcctccgcctcaccgggcagctggtcggagtcggccacgagcgcagtggtctccaggaatgcggataacgtggcgtcaggcgtgttctgttcgaattcggctgcggtggactgcagctgggagaggttctccagacgggaggcgtcctgcggatccacggatttctcaagttcggcccttaagcccgacttctccaatacttcggccacgatctcgctgggcttggagtcgtgcgcgtgcgtgaactgcgagagcgcgcccatcagatcgcggaatgctcgtagcgaggtggcggtgcgggtcggcacctcgatctcatccaagtgcatgagtgcgtagaagaagctggtgccatgctcgcgcgcgtaggcgagcagcacgccttcggcgcggtcgccaagcccgcgcttgggcacgttgagaatacgacgtagattcacatcgtcgtccggattgacgagcgcctgcaaataggccagcgcatccttgatttcgcgacgttcgtagaacttggtgccgccgacgagctgatacggctgattcgtgttgatcagcgcctcttcgagcgagcgggattgggcgttggcgcggtacatgatcgccatgtcggagtaggagatgccctcttcggcgtgcaggcgcgcgatttcggtggccacccactgggcctcctgctgggcgttgtccgccgcgtagccgacgatcggctcgcccttgccgagcgcggtccacagtttcttgggcttgcggccctcgttgttgctgatcaccgcgttggccgcgtccagaatggtctgcgtcgaacgatagttctgttcgagcatgatggtcttggcgttcgggaagtcctgctcgaagtcctggatgttgcggatgtcggcgccacggaacgcgtagatggactggtcggaatcgcccaccacggtgatccaggcggggccggacttgccggcgttcggcgcgcccgggatggccttctcccccgtgtccacgccggccagctcgcgcacaagcacgtactgggcgtggttggtgtcctgatactcgtcgacgagaatgtaacggaagcggtgatggtagtactcggcgacggccgggtcggtgcgcagcaactcgaccgtgcggccgatcagatcgtcgaagtcgacggcgttggccagggccaagcgatgctcgtattcggcgtagatcaccgcatagatggcttcaaggtcgcccaccgtgccgaactggtagccgcgctggccaggcgtgaagtcaggcgcgtgaacggcgaggttttccttccaaccggtcagattgttcttgaggtcggagatatggccgaggatcgagcgtggagtgtagcgcttgatgtcgaggttgaattcggtggcgatgattttgacgagtcgctcggagtcggcggaatcataaatggagaagccggacttgagcccgatggacttgccgtcgcgcctcagaatgcgcacgcaggcggaatggaaggtggagacccacatgcgctgggccaccgggccgatcagcgagccgagtcgttcgcgcatttcggcggcggccttgttggtgaaggtgatggccagaatctggctcggccatgcgccgaactggctcaagatccaggcgatgcggcgggtcagcacacgggttttgccggagccggcaccggcgccgatcagtagcgcctgaccgcggtattgcacggcttccgcctgctgcgggttcagatcgcctacgagttcctgcgcgctgcgtgcgatgacttccggctcgtcgtacactgttgcctccctttgaatcgcgacattcatgtttaccacatgcacgggtcagcgcaggacaacgtacacttacaagtatccatatcattcactgacatacagcaatgggaggtctaatgcaggaacttgaggagcgaatccagagcgagggaacggtgaaggcgggtgatgtgctcaaggtggacgcgtttctgaaccaccagtgcgacgtgcgtctgttcgaccgcatgggttcggcatgggccgctcatttcgccggcaagcacatcaccaagattctgaccatcgaggcgtccggcatcggcattgcgtgtgtggcggcccagcatttcggcaatgtgccggtggtgttcgccaagaaggcgcagtccatcaaccttgacggcgaccagtacaccaccacggtctattccttcaccaagcagaaggagttcccggtgatcgtggccaagaagtatctgaacgccggcgaccatgtgctgcttattgacgattttctggccaacggcaaggcgttgcgcggtctgattgacctgtgcgaggcggccggtgtcacggtcgagggcattggcatcgccgtggagaagggcttccagggcggcggtgacgcgctgcgtgccgaaggctacgatgtggattcgctggccatcgtcgagtccatgaatcccgagaccggcgaaatcacatttaggcactgagcacattgactgctcccgccagcgggagcaacagagagaagaaaagaatcatgtcagagaagaaaaccaagaattccgtatcctttgaggcgctgtcttcgctgaacgcgccagtatccttctggaagggcattccgttcggcctgcagcatgtgatggccatgttcgtggcgaacctcgccccgatcttcatcgtcgcctcggccgcgaaaatgaccccggcccaatcggccaccatcatccaggccggccttctggtggcgggcctgggcacctgcctgcaactgtacggcgcgtggctcatcggctcgcgtctgccgatggtcaccggcatctccttcacctacgtggcggccgccgtggcgatctgcgcagacaagggctatggcgcagtggccggcgcggtaatggtcggtggcctgctggaactcgtgctgggtttgacggccaagtattggcgtcggttcgtgccgcccatcgtctccgccatcgtggtcacgtcgatcggcttctcgctgcttaacgtgggtgccacgagcttcggcggcggcagcggagccaaggacttcggaagctggcagaacctgacgctcgggcttatatctttggtcgcctgcctggcgttccagctgttgatgaagggcacggccaagcagctgtccgtgctgttcggcctggtggtcggctatgtggcggccatctgcatgggcaaggtcgatttctccggtttccagaacctcgctattgtgtccgtgccgcagttcatgccgttcaagcctgagttcgactggggttcgatcatctccatcggcctgctctacgtcgtctcctcggtcgaggtgctgggtgacaccgccgcgctgaccaaggtgggcctgaaccgtacgcccaccgaacgcgagaccgcgggcgccatcgccggcgacggcctgatctccaccgtatccggcctgttcggatgcctgccgctgacctcgttcgcgcagaacatcggattggtggccatgaccaaggtcgtcaaccgcaaggtgattctctccggcggactgattctggtgctggcgagcttcgtgccggccatcgccgaggtgttcaactcgctgccgcaggcggtgctcggcggctgcacgatcatgatgttcggcaacatcattctttcgggcttccagatgatcgccgaagcgggcttcacgcagcgcaacatcacgattgcggcgctttcgctgaccatcggcatcggcttcacccaggtgagcgacatcttcgcgcagttcccggcactgttccaacaaatcttcgcctcgaactgcatcgccgtgtcgttcgtggtggccgtaatcctgaacgccgtgctgcccagcgaggagcacttcctctccgcgcccaaggaggcaccggccgcggacgccgagtgataacaacgcgacatatcagctgcgcataatcacatgctgatgccctatcgtcttgcaggatgatagggcatcattgattttgagagagactacaagttgaaccatgagttcgagccggtggcgtgtcgatcaatcgacatcttcccattcgaggatgtctccgggttggcagtcgagtgccttgcagatggcgtccaatgtggtgaagcggacggctttggcacgtccgttcttcagaatggacacgttggcgggcgtgatgccaatttgttcggcgagctcgccgacgccaatcttgcgtttggccatcatgacgtcgagattgatgcgaatcgtcatctcaaatcacctgctcaagttcgcgcccgatccggacaaggagaacagtttccatacggccacgaacgccgcttcgatgcagagcaggaacagcacgcccataatgagatatgaccagtgcatcgacgtctgtctcgggcagaggccggccagcgcgccgctcaatcccggtacggcgaatagttggccccataggcaggccagccagaccagaatcacgatggctttcaacgcgagcaacacccatcggttcatgtagtttttcatagcccggtcctttcaggtgccgacgtttttggcgacaccgcgaacatcgatatgactatatcgaaaaacgatataccttgcaaggcgtattgcgtcaaccggcattggtcgctcatatgcatataggcttcggcagactgtcagcagaccgtcagctcaacggaacgaacgccatatgagccacccattcgcgcacgagcgtgatgacggcttcgggttggtcgatgtgcgcgttgtgaccggcattatccagagtcacgaaggtggcgttgggatagtgcgacaacagggcttgctggtcttcgtatccgacgatctggtcttgcttgccggtgacgatgagcaccggacccgcatatgtgccgagcatttcctcgggattatcggccagccaataacgctgatccagccgttcgcatgccgcacggtcgcacaacgccacgccgggcaggatgaaccgttggtagcgccgccacgcgtcgaatgactggttgacgcccatggtaatgaaatcgaacacctgttcctgtggcaaggagtgcgtcagcttgggattgggctgtgcaaccacatgttcggccacatgccggccggcatgctgcgggtccacgaccggcgcgatcaatgccataccggccactcggcgaggttcgcgcgccaatacttcgcggacaagcgcaccgcccatcgagttgccgaccatggcgaatggagccgttttaccgacaaggccgtcaatggccgtttgcagccaatccgccatttccggcagcccgcaggcatgctcgggcaatgccggcgtacggccgaaaccgggcagatccagatatatacggcgaattgaatcattgccgtcaaacgccttgtcgagcatcatcagcgaacgatggtccacacccatgccatgcacgaacacgacgggcaatccatcatcattgccctcaatcgcgcagtacggctgcaattgtgccatgtgttcctctccttcaacccggtacaaatcgcctttcacacaatagcggcagcagctcccctggtgtcggagcaatcccgaccgccattctcggtttcgaggggctgatttcgtggtttggggacatccacttccgtttcaaggggctggtcattggccaaaacccaagtacgaatggcttcatgccaacgtcatttcgccgttttggagctgtcgctactcggccatcagcccctcgaaacggaagtggatgtctcggaacgagcaaatcagccccttgaaacgcaaatagacgattgcgaatcgacttatcagccgcgtcgaacttgcaatagagatgtcggtgtatcattccccggtctgattgcgcggatgtcaggaagcgtgaagaattgtcacaaagtcgcgtgatggcgcagccgccgttcaggtggatatgccacgctgtcatgatgacggccgagccggaacacggcaaatctcgcatgctgcataggccagccggtcacggtcagccatgacaccgaaatattggaggcgcaatgggacaacaggtgcggtacggcagacgccgctcccatggcgcgggcgcgctgattgcagccgtcatacttgttgttgcggcgctgatcgcggcatggacgctgctgccacggctattcacgcctcacgagaccgcgcgcacggccgaggaagcatattgcgcggcggtgtcgcccgacggagcccgccgcaccttgacgcctgatcaggcgcagaacgcggcgctgattgcgaacatcgccgtcacgcgcggactgccggatcacgcggcgacggtggccatcgccacggccatgcaggagtcgaggctgacgaatctggactacggcgacttggattcgctcggcctgttccaacagcggcccagccaaggctggggcacggcggagcaggtgtccgacatgacctatgcgacaaacatcttctacgaccatctgctgcaggtgccggattgggagacgattccggtggaggacgccgcgcaggaggtgcagcgctcaggctacccggaactatatgccacatgggatgcgatggcacgcgcttgggcctcggggctgaccggcgaacggtcggcgggcgtcacgtgcgcgttggagccagcaacctcctcggacgcggacgggttggttgccgccataagcgctacactgccgaatgtcaaggtctcggttatgcccctaaatggcaaaaccggcacgaacaacggcgctgcgaccaatacggccagcacaatgttgacgatcacgctgccggacggcctgtccgccgacaaccgcactcgactttgctggcagacggcaggctggctggtcacgcatgcacgtcaatacggcattgacgcactgcacgcggacggcatgaattggaaccgcaaagccggtacatggaccggcaccgaaaccgccgagcagaccgtcaccgtcacgcttgcgtgatgtgacctataacgccgtcgcgaccacaaatccgactgactggagcctacgccgtcgatgctgcctgaggcacgacacggatatgttttttactcgttcgaatgagcccaatccacgacggcttcgatgttattgccatccgggtccagcacgaatgcggagtaatagccgggatggtacgggcgcggaccgggagcgccgttgtctcggccgccggcggcgagcgcggctgcatggaacgcctgcacggcttgctgactgtcagccaggaacgcgatgtgtgtgaccggcgtgaccggcgaagcctccgcctccggcccgtcaatcggcgacacgtagaaatcggagtgcagggttccgtcatccacgccgaatccgagcgtgggctcatgatgcgccttgacgatatagccgagcggtgcgagcgcctgtttgtagaatgtgatgctacggtcgatgtctttcacgtgcaacgtcagatggtccagcatggtcttggtcaccctcccctggttcttgtattcgattgctgcttgcagtgtaagcccgaacgtttcccacagggccgcgcatggctatgatgagagcaatcgcacgtcgagttcgagacaatattcaaaacgaatccaaggcaatagggggaatgatgatgaccaaggcactgattgtggtggatatgcagccgacgttctgtgaaggcggcgaactgggagtcgaaggcggcaacgcggtcgccgagcggatcgccgattatgtgaacgcgcatcgcagcgagtacgcgtatatcgcaaccacgcaggactggcatatcgagccgggcgcgcactggtcggcggaaccggatttcgtggacacgtggccgaagcatggtgcggccggcacgccgaacgccgaattgcatccggcgatcaaggcgctgattatccatcatcatttcaagaagggccagtattcggcggcatattccggttttgagggcatcgaggacaataccgaccgtatccagacccgcgaggaggttgcggccgagcaatccgccggcaagacgctggccaatgcgctgaaggccgccggcgtgagtcacgtggatgtggtgggcatcgccgaatcgcattgcgtcaaggacaccgcgctcgatgccaggaagttcggtttcgaggtcaccgtgttcgaggacctgaccgtaccggtcagcgaggagctcggtgtcgcggcccgcaaacagatgacggcggccggcatcacattggccgagtcccgctgatcaggccggatatacccagagcgaacgcacgaacacttccgtatattcaaggccgacactgccgcatagtcgcctagtcgatatgtgaagaaggcttttatggttacgatgctgctgacttcgatattccgcaacgcctcgtccgccgtgcatgaagtcgaaccgcatccgcaaggcaagcgggtcgcgttcatcccgacggcgagcgccgtggaaccgtgggggccggttcactcggcgttgagcaaacacgcgctgcaacgcctcggtttcgaggtggagcaactggatgtggaagatgtgccgagcgggtccgccgaacgcgtcacgcgtagcatcgccgaggccgactgcatctatgtgggcggcggcaacacgttctttctcctgcaggagttgcgccgcaccggtgccgaccgggccatcatcgagcaggtgcgcgccggcacgccgtacatcggcgagtccgcgggctcggtcatcacggcacctgacatcggctatatcaagctcatggaccgcacggacaaagcccccgatctcaccgattacgcaggattgggcttggctgatttccgcgtggtcccccaccatcatgcaacggccatgggccacgccgcacaacgcattctcgaccggtatggtgccgatctcagtctcaagcccctcaccaaccggcaggccctgcttgtcaaggatggcaaaacccggctgctgcgatgatgcgggtcgtcggcccgtcgcccattcggcatcaccgtggtgtgtccggcctgacatgcctatcgagcggcatcaatcacacagcaatgtggctgggaacctcgccgaacgtcaacacctgcatacatcagcacggcaaaatctgccgaaatcgcccggcgcacgagatgccagccggccccatccgtcacctcagtgccgtaccgggccaggcatggccttgagcaacgggatgaatccggcgcacagtaccagggccacgacggcgagtatctgccagtgggcggagccga

SEQ ID NO: 622 - DNA, 11015 bp, Unknown
  R14_15m  MAG No. k141_7020
acctcggtgatgttcggcgcgtaggtcgccaccgaatcaggccggttctcctccgggttggtcagagcgatggccgactgttcacccagatgctcgatgtcgaacgccttgcgtgaggccagcgaaatcacgcgctcggtcaactgggccgggcagctttccacattcgggcagcggatgtccttgtcaccctccttggcgggtgccagtttcgcgccgcatgaagggcagaactcgggcatgacgaattcgcgcagctggccctcacgccctttgcgccgttcaagcaccgggccgaccagttcgggaatcacatcgccggccttgcgcaccaccacggtgtcgccgatcaggatgcccttgcgtttgacttcaaatccgttgtgcagcgtggtacgagccacggtggagccggccacgtagacaggtttgagcacggcgaccggcgtcacacggccggtacgccccacctgcacggtgatgttgagcagttcggtgttgacctcttcgggcgggtatttgtaggcgatggcccagcgcggcgcgcgcgaggtggcaccgagggcgcgctgcaggcccaggtcatcgaccttgacgacaatgccgtcgagcgcgtgctcgatgtcgccgcgatgctcgccgtagtactcgatcatgtccaggatctcctggaatgaggtcaccgcacgattatgcggggagaccggcacgccccacctggtgtatagatcgtaggcctgcgactggtcggcgaccacgtcatgggtgccgcgcggatggtccggcccccaggtgagctgccccagaccatgcgcatagaaactcaggcgacgggtggcggtgatgcgagggtctttttgacgcagcgagccggcggcggcgttgcgcgggttggcaaagggcgctcgtccggcgtcctcctgctcgttgttcagggtgtggaagtcatcccagcgcatgaacacttcgcctcggatttccacgaagtccggaacgtcttccttggggccgccgaggttggcgggaatggagccgatggttcgcacattcagggtgatgtcttcgccggtaacgccgtcgccgcgcgtcaagccctgttcaagcacgccgttgcgatagatgaggttcagggcgaggccgtcgattttgacctcgcagctcatgggcaggggcttggattcgggccaatcgaggtcgcgaatcaccgaatcgtaccaatccttgagctcttcgatggagaagacgtcatcaaggctcatcatgcggctggggtggcgcacggaggcgaagtcgttggagaaggagccgccgacgcgatgggtgggcgactgtggattgtccaatgaggggaacgccgcttcgagtcgttcgaggcaacgcatgcgcgcgtcgtaggcggcgtcggagctgacgggtgagtcgtcgatgtagtaggcgatctgatcggattccacccatgcggccacgcgagcccacaggcgggcggcggcctcagcggtcatcgtgttcacgtcgaaacggtcgaggcgtatcgcgtcgtcgtcagtgggctgcagtgcggctatccattgttcggagccaggggcaaaacgtgcgataccggtatcaggccggacctcggccacatccccatcgtcgaaatcccatgccagttgttcattcgtgctcatggttgtctatcctagcgggctcggctcccctcggccggctataccgtcaactcccctcaggcggctacgcggatagcgagcgcaggaactgggcttggatgatgtcgatgttgtcgccttcaccgtcattcatgcgggccacggccaccgagagcgtgcgggccggcacgaacatgccttcatccacgcacacgcgggcggcgtcacgcacgatgtcggccacttcgttatgcggccagaccggcagatcatgcgtggcaagcacatgggcggccgtctccaccgattcaggcaccggcatgcactgcgagtccgcacgggaaaccagttcctgcagttcgctttccaacgaaccaatggccccgggagcgatgtgatcgctcataatgtaggctgcggcggctgtgtcgaaccggtcaagcatccattcggcgtacgcgaaccggtagtaggcgaacgcggcatcgtcgcggtccaaggccacgcgcagagcattcaggcaggcggcgcgtgccgaatcccaatcctcattgcgggccagttggatggcgagcttcagatgtgagagcgggtaggcgggcgcgtacgccaccatacggttgaggtgcgggatggccgcctcggcacccctgatctggctcaacacgtcagccagctccatgtgtgcgtagaacagattgtccgggatgagcaccgtacgctcgtccaatgtggcgaacagccggttgtagaccacgcgctcggcataggagttgaagtatcgaggtacgccatggcctgccgcatacacctgatccaaatgggccacagccgcttcggccgcttcgatggcctgatcggcttggcccgagaacagcatgtctcgggcgcgcagacgctccttgtcaagatcgtcggcaagcgtgaacgtgaagtccggggtgtccttgccatcgatcaacgcactggtgacctgagaggccaaaccggtcagttcgggatcgcatatcgattcgatgatctgcatggctcgctgggccttttccacggagccgagcgacgtgttcctggcgatatcgtggaattcgttgacgccatgctgcagtaagtccactcgctggatagccagtccggcactattctgtgcgcccagcacgtgagcggtcgccgggctgaattgacggtcggccagttcgggctcctcctgggatccggtgggagagaaccggctgtccgccaagtcgaagtcggcgctgatgggtttcaggccgccttcgccgtccacgtccatcacggcaccgaacatgcggtaggtttcctcgggattgtcaagcccatcggtgtccagtcgcttgaggaaggcatcacgggtgaaggtgacggtgaccatattgcgcacggtgggattgcggcgcagcacgctcatcggatcatcgtccatgccggcggccccatcagcatcgtcagtgccgacgccctcgccgccgataccgcccaggtcgtcgcctgcgccggtatcgtccggcatgccgaacgccatttcgtcgatatcgacgcccttcatcaggtcttcgaactgcgaatcgatggacgcggcgccatcggcgtcagcggattcggccgcggcctgatccgtagcatccgcagacggtccggtaccgttgcctgttcccccgtccgtgccgcgttcgtcaccggacgccgcctgcccgaacgtctcctcatgggtgatgggacgggtcgggtcgccatggaaatcaccatctttggggtcggctttggaacccacacgccccaaatcgccactgcgcagatgttcgaaggcgcttagggcctcgctcatcatcgcctcgatggcggaatcctgttcggcaatcgcctcttcaagaccaatggaatcgatgtgcaacgacacctggcgcacggattcgctggtgccgaaactcagcgctgccatcatcaggccgacacgcaggttgtaggcggcgctcatcgacgcgcgttcggcgctgctcagcgcacgccacgtacggcgagtggtgtcataccggctatcgggcatcatcgaggtgccggcagtggtgaagccaatggccacttcacccgaatccaagcgcgaccggaactccacatcaaaccgatacggcaaccgtaaccggcgcaacagtgaggagagggtctgacgatacacccattcgtcgctcctcgccggcgaatacgaaggccgagcggcttgagtgttggtgtcgctcttattggtccgctctacagcgccctcaacactctcagtactttcagcgcccgcagcattcgtcacacccgaatccggcacgttctgctgggtcagcacatctcgaggatcagggaattcactgcgaatctgcccagccgtgcgtgcggcgatatcgaccaggctcagcacggcccgacgctcctgctcgccatcatacgggtcaagcgccataatcgcagggttctcaatgagtttcatgtcgatttgcgcggcctcggcacgggtcaccgtatcttccgtagggttgcgccccaaggaagcgttgcgctccagccaagcgctcaccgcagcgaatcggttgaggttgccttcgatcttcaaggatttcagcgcctgcccgaatgccaaggacttatcccacgtaaagaaatagccgctcgaatacgtcgaggtgtacaggtgcaacggttcggcgccatgcaccgcttccagtcccggcgtggtgtcgagggcgccggcttcgcgcatcagatcggcgaagtgatcctccagaccggaggcccgcatgccgtgggctcgtgccgccaaagtgtcacgcaccgaacggcgaatcgcaccgattggcgcctcacggttgagacggcggaagatattgccggaaccgaatccgatgagcagaccattgatctgcggcaacatatacgtggcgaagaacgcgatggtaatggcatcgcggtattccaaatcatgacgcatcacaggcggcagattggcacgcatctgctcaagcgtgtaccggttgccggccttgagccatgaggcgagccacgtcatgcgtccggtgtcgtcacgccccaccacgccaccggtaatggccttcacgccgtcagcaccatgaccaaggccacgccccaaaccacgcccatgatgcagcgcacttcccaggccatggcctgcacgggagaaaccggaacgtgaacgcggctcgtcgctttcgcccagccgctcaccgtccggcagagtcacttccttttccttgccgaacatgaatcgcgcctgcatatcctgcacgtccatgttggggtcggtgcccacgaatacgcggccatgcgtatcggcgaacgccacctgcgcaaaatgatcgcggtcggggaaaatgccaagcgaaaagccacggcctctggtggagggcagctgcgcccatccaagcaccagcccttccggcacgttctccaattcggggaaggtgcgtcgcttgattacaggactcagcgccactgcatggcgagtcagttcgtcgataatgccgcctttacgctcactggtctcccgcaaggcatcgccgaacggattcgtatcgtgcttcttcggcttggacagtcccagatcggccgcgagcgcgttcatcgaatccttcagcccgcccagcagtggcgtgcggttgtgcttcccatggtccgatgtacgttttggcatgattcacattgtctcttgtttgcccgacatcaagcccgaataaagcctatagaataaatgcgtgcattccatagaccacactcgcgcagaccgtccgatgccgtcgaatcatgaacggcacctgcccagccgcccggatacccggcaccggctgcgtttggtgcgcctgctgatcgccttgctggccgccgtcgccgccatcgccgccatggagtgcatcgtgttcaacctgccgttctggcgtacgctcggagcgagcacggatacgaacgccgtgcataacacgctgggttcgggtctcacgcgccggaatgatggcatgttgaccgtcaccgatccggccaaggcctatcttgaactgaccgcggacggcacgtcggattacctacgcatcgataccgagagcagcaaggtcatcgataaggcccgcgagcaggccgaggccgaatccaaagcgaacgacgataaggacgtcttcaaaccgctggcgaccattcatgtgcgcgcggatgtcgatggcatcaccggcaaggcccagtcgatgaatcccgacgctattcgcagccattatgtcaaggcgccgggtgccggcatcgtgcgtatttggattcaggaagagcgcggcgcgatcgtaccggtcaccgacgcccgcgccaacgtgcgcgtaccgttcgtcatcaattggatgcgcgtgctcgccatggccttggtgctgctgatgattgccgtctggaggccgggatcgcgcctgtggcgtatcacgcttgacccgtccagcactcggcaacgacttgctttcgtggggcttctggcgattcctaccctgcttatcggcgtatccatcatccacgaactgtggtacgcgtcttcgctcgtcttccacgtttccggcgattacacctatgatttcgaccagtatgggcatgtggccgatgcgctggtcgccggccggccctggctcgacttgccggttcccgaacaactggccgccaccgagcacccctatgacgtagccacacgtgcccagctactcgccaatggagccagtccgctctactgggattacgcgtattatgacggtcactggtattcctattttggcgtgttgcccgcagtgctgctgttcgtcccctatcgtctgctggccggtcataatctgccgacatccgccgccgagtatattctcgtgctgctgttcatcatcttcttctccttgctggtgctgcgcgtcatccatcgtgtgatgccgaagacttcggtggcggccgcgtcgttagtagtggtctcatcgttggtgagcgcgcaagtggggtatttgctgtatcgcacgaacttctatcagataccgttcgccgcatcgctgacgttgacgtcgctgggactatggctatggctcggcgcggacacgtcccgccgtccgctgagaccatcggaccgatggcaggcgggcgatgccaagcctctctccctgccacgactggccttgggcgccttgtgcattgcggcgaatttcggatgccgaccgacgttcaccttggccgcattgcttgcgttccccctgttctggccgcagattcgcgcgctgggcaccggtctgcgcacacgccgcatcaagccgttgcaggcgttgcgcgcgccgctggcggtaatcattcccgccattctcgtcgtgacgcctctgatggcgtggaacatggttcggttcgattccccgttcaatttcggcaatgcgtatcagttctccatatccgatatgacccggtataccaccccgtccgcggatatgcccgccaacatctggtattacctgttcctgccgctgcgcttcatggatcgtttcccgtggctggcgggctctcccgccccgatgccgcaatggggttattacgaggtgatggtcggcgcgattttcacggccacgccactgaccttgatggctttggcgctgcccctgctgcgcagattggaaacacacggcatgcggccatggctgatgtcttgcttggccgtggcggcggtgctggtcgtattcgacagccgcgtcggcggtttgggatggcggtattccgccgatttcggctggctgatctcgctggcgtccataccggggctactgtggctggtcaatgggcgcgaaccgagccggtcattggcgggggccaacgacgccgcttcaggcgatggcatcgcccgcgtcactccgtggcgttggctgatgcgctgggtcgtggtgctggccgtattgtgggcgctgggcatagccatactgagctgcttcgtgcagtcgcgcagcgattcgatgatcgacaacaatccgacgctctggcatcaggttcaggcatggttcacgatgctctagtctcgtatcggcgtcgaatcagatcctcataaaacgccacagcctcagccggcgctccgtcaaacacgaccgcgtgctcgtccagcaccagtatgcggtcgatggcgtattcgggccggcggatcatatccgtgtcatgcgtggcgaaaatcacctgcttgttgtagctgaacaacgccttggccacatgcgcggtgccaatctcatccaatcccttgctcggctcatccgccacaatcgcactcggctcaaagctcagcgcggccgcaatagccagcaggtgccgtttctcggagtccaattcgccggccttggccttggagacctgcgccaaatcaaaatgcgcgaacagattaccgatgcgcgcatgacgttctgactcgggcaccttgtgctttttcaacgcttcggaaacagcctcggaaatattcgccgcttggtagaaactgttcggaatctcctcgcggcgaactttgccgaccagattatcgatgcgcttcgcgtccttcttcacagccgggtcaagacgttcctcaccgcccgcaatggtcaccgtgccggcgttggccttcaacgaaccgtccagcagacccagcaatgtggatttgcctgcgccgttcagtccgatcacggccacccgccgctcgctgatggtgatgtccgtgggagcaagtcccacgtgcccatcatcatacgtatgcccggcctgttccaaagtgaacgtcagcgatgccgggtgtggcagttctttcggtctaaacaagaatcccatgccgccattgtacgtggagtacaggtgtggtgccggcaaacaccggcctatcgcagcaaagcggcgacggtattgagcacggcgcggatgccacgctcgaattcgtccggttcgggcagcagggaaacggccaggtatccattggaggtcatgtcgaagaagtagccgggctgtccggtgagttggtgctcgtcaatcagccgcaacaccagttcgttctcatcgatgacggaaggcactcgtaacagcacgttccagccgccttcggcccgtagcacgctgaccagcccgttgggatcggcgtcaagcaactcgtgcaacttggccaggttattgcgcacgcgctcccccacccgtctggtctgtgcgggcgcggcgttcaataatgcgggaatccgttcggcgatgatgtcgcccatcggcagataatcgtcggcgatgacgtccagtcgacgctgggcctcggcaacgtcctcggcaggtccggacacctgaatccacccgactttggcgtgcggcgcggccagcattttggagaatccgtctagggcgaaggtgagcacgccgcgctcccccgcgagccgtgcgtcgccggggaaaggttcgagagagtaatcgaagaacacttcatcggcgataagggcgatgccgcgctcacggcacaatgtcacgatacgtgcacgctcggttggttttacgtacgaaccggtcggattgttcgggttgatgagtaccaatgctctgacgcgttcgccaccgggctcgctgagtagccgctcgagttcggcgatgtcgatgaaccaggagccgtcgaattgcaactggtattcgaccgtatcgacgcattcaagccgtgcaatcgactcaatcagcggatagccgggtttgggtgccagcaccgcgtcgccggcatcgcaaagtaacttaatcagccacgaatacgcctcggacgtggagctcagcaggtacagggcgtccgggtcggcgccctcgatggcggtattcacattggtgaaagcggcatggcgctcgttcctgccctcgccggcggcgggcgaagccaactgagggctgcttgcgtctaccacgtttgccgtattgaggaatgcggccaatgattctcgtgccgcacgcggtccacgcgggtcggccgtatacacgctcggcaccaattcgggtgccaacccgtggcgggtcggattggaatcgttgagtttgctgagtgcgatgccgtttgccttggctgccgcctcggccgccgcaatgggattcggcgcagaaatatccacacgagaagagaaatgcacgctcataccctccacgataaaaccacccctgccgagccaggtatatcgaggcctcatatccaccagcatccagcactacgacaatcgtgcggtacggcagcggagtcgtcagacatactatgacttcaatccacatcgaataacggcctagctacattcattaggtcattttcgcgctcattaggtcactgctagtcgagcctcacaattgttgatgcttgaaacgccgccattccgagcccattgcaattcaggtttggaatgggagtgacctaatgaacacataatcgacctaatgaacgaattactcattaaaaaaggccgcccgaaatacttggacggccttacatatggtcaatacggctcctgcgccagcagaaataactcagctcactgctgcttggtgctggcgtagtaggcggcaccgacgatgccagcctggttacgcagcttggcgggcacaatcggggtcttgatatccacgtacggcaggaacttttcgctctgacggctcacgccgccgccgacggtgaacaggtccgggttgaagtacttttccataaggccgtagtacttggtcagacgcttggcccacttcttgtagcccagttcctcgttctcgcgaatcgcggaggaggcatacttctcggcgtccagatgcttggcgctcaggatgatgtgtccgagttcggtgttcgggatgagcacgccgttgtagatcaaggcggtgccgatgccggtgcccagtgtggtggcgatgaccagaccatcctggcccttggcggcaccgaactggacttcggccaggccggcggcgtcggcgtcgttcaccacgacgaccgggcggccgcaggcttcggagaacacttcagtaacgtccacgccaatccaagactggtcgaggttggccatgaagtcgagcttctggccgggcttgatcggcgcggggaaggcgatgccaacgggtgcggattcaggcacttcgaagtggtcgagctgctgcttgacgattttggccacggcctgaggcgtggagacctcgggagtgagaatcttcaatcgcggctcggcgaaatcgcccttggtcagatcgacaggtgcggccttgatgccggaaccgccaatgtcaacaccgaaagcctgtgcagtttcaatcatcgttgaccttcctttccatacgttttcatcagttcgtagggttgcgcccagtctaacgcga

SEQ ID NO: 623 - DNA, 3697 bp, Unknown
  R14_15m  MAG No. k141_7165
cacaaaaccgccgctcccgtatgggcgggaacggcggtttgctagcttaaatccccttcaggggcggcaatcactgaacctgggtacgagcgatcttgccgttgaaggactcagcctcatccttgtcctgggcctcggcgttgttccaggagaacatagcgcgcagcttcgggccaacagtctcaaggtgcgggtgagagaactcttcctgcagcttcttgaacttcggggcgccagcagcctggtcgtccatgaactccttggcgaaggagccgtcctgaatgcgcttgagctggtactgcatgcgcttcttggtctcgtcggtgatgacggtggaggtgtagtcgccgtactgagcggtgtcagagcaggaccaacgagccttgttcaggccaccctcgttagccaggtcgaccagcatcttcagctcgtggaagacctcgaagtaggcgatctccggctggtagccagcctcggtcagcacgtcgaaaccgaggtcgcacaggtggttgatgccacccatgaggacgtcctgctcaccgaacagatcggtctcggtctcctcggtgaaggtggtcttgatggcgcctgcacgcagagcgcccagagccttggcgtaagccaggcacagcggccaggtcttgccgtccgggtcctgctcgacggcaacgacgaccggcacgccacggccagcggcgtactcacgacgaacgatgtgacccgggcccttcggggcaaccatgaacaccgggtgatcctcagacggcttgatgtagccgtagtggatgttgaagccgtgagcgaaggccagggcagcgcccggcttcaggttcggctcaacttcttccttgtagaccttggcctggtactggtcaggcagaaggatcatcacaacgtcagcctcagcgacggcctcgccaaccggcttgacctcgaggccctgctccttggcgaactcgacagacttggaggtcggacgcaggccgacgaccacgtcgacaccggagtcacgcaggttcagcgcgtgagcgtgaccctgagagccgtagcccaagatggcgaccttcttgccatcgaacacggacagatcggcgtccttctcgtaccagatagttgctgccatttttggcgctccttttatttatttgtttatgggggtgaaatctttaattgttattgtgctctgctggttctgcagaaactgtttttagttttggctttccttgtgggcttttccgatatgcaggtttagtcctgttgcaccggaaaagcctcgtaggggttcacttcgtggaattgagatttttcacgttgtgaacttggcgatatttagttatggaggatttcacttggtaaagtcagcgtccttcgtctcacggcaggtcaggaccgacaccaggcagcacacggccatcacggcgagatagaggcccacggagtgaacgccccaatgggagctcagccaagtggcgatggtcggcacgaacgccgcaccgacgatggcggccaggttgtagccgatgccggacccggagtagcgcacgttcgcctcgaacagttcaggcaggaacgcgccgatcgggccgaaggcgacgcccatcagggcaaagccaacgcacaggaacaccatgttggcgaagaagttcttctggccgaccagaccaccgtccagcaggaacgggaagagcacggcgaacacgacgagtgcgcaggaggagaaggtcagcacgcgcttgcggccgatcttgtccgcgtacaggcaggacagcacgatgaacagggcgaacacgcagatggagatcatgagcatgagcaggtattcctggttggtgaagccaaggccgccgccgccttcgccctgctccttggtgccccaagcgagggaccaggtggcgagcgtgtagaacagcgtgtaggtcacggccacgaggaaggtggcctgcagcacctgacgccaagacttgcggaagacctcggtcagcggggacttgacgaccttcttctgctcctgagccatacggaagatcggggtctcctccatgtgaacgcgaaccacgaggccgacgatcaccaggatggcggacagcaggaacggcacacgccagccccaagccagcatcgcgtcctgattgttgaaggattcgagcacgaagtaggtgccgttggacaggaagaagccgatcggggcaccgagctccgggaaggagccgtacagtgcgcgcttgtcttcaggcgcgttctcggtggcgaccagtgccgcgccggaccattcgccgcccaggccgatgccctggatgaagcgcagcaggcagaggatggcgactgcgccaacgccgacctgatcgtaggtgggcaggcagccaatcaggaaggtgccgacacccatggtcatgaggctcacgaccagcgtggtcttgcggcccatgcggtcaccgaagtggccgaagatcagcgagcccagcgggcgggcgatgaaggcgatggcgaaggtcagcaagctcatcagcagtgcgacggtggggttgtccttcgcggagaagaagatgtgcgggaagtagtttgccgcggcggtgccgtaggcgtagaagtcatagaattcgatggcggtaccgaccatcgatgcggcgatcacggtcttgaccgaatcgcgtaccaaggtagcggctttacctgccgcctgccctaagccagtctcttcgactgctgcagtcattgttactcctgttttgctctcgttcactctcattggcgggcgattatttcgtctcacagggaggttgttgttctgttgctgtgttgttgccgtgtactgtccgctaccgtttccgtctgcgggattctgccgtaagccttgtgagcgcaacaaaaaagccccgcaacttgcagggccttaccgattgtgtcagcttgattggccctgccttcgttgacggggcttcaagcatcaatgccgaattagtccgccagcgaagacgggctaataattcgtgcggatacaaacgcagaagcattgaatccagtcatcgcgtggcctcctttcggtatttcctcaggccgttcgacctgaactggaatgtaaacataggtttggctgtcttgccaatccagcaagggttcacattgtggacgccacgtcgccgagacgaacgcccccgccgcggggaggaacgccgccggcggccggggagccggaccggcccgtcattgcgcggactcggcggtgagggtgacgattccggccagcagcaccatgacgatggcggacgggaagagcaggtaatagccgaagctgcgctcgaaggcgttcaccagtagcgcgccgatgatggcggcgagcgccagtccgaccgaattggacagtgcatagatgccgagatcatgaccggcgttgcgcgggtcgggtagggcattcattaccagttcgaggcctaacgcatcgtagacgccgaaggcgaatccggagatcagcgcgaagagcagcatgccgttttcgcgtgccgtgccggtggaccagacgccgagcccccatgccaccgccacgccgatggcatacagcaggcaggatgccgccaccactgcagtggtggcgatgttccgttcctcgatcttctcggagatcggcccagcggcccaggacgcgagcgcagcaccgatgagcgttgccgcggccatgccggcgatgaggaggcccgcggga

SEQ ID NO: 624 - DNA, 3906 bp, Unknown
  R14_15m  MAG No. k141_7238
ctgtccaagggcgggctctaccaccacttcaaatcgaaggaggcgattctcgaccggctgaacgccgacgagtgggccgtcaccgcgcgtcttctcgacaaactcatcgagcgcaaggacatgagtgcgctggagaagctgcgcgtgctcattgtttccgccgtggacgcccccgatcatctggacctagtccgttcccagctggcgctgctcaaggatcctgcgttctttacggcgaacatgcgcttctggtcgacgagactgccggagtccttccgctcgctcatcgatatgggcgtgcaggacggctccattcccacggcataccccgaggaggcggcgcaactgctctcgctcctcggcaactactggctcatgccctgcttctaccccgccgatcatgccggcatggaacaccgcatccgctgcctcgccacgatgctcgacgccatcggcgtgccagtgttcgacgagacgctcatcctgcggacgaccgaagggctcacggccctgacgccggaagaggatacagcgtccgcataggagacgcgcccgggtgcgccgcatcttgcacatcctgacgtcacagatgtcgaagcgcttccgcgcccttttccttgggcgtattgttatcaccataacagaccgacggtcggtttgtataaatggccgtggccaatcacaagaaaggaatccacgatgacgaacgcatacgaatgcacgacccaaccacaaagaagccaagccgctgatcctcttcgcacacgcgacttccgcctgctcgtcgcgggtctcggcatatcgctcttcgccaaccttatgctgcggtttgccatgtccatgtgggtgcttgacaagaccggctcggcggcggcgttcgcctccattcttactgcgagcatcctgcccacgattctgctctcgccccttggcggcgtgatggcggatcgtacgaaccgtcggaccgtcatggtggcgcttgacgcgctttccgccgtgacggtgctcgtctgcgcggcgatcttttcggccgccggtttcaatctggcggcgatagccgtgatgcaggtggtgctcgccgtgcttgacgcgatggagacgcctacggtgcaggcggcgctgccgcagatgttccgctcccatggcgaggatgtgatgcgtcgcgcgatggccgtggtgaacgtagtgaaccagacgagcacgctcgttcccgccgtgctcggcggcgtgctgtacgcggcggttggtgcgatgcccatgatgggaatcacgatcgtggggttcggtgcggccgccgtcgtggagtgtttcatccggctcggcgctcccgaccgtggcgacgccggccgcgtcaccgcggtcgacgatctgcgcgcggccggacgtttcctcacccgcgaacgtcctcatgtgctgcatctggtgttgatctgcgccgcgctcaacttcctggtgacggggtatgcggaggtcggcttcccttacatggcgcggaccgtactggggttcggctccacggcgtacggccttgcatatggtctcgtgggagcatccggactgctcggcgcgctcgtcggtgggcgggtcgcgaggtcgctgtccatgcggcgattcccgatggtgatcgccgccttctcgctcaccatcctgccccaagcgctcgccatgacgattcccgcaggtggagtgatgcgactcgcggtgctcacggcgagcacctgcggcaccatgatcgccatcaccctcgcgaacctcatcgccgtgccggcgatccagatgggctgccccgagaacatgaccggcaaggtgatgtcgctcgcgctctccgcgagcatgtgcgcccagcccctcggacagatcgcatacggctgggcgtacagcgtctacccggcgggcgcggtcctggcggtgacgttcgccctggccaccgcgatgctgccgccagtcgcgcacgtaacgaggcggttctaggacgggattccatcaccttcgctctggacagctgagacatcaaagccatgtgtggatatgcaaacggccgccatcaatcatggtgatgttggccgttcacgtcatccccgtaccgtagatatgaaaatgaccactgtaatcgcacatacgacgatggtggtcattggatcaagcgccccggcgtcaggcctccacgagcgggcggatgtcgtccaaggtgctggggtcgaaggtcagcagatcgtagtcggtctgagggttcgcccagaagtcgggcgtggtgtcgagcgccttgccgagccgccatgccatggggtggtgatgcgccgcctgccgttgacgatctcgccgatcggcgacatcggtgtgctttgccgtacccgtcgaggcgggtgtggacctgccagacgtcccagatatggtatgcgccgatgagtccgaagcaatcggactttgattcggattcggaaacggccttcataccgcacttgtccatcacacaaccggactggaacatgaactcgacgatgttggcatacgacatcaggctgaaaccagttcgccggggggcggcgtattcgtatgagtgcccatacaagtacgtgggcgagatgtcgatgtcgccgtattaggattcaagtcaatagcagccttccacgcctcctcacacgcaacccggaaggtcctttttattggcgaactcgaccggtttggtctatcgcaacagtcgttcgttgaggatgacaggaacgtgttcgattgacggctgcaacgcatcgagctggtcggacagcttcgactcgtcgaccaccggcagttcgagcagggatcgtgcggccgcgtgcaggtagtcgttcaacgcctcgatgcggcccggctccagcgggtaagccgggtcgttctccaaggtgacgtccaacgttttgcgcaacatctcatgctgcgcgctgcccatgatggccgcgcactggtcgcggaacgtcatacgagaatttgccggctgacgttcggacagtacctgcggaatccacgcgccgccctcccagtcggcgcgcatgtcgttcttgaacagcgacatgttatggtcgaacaacggcgccggacccagaatccggccggtacggttgtcgcgcaggaacccgtggttgttggcgtgacggtcctgattgacgatgagcgcgtcgaacactagcatcgtgcgcatcgcctcgaacgattcctcggacacggcgcgtgcggcggcgaggatctccgggaacgacgccagctgcgtcgccacatagaatggcacgaacgacacgtccttcgagttcatcgaaccgcacaccgacgcgagcttgcccttccaacgggcgatgcggtagtcgaccgcattcacaccgagcctgcgcgccagctgcgaggcgagatactcggaatacggttccaaaccggcgttcgcataccattcggaacccgccttccacagttccagcccacgttccgtatgccgccacgccttcgggaactggccgtccgtcgtccactcgctcgacaggccgatcgcatgcttctcgctcgacgtataccccgtgtaggccacgatggcgagcgtctcgtccaacggattgtcatacaggttgatgtccgcgaacttgaggttctcaccgtcgcgttccgcccagaacgaatcgttgaccgacagtcccttgcacaggtcgatgatgcccagcgtatccgcaatgttcaaccccgcctgcgcgagaacctgcgtggcgaactcacgattcttcggaatcgtgcgccgctccagccacgtcgtcagcttcgcattatccggctccggagccaacggaaacggcagcaacgcgcgcttcgactcatcgaaccagcggacatgcgcctcgatcttgcccgccagcaggccctcgccatacgacgcatcgaaccggagca

SEQ ID NO: 625 - DNA, 16072 bp, Unknown
  R14_15m  MAG No. k141_7393
aggcgaataacgatcctgccggtgctcgtccacacgtttcatgccgttggccgtacgtacgggcagccatacaacgataataatcgccacaatcaccagcacgacgacagtgctcagtgactcataacccatagagtcaagaataggagacgtaccgacgaactggggctttccgcccgggcgtgtcggagcggaattcttccggtcgacgcttatctggaaccggcggcggcgagtctggcggcgaacccttgcctcatatcttcagccaacagcgcaaacgttacgtgatcgcgccactggccatttacatacatataccgctcgcgcagtccctcatgatgggctccgaccttacgcaccacagccaaagaacgcgcattatccggcagaatggcgatttccagccgatgcaacgcgggcccgaatgggtctccgagcgcccaatcggcaagcatggccagtgccatcggcgcgaatccgtggccggcgtaccgttgatcgacccaatagccaaccacgccggtacgcatggcaccatacgctatggctcccaacgaaatctggccgacgatacgcatctggtattcgatggcgaagatcacgccgacgccatgctgctcgttacggcgctgccgctgcacccattgattgaatgtgatggagccgccacgcatcgggtcaccggattcccaaggtgccagccagtcgttgttgcgccagcgcacttcgttccagccgtcctcatcatccatggtcagggggcgcaggactatcggaaaaccgggatgggtgagacgtggcgggcgaatctggtggtccagcttgaacgcctctttaatcgactggaaaactgacacggcctttattgtagccatatgaaggtcttgcgccgctaccgtggccactttcgttttacggtggaaacactagactgtgcggtatgagcgaagtgggcagtggcatgaatatcggcagcgactacagcggcacagagaaaacagagaagacggataaagcgacgctgcgccaccatatactgtctcggcgcaagcgcgttccagcggaagaatgcggagcggccggtgaattgctggtgcgacggttcccggcacacatgattcaggatggttccacagtggcggcatatgtgtcgatgggttcggaaatcgaaacccggccactgttgcgatggctgttggctcatggctgccacgtgttggtgccacgattgggatctgggttggaaattggctggagtgtgctggattcattggaatccttgcgctcgatggatgcagtgggtggcgcgaacaatgccggtagctgcagctctcccagcaccgtccatcacagacccgatgagccaactggcgcagttctaccgcccgaagcgttggagaaggccgatctggtcatcgccccggctttggcagtggacccgcaaggcaatcgtctggggcgtggagccggctggtatgaccgggccttggctcgacgcaagcccgcgtgccccctgattgcggtgtgctggccgtgggaggtgttggacaccgatttgccggccgaaccacatgatgtgccggccgacggagtgctgacgccggggggataccggcggcttggcgaatcgggccggctgagttgaccggccggccaagatactcggcgcaagccagactgaccaaccagccacgcacactggccgatggaaccagagtggcaaaagcaggctggctagtaagaccgtaacgccaatgtgtcagggcggcgactaggatatgaacggttgcacggcatggtgttgcacgccatgcgcgagaaatatgactttgttggaggaatccgttgcctacctatcattaccgttgcaagaactgcggctatgacttcaccgaacagcagtcgttcaatgacgacccgattaccgtgtgccccaagtgctcgcaggagcaggtgcgcaaggtgtattccgccgtgccgattgagttcaagggtcacggattctaccgcaccgacaaatccggcaagtaaggtcggctccccgtttttcctctgtaaacgacggtgtcgacggcggtatgccgcggatattggcactacgggcactgtctgttgcacgggtttgaagcgttgtggataacttggtaagctagaaccacataggtcgattcagcttgcgcttacgaaaaacttcaggtcaccatggttgcatggtgaccttttcgtttattaagccgcctgcgcgcggctcattgcggcgacggcgcatggcggatgccttgcgccgactcactgctgcgttgtgcgtgggactcgcagtgttgtttgggcttgaagccgtattggccgtggtggagaccgagccgatggtggtggccgctcgctcgattcgacggggtgacattattctggccgccgacgttcagttggctgatatgccggtatctgcgataggcccatcttgggcgtgcaatattgaggatgtggtgggcaaggtggcgcaaatcgatatcgaagcagccgatcccatttccacgcatatggccagagatgcgcccgtagcaccgaccggcactacggtgattgaagtccgcttggccagtagcgtcgacgatgtattggccggcgatcaggtgagactggtttccgccgtcggttgcgaaggtgccgattgcacgctggccgagaacgccacggtgatgaatgtcgacaaaccggatacgactggcgcattgggaagcaacgaccgactggtgtcgttcgcgatgccgccggaggccgcggccaaggttatggagctgcaacaggccggagcgattatggccgttgtgcggtaggaagcggaatcggccttcggccgatgttgtgttttccgcagccgtacggctgcggaaaacacaacatcagagcgcacagagtgcgcctcaactcctactcgcgctcgttgaaaacagcccagtgtggaggcagttcgccgaggatgcgtttgtcgtcgtcggattgccgttgttggtcggtctgcatgtctccgggctcgagtttgacgccgtcagcgtcaaactgctcagtgcctttcatcaccacgcgcttgtgcttgcgcggtgtgcgccgtgtagccgagtattccgccatgattattcaacctcgcggtagatctcgccgatacggctgacgatacggtcgacttccttatcggggttcacgaaggcggcgacactccagacggtcatcacattccagcccaaggaaatgagatcctgtgccgacaaacgatgacgcctgcgcgtggattgcacggacataaagttcgcgtcatcggtctgcacggccaaggcaaacggcttgtccttcaatcccaccacgagcggaatcttcacgcccttgtcgaatccataatcaacagcagcgttcagtcctcgcgcgcgcaacctgtcggcgatatcgtcgaacagcacgttgccgcctgccgcatcacgcaacggaagcaccggacggtcgtcaagctgttcggcccacgtcaacatggtcttcaggaaccgaggaccggactggtgcagtcgttcttcatccaaatcttcggaaccaaaggccgacacaatatccaagctgtggtccgccaatgccagggcatccagcaacagtccgcgaccgcctgtgctttcgagcggaccgaactgctgaagcagacgtccgtgcgtggttttcgcatagcacatcgacagaatcacgtcagtggcacgacctccggccacgtcacgcaaggaaaccagccgcacatggcgcaggaatcggcccatcgccttggatttgcctgccaacgacttcaattcggcacccaagcgtgtgcggaatgcgtcggtcaacatcacgaccacaagtcgatagctggaaggaaccacagcaaaaccggcggcacgttgcgtaatcagacgcaccacttcatcaatctccgactgactggattccaccagaccagaagacataaccggcacaccgctcgcttccacacggtggaaccgcacctcaccggcagccggctcggtggccacatcatagcgaacaggaccatatccctcggattcaaggaatgcggacaggcgcggcgcacggcgagacggggcagcatccacctcgatatgaggcaacgtgtcgatcagctgcttgacgctttcgctggttaccgtcgcgcagtgggcgatcaccaccacctgctgcacgcggccgatgatggacagcaactcgatagcgggaatgtgcgcgcacgcatcgagaatcgccacatcagccagcacacccggctcggtgagtgcggcgagcgtacccggtgcggccaccagaatcggcttggccgcggccagaatctccggatgatcacggcgaatcctgctcagcgacacactggcgcgccctgccagcacggtgtgcatctggttggcttcctgagtgcgggagaacagcatgtcgcacaggcggcgcatggattcctgcgacaccatcggtccgatggagcgcacgtgctccacatcgacctgtgcgaagcggtcggatgcggtctgcagcgcagcaccatcctggttggagatgatggcggaagaacgcacaatgtcctcgaacacggtggtccaccatgccagctgcacttcgccacgcacctgctccacgcccacccggcgagcgttgagatcggcgaccaactcgttcagaccggcagaagcgaattcctgctccagcaggcaacgctccggcaaggtgtccagtgccttgcgatcatccagcagtgctttcaggcgtgcttccaccttctcgaaatcggcggtttccagattgccaccagcgggtgtggtggaaagcacggtatccagcgcggtcatattgctgaccagcgcctcttgggtggagatgatctcgtcgagcttgctgggcagcaccggccaaccgccgtgaggcacgaactgatgccactgctccccttgcttggcgactaccttcaacgcttcgtgcaagtcctcgacctgcgcgccgacgcgcagcagatccttggcttccttgacgtggcggcggcgctcccagaatcccatcgacgtgccctcggccttgcgctggctcttcggcttggtggcctcgatcatggagctgatgtctcgctcgaaaatctctggctggaacacgtcaagcactcgtcgcagattcttcaaaaccgtaacctgacgctcccactcgcgagtggtgggaggaaccgggaatccgcaggtctgcacggtgcgtgccacctgctcacgggtggcgggcaggaagcgacgcagcaaatcgtccacgcgctggtaagcggttaccgcttgttcttcagtggtgatggacgccttgtaccatgcggtgtcttccgggccgatggtgtattcgccgagctcgccggcacgttccatcttgctgatccatgtgtcaatatcgttggcgatgctcagggcacttgactcgtcaagtcgaacgtgggtggcggggtgtgtcgggagcacggagatacgggccaggttctgaatggtctcgtatgcggacacattccacttatcgttgcccccgtgcaggtcgcccagatagcgggtcaagcgcgagcgcacgcccacgagttcgtcggccagctggtcgaatcgctgggtggcgactccgggctggaatccgactgcggcaatcagctgcttatcaagcgcggcgttggcgtgttcatcggatacatccagtacctgcgccttcatctcattggcggaggccgtctggatgaacagacgcttctgctcggccacgccgggcacgtacagcacggaacgaccattcatcaggcagcgcgatgcgatggccacagcctgctccgcggtgcccttcgggaaggtgccgtcgaccacgatgctatggccattggcagcaagtgacgcggcatatcgcaccgtattgtccacatcgccgacttcgtactcggcatgcgggtctacgtcgaaaggactgtattgcggaatattggcatctttgagcgcggtgcgggcggatttgtcgccggcaagcgcgtccaacagcacattgccggtggggccattctccagctggtcgatgaactgtcggctttcgctgatcatctgcgacgaggggtccatgaagcatccgagcacaatctggcgctcgatggcgaagccggagatacgctccgatgcttcggacgaaatacgggcgaacatcgcggaagtttcgggagtgccactgtcatagctggcaccgtcaaacagggaatcctcatccaggaacaccccctgctcacgcaatgcattgacgaacgcggcgttcagggtcacgcgaccggtgaatcgaatggtggtcgacaagccatcatcctcgatcgtgacgctcaccgggtacaacagcaccggcagcgcgttgcccctccacgtggccacaccgaccacgagcgacaactccgccacgccggaaatcctgcgcttggcggcctggtcatccagtacgcgcccgatatggcgttcggcggccttaagcacacccgtgtcacggaacaacgaatccaaccgaacatggccggaagcgaacagctgggcgatgccggagggatgggcatgggtcatctccagcttcgcggccagttgattcacatcctcgagcggcgatggcggctgcatgctgcggtattggtcacgccagcgacggatgcgattcagaccttccgtgagattctggttctgagtctggctctgggtcatctctcgactcactttccaaccgcttcgcggtattcctgatagcccttgttgtgagacagggcttcgtcaatatcggcctcgccacgggcggcgagccaagaatacatgtcgtcgtacaggtacggattcatggcgaggaacgccagtaattcgggatgacgggcgacttcgaactgaacgttgaaatcttgcgtggtttttgcctcgtcagaggtcaggccatcgacttcgactgccggctcctgtgctttcagctcgcccttggccacacgctcgaacaccgagccgggctcgaagaccggagtgtgtacgcccgtggagtagatatcagacgcttcatacgcttcggagaccgactgctgggcggtttcggtttcggtcgccagctgctgatcctcgggtgcgtcggttgccggttgagcggtttcaggctgggtggttgtcggctgggcggtctcagactgagtgttttcagactgggcggcttcggactgagtgccttcagaatgctgtgcaacagcgtccaccggctgagaatcgtcggtattcggagcggactgaacgttttcggctgacttgcttgcgccagccaccacatcggattcaacaaccgccgccgacgccactgccggctcgcttgtgctgggagcgtgcttaacaacggcatgggcgatggcatctaccgggacaataccggagatcctgctgtgcttggatgcgggcgttacagtcgtcgactcaggttcggtctgctgcttcggcagtaccacggagtccatggcctgctggtttttgcgttcggtctcctgctcggcatgctgggccaacgcatccgcgaacaggtcacggggtatggccggctcatcgtttttcgtcactggctgcgtgatattcagcgagccaagttcaagctcgtcgaccttgcgtcgaacattatccgcgctgaagatggcggtcggctcgccggcccgcaaatcaagaatatcgtcgacagacatatccgccgcatccggctcctgcggtgcttcgtgaaccgcatagccaaacaaatcaggcaccttaaggtcgagtggctttgccactggatcgtcgatacgaatgaagtccgcaggcacatcaccgaactgcatgcgcatgggagacgtcggcaacaggaactcgacattggccggcaagcgcaacaaatcaccattttcccgcaccacatacgatccattggtcgatccaagatcgcggaccgaagccgtaccattgctttttaccgtgaacatggcgtgccgtttggacatcgatttggtctgatcggcgacgtcaaggcgggtgttgccatcatcggcaagggggcgtaacggcttacggccgatttccacgcactcccccggcttgacgctgatccggtcgacaccgttgatcttcaccgtccactcgctcaccgtgaccgccttcctggacacactatttgaccacactacgtgccattgtgtcatcttttaccggcttttggcggattactgggcacagaattgacaactttcgctcattgccagctttgtgattccacgccggatcgcgttctccgcctcgccctcgtcaactagtctactcagtatgcggaaaccccgcagcctgaaacacaggtgcggggttcctcgaaaagctgtgattgcggcttatgccgcacaaatcacttgagctcgacggaggcaccagcctcttccagctgagccttggccttctcggcatcttccttcttggccttctcgaggacggccttcggagcgccgtcgacgagagccttggcctcggccaggccgagggaggtgatggcgcggacagccttgatgacctggatcttcttgtcgccgacggcggagaggatgacgtcgaactcatccttctcttcctcagccggagcagcagcgccagcaacagcggcaacagcggcaaccggagcggcagcctcgacgtcgaacttctcctcgaaggccttcacgaactcggagagctcgaccagggtcatctcgccgaaggcttccagcagctcatcgttggtgtacttagccattatggcttcctttcaatcttggcggcggacgaagtggtagatccgctgcctaataaaccttattgtttaaattatcgaagcgactgattcatgccgtgagggcgtaaatcaggcagccttctcctgcttttcgcgcagggcgtcgatcgtacgcacagccttggtaggcagggcgttgaacaggtacgcggccttggccatcgatgccttgatgtcgccggcgaattcggcaagcagctgcgggcgggacttgaggtctgccagcttcttggcgccctcggcatcgtagacagtgccgtcagcggcggcacccttgatgacaagagccttgttgtccttggcgaagtcacggatgaccttcgcagcctcgatgaagtcgcccttcacgaaggtgatggcggtcgggccggagagaatctcgtcgagaccctcgatgcccgcttccttggcggcgatgcgtgccagcgtgttctttgccacggtgtaggaagtatcgcggcctagcttttcacgcagatcggaaatctgcggaacggtaagcccgcggtactcggtcaggtagacggcgtcagcgttacggaattcttccgtaagctgagcgactaccgcttccttttcgggcctcttcatggcgttccttcctaagtcggccgttgacttggagttcggaactttcggccgggcaacaaaaaagccctgcgcacaggcagagcaatataatctcgcgaagcgaccttcgccggcccttgacgggcttatatctctcaacctgcgctggcttggcgaaccaaacttcggaaatgcactcgcgcgcacttcaaccaacggtctgtggtttacggatgattagattacggatggtcagcgacattgcagaattcgggcgtgtcgcaaggcattacaacgtggcggcgtactgggctacggacgcggtgacttccttcagatagtcgagcgagcgacgccagtggccgggcacctcgatcgaatggttggcatccgggtattcgtgcacgtgcggggtgagcgcgttggcgcgggctcgatcgtagaacgggtcggcggtgccggcgcagatcagcggtgccgggccggagtatcgggagctggcggcgtgcgactggtcggccagttctgcgcggatgatcgcccttgcttcggccacgctcggagcctcggattcggcgacgatatcatcgccgacagccggcaccggaatcacccgggcggatggatcgaagtcggcgtgatgtagcaccggggtcagcagcacgaacggcagaccgtagtgtgaggccacatgtgggtaggtcatcgtcgtcagcgacttgccgatcagcaacaggcgagggccggacggggtgtcggaatcacggttcggcgagccagctgcgccatcggccagcacggtagcagaatcatcgacggcaacgccatccccggaatcaccggctttacccgcgccggactcgcgcgcggcggccatccagccgtcaatcgcctgattgaggaccggaatcaccgtggacaggtcgtcggaagcgttgcgtacgttcatgcggtcgattcgccagccggcctcgaccagagcctgggccgaccagtagagcagcggacggtcgcagttgtagccggtgccaggcatcagcagtacgcggccgtactcctgaccgggcttgacgacattcttcttccaagaggtgatgctgacttcgacggccggtttcatcgcgcgccttccttccacgggtgtgccctgcgtgtccctgagttgttccgaattattctggcagtcagtctactcccggacccgttcacgttacctccacaagctataatcggccacggttctgattggatgcgcagcgcctgacgcgcgttgggcaggccgatcagggcgagtcgcaattctcgccggggccagccgcagcattatgcgcgcggtgcgcagccccgcataaaaccaaggaagtagagagtaaatggagaagttcttccatttgaaggaaaacggcacgaccgtctcgactgagattctggccggcctgaccacgttcttcgcgatggcctacatcatcgtcgtcaacccgcagatcctgtcgcagacgggtatgccgtggggcggcgtgttcctggccaccatcatcgcggccatcatcggcaccctagtcatgggcctgttcgccaatgtgccgtacgcccaggccgccggcatgggcctcaacgcgttcttcacctacaccgtgtgcttcggcctcggcttcagctggcagcagaccatgtgcatggtgttcctgtgcggcctgatcaacatcctcatcaccgtcaccaagatccgcaagatgatcatcatggccatcccggagtccctgcaacacgccatcggcggcggcatcggcctgttcgtggcctatgtgggcatgctgaacgtcggactgatcaagttcacccccggcgacccgaaagccgcggccaagggaggcgccgtggcggcgaccccgagtctggccgacttcaacgacaaggtgctgtgggtcttcctgatcggcctcgtactggccattgtgttcaccgtgatgaaggttaagggcggcatgctgctggccatcgccatcaccaccgtgatcggcatcccgttcggcgttaccacctggtccaactcgcagtccatcagcgaaaccttctcccagctgccgcagaccttcggcgcgatcttctccgctgagggcttcccggcgctgttctccgacgtctccaagctgcctctggtcatcgtgaccatcttcgccttctccatgtccgatacgttcgacaccctgggcactttcatcggcaccggccgccgcaccggcatcttctccgccgaggatgagaaggctctggagaacggccacggcttctcctccaagatggacaaggccctgttcgccgactccatcgccacctccattggcgctatctgcggcacctcgaacaccaccacctacgtcgagtcttccgccggcatcgccgcaggcggccgcaccggcctgacctccgtggttgtggcgatctgcttcgccctgtccgcgttcctggccccggtcgtctccgccgtgccgtccgccgcaaccgccggcgtgctggtgatcgtcggctgcatgatggccgcttccctgaaggaagtcaagtgggacgacatcgccgaagccatcccggcgttcttcgcagccgtgttcatggccttctcctactccatctcctacggcatcgccggcggcttcatcatgtactgcatcgtgaagacctgcaagggcaaggccaaggaggtccatccgatactctggatcgtgtccgcgctgttcattctggacttcgtgtgcatggcgattctgtaacgctgattgacaacggattagcctttaaggattaatccgccgccatacggcataaaggccgggctctcacaagggcccggcctttgttgttgccacagtgatcaacgcccatgagtaccttcgatgatcatccgccattcaatcaacggctggccatgactcggacatggcgcggcacggcaagcggattttgctgttgggcataacaacagacgagagaatagatccggtcgtgagcaacaggataggtgccatgcggtgccgtgtacaaactgttgtcagttgtcaacgctttttagcgtggctccaatcatcttaatggctgttttccgccattcttgatgcatgagaatagttgtcaactgacaactgaatgtacatggcagcagcacgagtgccctattcaacatcgaaatatgtagcgcgaagaagccgaaaaaccaaaaggcttctataccgaatgaaacggtatagaagccttttggtttgcgattaagctcttctcacccgagagaagctagagaacgatcagtcctcgaatgccgaaccgttaagcgggaagccctgcgggcttcccgtaggtgaggggggcggctatgccgcgaccgatccgtgagagggctttagtcctcgaacggatcaaagtcgcgacggacgcggcgacgcgggcgctcagtgcgctcttcgcggtcggcgcggtagtcgtcgtagttgtcgtcggtggcatagcgcgggttgcggtccgagccacggccacggccgccacggaaaccgccacggcggtcatcacgatcgccacggtcatcgcgatcggaagagcgacggcgacgcggacgatcatcatcacgggagtcgcgagcatcacggtcatcgcgatcgtcgaagtcacggtcggcagaacgacggcgacgcggacgatcatcatcgcgatcatcacgatcgaagtcacggtcatcggagcgacggcgacgcggacggtcgtcgtaatcatcctcgaagtcatcggagcgacggcgacgcggacggtcgtcacgatcgtcgaagtcacggtcatcgcgatcggaacgacggccacggccgccacggcgatcgtcacggtcaccacggccacggccgccacggcggtcatcgcgatcgccacggctcggtcgggcgttgttctcctgatcctcgaaaccagggatggccagggagatcttgccgcgatcatcgacaccctgaacgatcacctcaacggtgtcgccttccttgagcacgtcttcgacggcgtcaatacgctcgccgttggccaggttgcggatctgggagatgtgcagcaggccgtcggtgccgggggtgaggttcacgaaagcgccgaacgacgtggtcttgacgaccttgccgttgtaggtttcgccggcctcgggcacgtgcgggttggcgatggaatcgatgatggacttggccttcttagcggcctcgccaccctcggaggagatgaagacggtaccgtcatcctcgatggcgatttcagcgccggtatcttcctgaatctggttgatcatcttgcccttcggcccgatgacttcgccgatcttctcaaccgggacggaggtggtgatgatgcgcggagcgaactcgctcatctcggccgggccgtcaatgcactcgttgatgacctcgagaatcgtggcgcgggcttccttggcctgctgcaaagcggcggccaggatgtcggcggggatgccgtcgagcttggtgtcgagctgcagggcagtgatgaactcggaagtaccggccaccttgaagtccatgtcgccgaaggcatcctcggcacccaggatatcggtgagggtcttgaagatgtgcttgccatcaacgtcgccggacacgaggcccatggcgatgccggcaaccggggccttcagcggcacgccggcagccaaaaggctcagcgtggaggcgcacacggaacccatcgaagtggaaccgttggaaccgatggcctcggagacctggcggatggcgtaggggaactcttcacggctcggcagcaccggcacgagagccttctcggcgagggcgccgtggccgatttcgcggcgcttcggggagccgacgcggccggtctcaccagtggagtacggcggcatctcgtagttgtgcatgtagcgcttggactgcggaccggacagcgcgtcgatctgctgctccatcttgagcatgttcagggtggtgacgcccagaatctgggtctcgccacgctggaacagggcggaaccgtgcacgcgaggcacaatgtccacctcggcggacagggtgcggatgtcgcgcaggccacggccgtcgatgcggtagtcctcggtcaggatgcggcgacgcacgatctggcgctgcagctccttgaaggcgttgccgagctccttgtccttctcggcgtcgtccatgtcggtgaactcgtccgcgagcacctcgcgcacgtgctccttgatctcatggatgcgatcctgacgcggcagcttctcggcgatggagagtgcctcgttcagatcctgatgggcgatctcgtcgatgcgggcgtacagttcgtcggtgtactccgggaagagctggaattccttggtctccttggcggcgatcttcttgagctcatcctgagcctcgcagatcaccttgatgaacggcttggcggcttcaagaccaccggccacgacctcctcatcgggcttggtctgaccctcgtcatagatgaggtgccaggcgttcttgccggcaccggcctcgatcatggcgatggcgacgtcaccgttctcgatcacgcggccggcgaccacgatctcgaacacggcgcgctcacgctcactccaacgcgggaaggcgacccactggccgtcgatcagcgccagacgcacaccggagaccgggccttcgaacggcaggccggagatcatggtggaggcggaagcggcgttcagggcgatgacatcgtaagcgtcatcagggttcacggcgagcacggtctcgacgacctgcacttcgttgcgcagggtgtgcgggaacagcgggcgcagcgggcggtcgatgatgcggcaggcgaggatggcctcggagctcggacggccttcacggcggaagaacgagcctggaatcttgccggcggcgtacatcttctcttcaacatcgacggtcagcgggaagaagtcgtagttctccttcgggctggaaccggcggtggtggtggacagaatcatggaatcgtcgtcgaggtaggcggccacagcgccatcggcctgctgggcgaggcggccggtctcgaagcgcagcgtgcgcttgccaaacgatccattgtcgattacggcctcaacggccttgatttcgggaccctccatagggttcctccttctttaattttctaattattcctacatactgtgctgcggtttggcgactcgcttgaaccgcaactgtcctcttcagcggacgtcacataccttgtttcgactggccccttggccgtcgttcctcgtgtcaaccccttcattcgggttctcttgtcggccttacctgctggcctatcctctaaccctcttgccgttgttgccgttggctggcgatatgtaaaacgcccgagcaccatcctaggtactcgggcggaagtcttcaattatcgacgcagacccagacgctcgatgagggaacggtaacggttgatgtcaacgcgcttgaggtagtcaagcaggcgacgacggtcaccgatcatcagctgcataccacgacgggagtggtggtcgtgcttgtgctccttgaggtgctcggtcaggtcggcgatacgcttggacagcagagccacctggacctcgggggaaccggtgtcaccttcgtgcgtcgcg

SEQ ID NO: 626 - DNA, 9551 bp, Unknown
  R14_15m  MAG No. k141_7505
gagaagctcatcgcctccggcaagctcaacgacaagctcgccaagcagaccgtcgaaggcgtgcttaagggcgaaggcactccggatgaagtcgtcaagaagcacgactacaagatcgtcgaagacaacggtgccatcgaggcggccgtcgacgcggcgttcgaatccaacccggatgtcgtcgagaagctcaagagcggcaacatgaagccgatgggcgtgatcgtcggtgccgtgatgaaggccacgcgcggtcaggccgacgccaaggccgtcaccaaggtcgtcatgggcaagatcaagggctgattagattcactggctcccgctggcgggagctgtcgaacggaatgagactgagggtggtcgccatgtacggatgaccaccctcagtccgcttcgcggacagctcccgccagcgggagcacttatttgtagggaaatcctccagttcaaattcgttggacagctcccgccagcgggagcctttattgattctgtaagaaagtcgtctcagagcatttccagcgttcacccagtcgagtaagatatgttcggcactggaccgtgagccgaaacaagccgaaccgggggatgtataccgatgaccgcaaccaacgagacgctgagcatggctaccgaagcgcaactgaagcgcgatctgccacagagcatcgtcattccgccaatccgtggcgaaatggtgcacctgcgccccgccaccgtcgaggacctggctcgtttggatgaacttgatgccttctatggcgcatccaagatcaccggcaaggatgcggtcaccgaacgcgccatcgtacacacatgggtccgccgctcccaagcctgggaagccggtcaggcacccgccgaatccggcgtgggcgacccggaatcccgccgcaccatcgcatgggccgtattgactgacgccgaccatgacgatgacggtcagctcgatgcggccagcaccgataatgtcatcggcatgattttcctcatcgacatcgacggctggtccaagtccgcccgcatccagatcatcttgggccgtgagtaccgtggccgcggctactcccgtgacgccatgccgcgtgtgatgacttacggctttgcgcccgaaccggccggcctgggcatgcaccgcatctgggtgagcgtgccggaaaagaacagccgttcgatttcggtctaccagtcgctcggcttcgtgccgtccggcacctcgcgcgacgcgttgtgggatgtcgaaaacaacaaataccaggaccttatcgtcatggacacgttggtcgacgagtacgacccgattcgttcgcttgacgcttttggtatgcacttgattgaggacaacccgggtgtcaaggaagcgctgtccgcgcgtgagcattccatcgccatccagcagaacaagccggaacccgagccggcacagcgtggtgaggcagccgccgtcacgacgagtgacgtgcagtcccaggcccagacgccggcggccgcacagccagtcgagccacaggccgggcaccatgacgatacgcagaaaaacgcgcgccacagtctcgaagaggaaagcaactggccgtacgatcaggcagaacgcaagccctcaaaggaagcatggtggcgtacgctgggccgcggccgcaaacgcgatacggaaagtgagtgagtaaacaagcatgagtgccgaggatctcgacaattacgaaaccgacgccgaactcgcgctgtatagggaatatcgtgacgtcatcaagctgttcacctatgtggtggagactgagcgtcgcttctacttggcgaataaggtcgatttcaacgtgcgttccgctggtcaggacgtgtatttcgatgtgcagctgactgacgcatgggtatgggatgtctaccgttccagccgtttcgtcaagtccgtgcgcatcgtgacgttcaaggacgtgaacgtcgaggaagtccagaaaaccgatatcgacattcccgacgatattcactgacaggcaatcgtctgatacagcctgtattgacaatgcgcggcattccgtcatcttacggcggggcgtcgcgcattgttcatacaacgcatagcaaaagttcaaactcgtaaccttgccatcgtgtgtcttgtttgcttgcggttgatagaagatgatgctgtttgcacttgcaggaatctcgctgaatctatggaaggttcgtcgctgacgaattagcccaagaccaaaccgattcgccgcgctgtgcgtgacgcagcgttgccgaatacccctacctcacgattggatgcgtcgcctttctgctgatggaagacggcgcatcggtcgtatatcgggagaattctgtaagcattcgctcatctttcggtgtgcgattccggggcttctagtaaactgtctctgattttgcgtttataaggagcataatgaccgacaagcaatccgtagtgattatcggcggcggtccggctggacttaccgccgcatgggaactcgtcaaggatggcggcgcggaaaactatgacgtgaccgtgctggaggggacccgcgaattcggcggtatctcgcgcaccgtgaagcacaacggcaaccgcatggatatcggcggccaccgtttcttctccaaagacgaacgcatcatggattggtggaagaccgttctgccgttgcagggcgcaccctcctatgatgacaagaagctcggccgcgaccacgacatggagccgggcggccccgatccggagacggaggacaaggtgatgctcaagcgccaccgcgtgtcccgtatcttctggaaccgccacttcttcgattacccgatttcgctgagccccaacacgttgaaggccatgggcttcaagctcaccatggtggccggtttcagctacctgaagtccatgttccacaagctgccggaagacaacctggagaacttctacatcaaccgtttcggccgcaagctgtattcgatgttcttcgagggctacacggagaagctgtggggccgccacccctcccagatctccgccgactggggcgcccagcgcgtcaagggcctgtccatcatgggcgtgctcaagaacgccttccagaagcttagccccaggaagcgctccaacgcggaggtcgagacctcgctgatcgaggagttctggtatccgaagtacggtcccggccagctgtgggagaccgtcgagtccaattgcgaggccgccggcgtcaaggtgctgaccgacgccagggtggtcgaggtccgccagaccgatggcgccgtgtcttccgtggtgtacgaggattccgagggcaaccgcaccgagctttccggcgaccagttcatctcctcgatgccggtcaaggacctggtcaacgccatcgacgcggccggcgacgatcccgaggccgctgattccaagcccgccccggccgatatgaccgaggtggccaacggcctgccgtaccgcgacttcgtgaccgtgggcctgctggtcaagcacctgaagctcaagaacaccaccaacatccccaccctcggcaatccgccgatcgtgccggactgctggatctacgtgcaggacccgggctacaaggtcggccgtctgcagatcttcaacaactggagcccgtacctggtcaagaacgtggacgacaccgtgtgggtcggcctcgagtacttctgcgaggagggcgactcgttctggaacatgagcgaggaggacgtcaccaagttcgcgatctccgagctcacccgcatgcgtgtgatcaacggcccggacgaggtcatcgactcccatcgtgagcgcgtcaagaaggcgtaccccgcctacttcgacacctacgagcacatggacgagctcatcgagtacctcgacggcttcggcaacctctactgcgtgggccgcaacggccagcaccgctacaacaacatggaccactccatggccaccgccatggaggccgtcggcaacatcaagaccggcaagacgtccaagaagaacgtgtggtccgtcaacaccgaaaagtcctaccacgaagaaaagtgaataaaccttgttgagctccctcgtcacagagggagcttttttggttttcggcgggccgttttgcgttggtcgagttggcgttgtacagtaaacgaagttcgtgaaaactcagagacgcagcgaacattcatgagcggtgcaaccgcaataatcactcttaacgcctggataggcatgggtctgttcggtatggaaagggcaaccagtggcaaatagccagaatcttgaggatatgaagctgcctgagctcaaagagctcgctaaacagatgggcctgcgcggcacgtcgaccatgcgcaagcccgagctgctcgccaccctgcaggcggcgcgcaatggtggagagccgccggccggtgtgaccgtgcgcgctcccaaggccgccaaaaccgccaaggtcgtcaaggctccgcagtccgatgccgctgaggccaataccacagacaatgctgacgtggccacccagtcgccggctccggctccggcctccacggaaccgcagctcgatttgccgcttcccgtggccgacgatgccaagaaggacgagaccgaaccgcgacgcacccgtcgtaaggccgccgatgatgccgcatccgaaccgcgtgcggcccgccatcgtcgcgatgacgaccagtccgatttcgctcgccgcaagccgcgcaagaaggccgatgaggccgacgatctgctggccacgctcgatttgggagatgcagcgcctaccgagcgtcgccgcgagcgccatgaggacgtggaagttccgctgattcgccgagtccgtgatgatgaggacgagcagcctcgccgccgtcgtcgcactgcggaaaacagcgaagaaaccgtgcgtgacctcgacgatatcctggccacgctgcccacgcagaagcacgaggaaacgtccgaagacggcgagcagaacgacgatcacgagtttgtgcgtcgtaaccgccgcgaccgtagcgatcgcaacgatcgcgataaccgtaatgatcgcaacgatcgccgtaaccgccgcatgcgtggccgtgatcgcgacaatgccgatgatgatcgtcgctatgatgatcgcgataatcgtagcgatcgcaatgaccgtgatagccgccgcgaagagccgcaggaggatctggtgccggtggccggcatcgtcgacgtgctcgactcctacgcttttgtgcgcacttccggctacctgcccggcccgaacgacgtgtacgtttccatgggccaggtcaagaagtacggcctgcgcaagggcgatgccgtccatggttcgattcgcgccccgcgcgaaggcgatcgtcgcaaccaacgccagaagttcgtgccactgcaggccatcgattccatcaacggccaaagcgttgaagaagcgctcaaccgtccgcagttctccaagctcacgccgctgtacccgcaggagcgtttgaagcaggaaaccgccccgaacaagctcaccggccgtatcatggacatcgtttccccgatcggcaagggccagcgtggtctgattgtctccccgccgaaggccggtaagaccatcaccttgcagaacatcgccaactccatcgccgccaacaaccccgaggtccaccttatggtggtgctcgtggacgagcgccccgaagaggtcaccgatatggagcgcacggtccagggcgaggtcatctcctccaccttcgaccgtccggcctccgatcacaccacggttgccgaactggccatcgaacgcgccaagcgtcttgtggagctcggccaggacgtggtcgtactgctcgattccatgacccgactggctcgcgcttacaacatcgccgcccccgcctccggccgcatcctgtccggtggtgtggacgcgcaggccctctacccgccgaagaagttcttcggcgcggcccgcaacatcgaaaacggcggctccctgaccatcatctcctctgcgctggtggaaaccggctccaagatggacgaggtgattttcgaggagttcaagggcaccggcaacatggaactgcgcctgtcccgcgagctggcggacaagcgactgttcccggccatcgacatcaacgcttccggcacccgccgcgaggagctcatcaccaacccgcaggaactgccgattatctaccgtctgcgtcgactgctgggcggcatggagcccgagcaggcctaccagacgttggtgccgcgcctcaagaagaccgccaccaaccgcgacttcctcgccgccatcgtgcagcaggccaacaccggcaacgcggtcaacggcaactgaccagaccgctgaacaatagtgtaagggctgcaccccgattgatacggggcgcagcccttgccgtatatgatgcaaatacatcaactatcacattgcagttgtagtattgccgtcaacgttcacatgcacgctgacgatatatgagatgaaagatgtatcaatgggttcgattgttttgggagtgggcaatggtgcggccatgttcggcgatgcggatgccagccatatcccctacggcgactatgacatctgagatatctgactttgcgcatcgtgcaaagccgcaatcgggagtatcctcgaatctatgagcgaaacgagcagcggctggcaaaggaccaccatcgactccgcccaggcggcggcccacccggaaaccgcacaagcggtggcgcgcatcaaagcgctgcgccaaaccatcgataacatcgattcggcggccatcgcattactggccgagcggttcaaggccacctcgcaggtcggcgtgctcaaagccaacgccggattcgcgcccgaagacaccaagcgtgaggactatcagatcgaacgcctccaccgcatcgccatcgatgccgggcttgatccggaaattgccgaaatgtaccgtgaattcgtggttaccgaagccaagaagcgccaccagcgcatcgccgatgccggtggcgacccgggcgtactcgacgtattcgcctgattcgcccgcagcgaatgggcacctttcggatattcgtctatagggcaagttgccggcagcgactacattaatacgggaatggaatgcccatagtggccgactgtatgaatgggatacgtagatgagatgtggtgccgcactggtcagttgcgcattgtgcgtggcttcgattctcggcggtgcttggatgtctcgtccgactccggttgattacggtccggtgctcgctacggcaagtgatatgtacgccgtcgccgatgccgaaggggagccggtccgttggtatgtggtagggaagggcggcgccggcaatggcgccagtgccgattccggcaatagcggttccactgataccgattccgccaatagtaattccggcacgtccaaggtttctcgtatccccgcttccgccgccaccctgccatggaaagtcagcgtcacctactcgcttgacggtccaaacgtcgaggcaaacgaggttgccggcgcatctggactgatcggcgtgtatatcgatattaagccgcaaaccaaggaggccaaccgtacgatcccggttgtcgcctttaccgtgcctacgcaggtagccgatgatgtttccgctgacaactccattacggtaaccacgcaaggttccaataccgtagtcgccgcagctggaaaagccgcaaccggcttggaattcagctgctatatgaacgccaaagacttctccatgagttccgtggcgctcgccgtattgccttccaattccagcagtccggtggttggtgctaatcccgatgccgcgaatgccgccgcacagcctgctgccgatacggatgtcgcccaactcgtcgcctctgccgccatactggtcgattcactgaccgacgccggttccggggagcatcaacagctcatcgagcagcttcaaaccctgcgcgataatgagcgtgcgctggacaagtccgtagtggccgaacgcgaaaccgcccataagcggacgtttgaagactatatggccgcgtatgtgggctcatataccacgcacctgtctggatcgattggtacctccacccagttgccggcgttgatgggcacggccggcgaactgtccggggatacgcctttggcacaagccgtactcgacttggccaacgcggtgaacaacgtcagtgccgcacatcagcatgccggtgcggtcgatgcgttggatgaggtgattcgccgcatccagcagcaaggcaccaccggactggtggatgatctgaccgccgaggcttcggaggaagccactcgaggctccaagcaatacgccgatggccagagccagctctccgccgcaatgattccgtattcgatgaaatacacggacgtctacacgaccaatttgagcgccctgaccggcggcacgtcttcgggcgccaccgcttacgagagccaagccatcgccgaaaccaacggtagcgatgaactcgccgacgctcaatccaaggtcgatgccgcgatgagcacgcttgccaccgcctccgagcatacgggcaaagccacggccttgcgccagattgtattgcgattctccgatcagttcgaaggagtcgcgtcctcggcttccggcagcgatggcgatggctcgtccggtgatgtctcttccggtccggtgaccgaggctcaggcactgactggcctggtcgattcgcaatcgcaatcgttctacggcaagacccgggccgcccaagccaagcgtaaggccgatgccgcccgtaagcaggccaaagccgcgcaacagcagcagtcgcagcattccaaggcctcactggtcgatgacaccatgtccatgtctgctggcgatgtgatgaactatgcgggtggtcttacttcggccatcggtggtggaggtaagttcgattcgtccaagagcgatggttcgggaacgaacgactcagccaagtcgagcgatactggcgattccggcaacaatcttgacaccgctccagtactgttcggctttggcactggcggcacgctgctcaagcatgacatgagcgcgctgatcaatgagaccgtggagatcagcgatgctggcacgctcttggcgcaggccgtcgcgcagctcgatagccccaatacgcaacaaaaaaccgccgaaacccgatacctcatcgtgattccgacggtgtgatggtgtatgcgggaaaatccgcatgcgacaggtgcccaatacgcgtaaagtgcgttatcggtgtgggacgccgcatcaaaaactggctttttcgatgcggcgtcccacaccctcttgtaagtcagagctaactatagtttgaagaatggctaaattccaaggatctgttgattcggtctgtgggacgccgcgtatataaaacgtttgacacgcgtggtggcccacgctattctgggccaccagcttacaatgcgggatatttgcgtgccgtcccacagtcgtgtcatccgaacgtcaaaaaacaaaagaggggaacctcaataggaggttcccctcttttgttgttgtgcgcaacgctcagtgctttggcttcttggctggc

SEQ ID NO: 627 - DNA, 9837 bp, Unknown
  R14_15m  MAG No. k141_7517
cacggtatgacggcaatggtgccgcaggtttttcgacgcgatacacccgcaacgcaagaccagaatcgacaatctgctgaatcgcggattcatattgcgccgcccgagcgccacgagcgatgtggccaaaaataaatttataccgcaatacacacttttcctagggttgcaattcgcgtattctacatttttcctagggttgcgattgtccaaaattacatttttcctagggttaataatgcagaatactgcactttcccagggttagtaccctgaccttccctaatcacacggtgttgtaaaggcgggcggggaaggcgtcgcggtattggccgggggtgagtccggtgcggcgcttgaagacgagcataatagaatatctcaagcatcgatgaatacgaggagatgatcacaatggctgattccatcggaacagtcaacaaccaatcttcaacacagcccaacggtcacaattcacatagcaacaccaccgagtcgctatggcgcggcacggattatggcaaatggttcgtagcggattcatgcacgtcgctgtcatcaagtatccaaggtttcgcaatgccactcatcgcgcagaccgtcacgggctcaccggcacaggcgacgctgctggattcaatcatgaccatgatatcgtcggtattgcggctgccaggtggcgtggtacaagataagtacgaccgcaaaaaactgatgattgcgtttggcctgattggtttcgcactgttcggcatatgcgcggccctaggatgggcgggattactcatatacccggtgctgatggtacttgcgatatgcctcggcatacgctcaggcctcctaggaaccacgagcaacacgatgctacgaggcatcgttcccgatcaattgctgcccaaggcgtcaagcctcaatgatggccgcgatgccgccctcgaactcgccggcgcaccagtaggtggcgtattgatcggcggcggtctatggctgccattcgcagtcagcgcgctgctgaatctattggaaaccgcggcggcgatgcagatcacaaaatactggcatcgtggcgggcggaccaatgcggagggccgcgcccttgccgacgatgaggccgatgagaatggcgatgcggccaacatcactcaggccgctgacgagcaggcaacgaccacgacatcatccgcgtcacagtattggcgtgagatgttttccggattccgctggcttcttagcgagcgattcgaacgtcgcctgattttgtcgagcgcgctggcgttcgcgtgcttcaactcgttcctgctgattacggtgctctcgatcggctccgacccatcacatgtggtgtcagccagtttcatgaacgtttctgtgtctgtgggcgtcatcgttggctcgctcatctcttccgtgctggttcagcatgtgcgcggcggcatagtcgccgtatcgttctacgtgctgatgagcatcggcgcgctcggcgcagcgctggctccgtggattcttgcgcgtatggcgtttctggcaatttcgctgctggccctaccggccggcaatgcggtaatcaacggattccaatcattgctcatcaacaaggagcatatgggccgcgtattcgccggcatgggcatgattgagacgattgctgccccggtgatcacatttctgtccggcatcgccatgcaacactggggttactcagtcacgtccgtggctttgggcttgtgcatcgtggcggccgcgatccctgcagtgacaatgagggaactggtcacactgcctaagccggatggctgggaggaccatatccgcaaatccgggctcaccaagttctgacaacaagtaagggcgactatctcccggatttgtgacgctcggcaaccgtcagcgtcacaaatccgggaagaggaaggtggatacggtttcagccgcgcgggcagcaaggtggacaaatcgttgccgggatggaatcgcggcaagtatgcaaaagcctcccgttcgcgcgcgacgcataagcgcgcaaacgggaggcttcccaaccgcagcatcatatgcagaaataaggagagtaaggcatatgctgccgcggtcacaccccgccgggaacctgtcgcaggccgcgtccggcatcgaaagccatgcagtcgatgcgtgcggccggccgttcccggcgcggtggccatgtcagacgtcagtcagacgtcatcacttctgccagccgatgtcctgcggcaggttgccggcgaagccggacgggccgtagttggccaggcccttcttcgcaccgaggtacgaagccgggttggagaccgggatagtgccatacagcttgagggcttccttctcggcggcgttcacagccttggtctgctcgtcatagtcggagaggctgccagccttcttgacgagctcgtcgatcttcttgctgcccacgtaggagaagttggacgggccgtcggaggtgtacagctgcggggcggacaccacgaaggtcatggcgctcggagcctgccaagccatcggcagcacctggtagttgccggaagacacggtgtcggagaacttggactcggccacgttcacgaccttgaccttgatgccggccttcttcatcatcgcctggtaggcgttggcgagggcctgctgggtggcgttgtcaccgaagaaagtgaaggagatctcaagggtcttgccgcccttggcgtagtagccgtccttgcccatcttgtagccgtcggcctcaagggttttcttggcgttgtccacgttgtacttggcctcggcgggcaggttgttctcgtagcccttctggaacggcagcagcagctcggagcccggctgctcggccttccagttcaggccctggaactgcacgttgttgtaggtgttcacgtcgaaggcctgagtgatggccttacgcacctgcaggtcgtcaagcggcttggacttgctgttgtactccagcacgcgggtcttggtgctgtagccgatgcgcagctgggcgtccttgacggaacggatggccttgatgtcgtccttggtgttggcctccacggcgtcgatctcgccgttctggaaggcgttgagggaggcggtgtcggccatctgcttgtagacgatcttgtccagcttcggcttgttgccccaccacttctcgttcggcacgaaggtgacctgggagtcggagaaggagtcgaccttgtacggaccggcggcccactcgttgtgcgggttcttcacccagccctgggtgaaggtcttcgggtcggcggccttcgggttcaccagagcgccgaagacttcctgccacgggtagtacggggtcttgtaggtcaccttgacctgcttcgggctgtcgccctgctcaacgctggcgatacggtcgaagccgtcggtgctcggcgggttgtagtccgggttggagccgttgttggcttcccacgtggccttgaaggcggtccagtcgatgtcggagccgtcgttccacttggccttcgggttgatgtcgtactgcacgaccatcgggtccttgctcacgagcttcatgtcggtcaggaagtccgggttcaccttaatcggggagccattgacctggtcggtcatgagcaggctgggctggtaccagctccacagctcggacatgtagccggtgttgccgtcggaagacaggtagttccagttcgggccgatttcgacgatggacagggtcagcgtgccgccgtccttgacgttgtcacggctctggtggttgtcgtaacgctcggtgaccttcggcatgggcaggtcgccggtgtacgacgaatcgatgccggccggcggttcggtggcgctcgaggcattgctggaaccgttgccattgcccgcgccgcagccggcaagcagcatggcaagcgccgcagtggccgcggcgagcgcggtcagcttacgtgtcttgttcattgttatttcctcctctatatggttccgaccgtcatgcgaaatggcatgcaacctgatggccgctcggtcgggaagtgtcatacggccgcagcgccgggcgttcgccgcggcagcgggcctgttgttcggcgctcagcttgggcatgagcgggcagcggcccatgaacgggcagccttcgaacgtctcggtggggctgggcacctcgccctgcagcacgatgcgctggcgggtgcgttccgccttcgggtccggcaccggcacggcgctgatgagcgcctgggtgtacgggtgcaacgggtgctcgaacacgtcttcggtgtcgccggattccacgatgcggcccaggtacatcaccgccacgcggctggagatatggcgcaccaccgacaggttatgggccacgaacaggtaggccacgcccagcttgttctgcaggtcctcaagcaggttgatcacgccggcctggatggacacgtccagtgcggagaccggctcgtcgagcagcacgagcttcgggttgaccgacagcgcacgcgcgatggcgatgcgctggcgctgaccgccggagaactgcgtggggaagcggtccacctggtcggggttcagctccaccagacgcatgagttcaccgatgcgttcgcggatctgctctttggagtagtgctggaccttcatcggctcggccaggatgtcgtagatcggcaggcgcgggtcgagcgaactcatcgggtcctggaagacatactgcacggccgaacgcagctcgcggcgcttctcgcgcggaatcttgtgttcgagcttggtgccgaacatctcgatctcgccgtcctgcggctgcttgaactccatgatctccatgagcgtggtggacttgcccgagccggactcgcccacgagcgccacggtctcgccttcgcgcacgtccagcgtcacgtcgtccacggccttgacctcgccgatcttacggcgcaggaatccgccggcggtcagcgggaaggtcttgcgcatgtgcttgacgtcgagcaccatcttgcgttcgtcgcgcgggatgccggcgaacttcgacttggcggcctcggccaccgtgtacacgtcgtggaaggtcaggcccttgctcacgatctcctgggtgcggtggcaggccacgaactggcccgggcggcccggcaccggctccatggccggctcggtggtgtggcatatgtcggtggccagcgggcagcgcggcgcgaacgggcagcccttgggcatgttgaccaggttcatcggggagccaggaatcggcaccaggcggctgttgcgttcgcggtcggaacgcggcacggcacccagcaggcccatggtgtacggcatggccgggtggtcgaagatggagtcgacgtccgccttctcgaccgggcggccggcgtacatgacgacgatgtcgtcggccacgccggcgatcacgcccagatcgtgggtgatgaagatgacggccgcgccggtttcacgctgggccttgcgcagcacttcgagcacctgggcctggatcgtcacgtccagtgcggtggtcggttcgtcggcgatgatcacgtccgggtcgttagcaatggccatggcgatcatcacgcgctggcgcatgccgccggagaactcgtgcgggaaggacttcaggcggtcctccgggtccgggatgccgaccaggttcatgagctcgatggagcggtcgtgaatctgctgttcggtcatcttcggattgtgggtgaccagcgcttccttgatctggtcgccgatggagaacaccggggtcagagcggagagcgggtcctggaagaccatggcgatgcccttgccacggatctcgctcatctcaagatcggacttgctgagcaattcctcgccgtggtaggtgatggagcccttgacgctggcgttcttgtccagcaggcccatgatggccatggaggtcacggacttgccggagccggactcgcccacgatgccgagggtcttgccggggtacaggtcgaagttcatgccgcgcaccgcgtgcacggtgccggcttcggaggcgaagctgacggtgaggtcgcgtactgaaatcaccggttcggatgccatgccttgcgctcctgtggtgttggggttggtgttggttgttacgttgcttgcgttgcgttcgtcgctcatgatgcccgtctcccctctcactcggccttgccgccagaacgggagtacgggtcgatggcgtcacgcagtccgtcgccgatcagctgcacggagaaggtcaggacgaccagcaccacggacgggaagatcagcacccatggcgaggtctgcaccacggactggccggcgttgagcagcgtaccgagcgaggtgtcgggcgccttgatgcccaggcccaggaagctcagcgaggtttcgctgttgaccgcaccgatcacgccgagcacggtgttgatgaccagcaccgaacccaggttcggcaccagatgacgcacgatgatggtgaaggacggcacacccatgaacttcgccgcgcggatgtattcgcgatcgcgcaggctcagggtcagcgtgcgcagcgtacgggcgtagccgatccaaccgaatgcggtcaggccgatggccagccacagccagtcgctgccgccggccgccatgccgacgatcagggcgatgagcaggaaggacggcacgacgagcagcatatccagcagccacatgcccacgcgctcgaaccagccttcgaagaacgccacggccgtgcccaccagggcggcgatgatcgtggtgccgaacgagctgaagataccgatggtcaacgaacggccgaggccgcggatgatcatcgcgtacatatccgagccaccgaccgtggtgcccagccagtgctgggcggacggcggcgaggcgagggcggcgaaatcgggctcatcgtagctccactgggagaatttcgagccgaaaatcgccaaaagaatcagcagaatcagcaccaccagacccaccacggccgaggggcggcgcatgaagcggcgcacgtacagctgcatgcggccggtgcggtggaagtcgtcggcgctggaagcctcctgggcgttcctggcgtcggcggactgcggttcgctgccctgcggatcggtgagttccatatcctgggcggcggcgtcggagaccatgttttcgttgtcgttcatcatgttagatcgtcctttgcgcggggctcagctcagtcggatacgcgggtcaagccaggcggagaagatatccgccagcagcgcgccggacagcgtgcacacgccaccgaacgcggccacggccacggcaccgttgatgtcgttgttggcgatggtctgggtgaagtacatgcccaggccgttgatggcgaacacgttttcggtgatcaccgcgccggtgaacacgccggcgatggagaaggccacatccacggcggtcggaatcagcgaggtgcgcagtgcgtggcggcgaatggccgcgttgagcgtcaggcccttggcgcgggcggtgcgtacgtagtcggcgttcatggtgtcgagcagatacgtacgctgggtgaggtggtagcccaccatgcccggaatcgtcatcacgatggtgggcaggatcaggtgctgcagatagtcaaacacccaaagcaccgggttggagccttggtaggagtgcaggccggtcacgtagaacgcgcggctgcccacgatgttgttgaagttgatggccagcagcaccaccatcaggcccatgacggcggccgggaccaccaggaagaacgttgcggtggtgttgagcacgcggtcctgccacttgtactggcggatggccgtgtacacgccgatgctcacgccgaagaggatggagagcacggtggcgagcgtcaccagctgcagcgaagcggagatacgggaggcgatggccggcgccaccggcgactggtccgggctcaggccccagttccactgggtgaggatgcccttgagccagcggaaatagcggatgacgaccggcgtctggtcgttgatgttggccagatcgagcgaccggttaatcgacgcgatcggcggatgcggattgcgcgacatgtagttcgaacgcggatccatgaatgcgctggccagaaaatacgtcatcgatactgccacgaacagcatgatcacgtagttcacaatgcgcttgatgatgtacttgaacacccaaccacctcccagataactgggaaagtgatacccccccccgctcaaaaccacaaattgagtccaatatatggaatatgggtattgacttttccgactttttcctgtacagaaaactgcgaaaacacttactgtgtattgggcaaacatccgtttgttaattttgtatttcctgagcctttgctggacatgccttatactttcgtgtcagcagtccgccggcccggatggtgacagtccccgccgccggcaacggattatccatcagcatcatcagcatcagacaggggcatcatgacgacagacgccagcgcacgggccatcaaacccgaacttctgcgtacgtacaccgaggatttcaacaaggaccgcgccaacctgatcgcggcggacgcggcggtttcggccggcgtgctcaaggcggccaccgactatcgcggcgtgcgtgcgctgccgcgcgacttctccatcgaactcaagcagggttcgatcaccaatcaggagcgttccggccgctgctggatgttcgcctccctgaacacgctgcgctacgagcttatgcatcgctggaaccttgaggatttcgagttctccgagacctacctcttcttctgggatgcgatggagaagtcgaacacctacctggagaatgtgctgcgcacgctcgacgagcccaccgactcgcgcctgttcgaggccatcaactggggcccgtccgatgacggcggctggtggcagatgttcgccgcgctggtgaacaagtacggtctggtgcccaagagcgcctacccggagtccgagaactcccgtaattccgatgatttcaagcagtacctcaactccaagctgcgcgagttcgcggccgagctgcgccgccgttcggctgcgggcgctggcgaggacgagctgcgcacgctgaaggacgagtacatgggcaccgtgtaccgcatctgcgccgtgtcgcttggcgagccgccggagaagttcgacttcttcgcgcgcaccaaggatgacgatgaggataagaaggccgaggccgacgcagacggcaaggccgaatcctgcaagtgcggcgactcctgcaaatgcgagggcaaatccgacgccaaggcctgcaagtgcgataaggacaagtccgacaagccgaaaaccggtaaggacgagcgcccgcagatccgcgagatcggcatcaccccgcttgagttctacaagaagtacgtgccggtggacgtcaacgatttcgctacgctggccaacgccccgctcaagaaccgtccgttcaaccggcgctaccgcatccgcttcagcgcgaacgtggccgaggcgggcgatatggagttcgtcaacgtaccgctggacgtgttcaagaaggccgcgcttgaccagctcaccgccggccatccgatctggttcgcctgcgactgcacgcagttcgcgctgcgcaaggacggcttcttcgaccagtccgtggtgcgcgtcgaccagctgttcggcaccgagttcaccggcgacaaggcccacggccttgaatacggcgacagcccgagcaaccacgccatgactttcaccggcgtgaacctcggcgaggacggcaagccgaaccgctggaaggtggagaacagctggggcaaggacgccggcaaggacggctactacgtcatgtccgacgcctggttcgaccgctacgtcaccgagctcatcatc

SEQ ID NO: 628 - DNA, 3514 bp, Unknown
  R14_15m  MAG No. k141_7839
catcgtctggattgaagaaatgctgccgaagcctgagctgaatgctttggaacacggctgtgatgccttcatctgcccgagcatctacgagccgctgggcatcgtgaaccttgaggccatggcctgtggtctgccggtcgtcgcatccgccactggcggcattccggaagtcgtggtcgacggcgaaaccggctatctggtcccgatcgatcagctgcacgacggcaccggcacccccaccgatccggacaagtttgtgcacgacatggccgccgccatcgacaggatcatggctgaccccgaactcgccaagaagatgggtcaggccggctacgaacgcgcccgcgacgtgttcagctgggagaccatcgccgacaagaccgtggaagtctaccagtccgtgctcgacgagcagaagaagtaagtagcgctgcaacgagtgccccccctcagtccggctgcgccggccagctcccctcaggtaccggtttcttggctcccctctctgcggggagctgtcaccgcagtgactgaggggagtcctcagaccgcgaatcatagttagtatttcactcatgacaaacaccgtcctccaactcgacaacgtcgaattccggcgcaaccgtcgcgtcatcatcaccgacgtgaacctcaccatcaacgcgggggagcgttgggtgctgttcggtccgaacggcatcggcaaatccaccgcggtcggcatgctggccacccgcaccttcccctcggagggccgcgtattcatcctcggccatcaactcggcaaatacgacgtattcaagctgcgtacccgcatcggccttgcctcagctgacttgggccgacaatttcccgagttcgaggacccgctggacgccgtggtcaccggcctgtccgccgtgaccgggcgctggcgcgacacctatacgcaagaggaatacgcccgcgcccgccagctgctgcgcgattttcgcgtctcctatctggaaggcaaggagatgtggcgactgtccgagggcgagcgcacccgcgtattgatcgcccgtgcgctgatgggagatcccgagctgctcatcatggatgaaccgaccaccggccttgacctgggcggccgcgagcaggtgatgcgcacattgagccgaatcggcgaagagaactccgagcgtgccgtggtgctggtcacccatcgcttggaggagattccggccggtttcgaccacatcgccatcatgggacgcaagccgattcccgccgaggacgccaccgaagcgggcgtggattcaatgggtaatcccggtgctggcaccattgtctacaccggttcgttggagaatggcctgaccgacgaacgcttgtcggaattgttcggtatgcccatcgaagtccagcacacccacggtcgctgggccgcctacgccgtgtgatgcttgtaggtttttaggcgggattttcttcgccccctctggagggggctgtcagcgtaagctgactgggggaggtccaaccagttacgaaggcaaccatgacaaccaatagcaaactcgtattcatcgatatcgacggcaccctagccgacgaaaaccacgtcgtacccgaatctgccagaatcgcttgcaaacaagcccaggccaacggccacaagctcttcatctgcaccgggcgttccgtgccgaaaatcgaacgcagcatcctcgacctcggtttcgatggcgtggtttccgtggcgggcgctcaggcgaatatcggagacaagctgctgttccagcatctcgtccctcctgaagcggtcgatgcggcgatggcgtattttgccaagcatcatatcgagagctaccaatggcaaggtgcggacggcatgtacatctcggaaggctaccgtcaacatctggaatcgaaaggcaagacctggaatcgtggcgaattcgcgcgattctggcacctgttggatgaggtggaggtgccgactggctcgactttgggacagacgattcgtgtgagcaaggggtcatacttcacctcgccgaatcctgacgtgactttcgaggagactcaacgtgatttgagcccatggtttgagctcgtgcatggttcgtatgacaatatttccccgaacaatggcgaactactcatcaacggcatcgacaaaggtaccgctgtgcgcgacgtggcttctttgctgggctatgccattgccgacaccatcaccatcggagactccgacaacgacactgccatgctcaaagccgccggcacatcggtagccatgggcaacgccatccacggcatccaagccttctgtgacttcaccaccaccgatattcaccaggacggcctggccaacgccttcaagatgttgggactggtgtgaggctatgtcgtttgctctcagacgaaggatcctttcgtgctgtagtagtgagaaataagttgaatatatactgaacggggaaggagggaacgatcttatgccgacgataatgaaagaacagatggaagtcagcattcgtgtcactcctcagcaggtttttgatttcatcaagcagcaggtagacaccaatggaggctttgatgaggatactcgaccagtgcgggtgcatgattcagcttatttgaagcaacttctggagagctgatgagctccgccgtatgtgtcattttcgactgcaatatttatatcgatgtggcacaacgtatgctgcgccgagcatagagaattgtgaattcaaaatggtttgttcatcatgcgaaaatagtggtcatctgtccgtcgcggttgcgcaatttacggtggcggaggagccggaacggaatctggagattattgacggatttgcgcgtgatgctgcgattgacggattcgcgcgtgatgcggcggcgggcgatagggaagccgatctcattactgctgagctgagtcgtgagtgtcttgattccgcgcgtcgaacattgccggtgttgcagaatcgccgttttgccgatccgcagttgtgtgactgacctctgaataactttactggcgctgttgataagggttctatgatgggaatcatgaccactactgttgatagctctgattcaatgccggaacgtctgcaagaggggagcgcggcgcccgatttcactctgccggcggttatacctgggtttacagagagcggatcaatcaacctgtctgacgtgcttgatgccggccgcagggttgtactgtatttctacccggccgcgatgacgcccggttgcaccaccgaggcttgcgatttccgcgacaatctcgcccgattggcgtcgaaaaacgttacggtgcttggcgtctccaaggactcgcttgacaagctgcgcaagtttgcacagcgtgatcatctcacgttcccgctgctgtctgatcccgacctgaccgtgcacaagctgtacggcgcatacggcgaaaagaagctctacggcaaggtgcacgtaggtgtgatccgttcgacactcgtcatcaatcccgatggctccgtggcgattgcgcgctaca

SEQ ID NO: 629 - DNA, 15668 bp, Unknown
  R14_15m  MAG No. k141_8032
cggagcggaccgttcagcatccacgccaccgacacgctgcttggcattcacggactgcaaatcacgcatgttttccaacggctcaatcatgcgcagatccattgcaggccgcccaccgggattcacgatggtaaccggttgcccgccgcccaggaatcgcgccgccttttcaggcggattcaccgtagcggatagaccaatgcgctgcatatgacgatcgccacggccagcatcgacggcggcatcaccgccctcatcagcatctgcatcgattgcatctcgcttgcgcgattctgtgacaaggttctccagccgttccagacttaccgccagatgtgcgccgcgcttggtgcccgccactgcatggatctcatcgacgatcaccgtatcgacagtgccgagaatccgccctgccttcgaagtgagcaacagatacaacgattctggcgtggtaacgaggatatccggtggatgggaggctatgcgccgccgctcctgtgcggtggtgtcgcctgaacgagtggcgaccgcgatcttcggcacgggcagcccttgcgcctcgcattgtgcggcaatgccctccaaaggctgttctaggttcttggccacatcggccgcgagcgcctttaacggcgagatatacagcacacgcacaccggcacgccgcgtgcgtggcacggtcatcaatcggtcgatggctgagagaaacgcggccaatgttttgccggagccggtaggtgcgatgaccaagacattacgaccggaatggattgccggccatgcctgagcctgtgcctcggtcggctgaccgaaggcatgctcgaaccacaccttggtgggttcggaaaacaggctcagggtttcgtacatatgtacgattataggtcagctgaagtaggcgatgacttcttcggcggtgccgtaggcgctttgggcatcaagcttggtggccgcataggcggagacataggagccgatttgcgcggactgcagcagcgtatggccagcggccaagccagccagcacagttcccatgaacgagtcgccgcaaccggtggtgtccaccgcattgacttgcgcggcggatacgcgatgccaacgtccgttctcgatcaccaccgaccccgacgcaccaagcgtcactatcgcccggtcgaatccgtaatcggtgaatcgttcggcgacctcataccagtcgagtgattccacatcgccgtccggcagacccagtaactgagccacttcatgctggttgaccagcagaatatccgtggcttccaccagttcgtgaggcagctcgtccataaatggcgagtcgttgagcagcacggtcacgccagcgtcatgcgcggtctgtgcggcggcgataacggtggagatcgggctctccaaacacagtcccaataccgcgcattcggcgatggtcgtgcgatgtgattgcacatagccggcacttgccttggcattggaacccggcgaatagacgatggtattctcgccctcagcgctcacggtgattaccgtggtgccgctggggccttcaacgtgcaggatatcggcggtgtcgacgccggcctcatccagcttgcctaataggaagtccgcgttggagtcctcgcccaccgcgcccagcaactggacattgacaccgaggcgagcagcggcagacgcctgattcgcgcctttgccgcccggcaacactttcatggcaccaccattgacggtttcgcctggcttgggcagtcgtttggtggtcacggtgtaatcggcgttcatcgagccgaccacgattaccgagcccggcgcatccttcagcgcttccaatcgttcccgtacgggctcgggcatctgtttatgttcttcttcacttatcaccatgggctccaagcatagtaggcggcgggcccaaatgcgcgcatgatcagccgcgcaacttacgaagacgctcgtgcatggccaccatcagcaccaagagcaccagcaaataccacgggtagagactgattgtcacatattgcgcgatgatgccgaacagtggcggcatgagcagtgagcccacataggcacaggccatctgcacgccgacgacggcctgcgatttgtcttcgccgaagtaggccggcgtcgagtggatgacgcacggataaatcggcgcgcacccgaagccgatgaccaccagcccaacgaccacgccaaggtggtgaggcaatggcacgaacatggtgaggatgccggcgagcaccagcacttggccgaggcgaatcatgaccgggtccttgaatcgcatggtcagaaagccggaaagcgcacgccccacggtgatgcctacatagaataggctggcccagctggcggcggtgatcttgtcgatgccgctgtgcatcaccatgtagctggaggcccacagacccgccgtggattcgatggcgcagtagcagaagaacatcacgaggatttccttggcaccgcgaatggcgagcacgccggccacgccgagcggtttgcgttcagcaacagacgccccttcagcattaccacatccctcggcattgccgtcagatgatgcggcaccatcggtcgattcgccgcccccagtcgtgccacgtttcttccacagcggcaggctcagcaccaggatgacggtcagcatcacctgcaggatcgcgatgtaccgatagccccacggccagccttggccttgagacagcgcatagcccatgatgtaggggccgaccgatgcgccgacgccccacatgcagtgcagccagctcatatgccggctttcgtagtgaatggctacgtagttattgagcgccgcatccacgccacccgcgccaaggccgtacggtatggcgatggccaacagcacccagtaattcggagcaacggagaaacctgtcaaggccgccgcagtcaacgccaccgaaacggcggtgaccttgcctgccccgaatttcaatgtcattcggtccgaaagcagcgccgagacaatcgtgaacatggaaatcaccgcggagatgccgccagcccacgccaccggcacgttcagatcctggctcatggtgggccatgcggacccgagtagcgaatccggcaaccccagactgataaacgccacatagatgacggcaagcaacagactggccatgttacatctcccattcacagtacggcaccggttgtgataacgatgtcatcagtctatcgaatgactcatgggcaacacgcataaaacatatgacaacgtgctcacctcaaacgccaattacggaaattctcggtaagcacgatgtcattatcagcgacgtcttcgatcaggtatcgatcttggagcggtcgaaatcgtcggcgttgtcgacgatgaactgcttgcgcggcggcacgtcgtcgcccatcagcaggctgaagatctcggatgcctgggcggcgtcctccatgcggatacggcgcagcatacgcgtgcgcgggtccatggtggtgtccgccagctggtcggcatccatctcgcccagacccttgtatcgctggatgtcgtcgttgtaaccgatgtgcttcttgtcgaggtcggccagtttgccggccagctcgtcatcggaatacgtgtagatgtattcgcccttgtgcgagccggtcaacgcgatgcggtgcagcggcggtactgcggcatacacgtagccgtgttcgataagcggccgcatgtaccggtagaacagcgtcagcaacaggatacggatgtgcgcgccgtccacatcggcatcggtcatcatgatgatcttgtggtagcgcgactgttcgatgtcaaagctctggccggagccggcgcccaccacctggatgatggccgcgcattccttgttggagagcatctgcgtaatcgacgccttctgcacgttcagaatcttgcctcgaatcggcagcagcgcttggaaaccggcgttgcgggcggccttggcggtaccgagtgcggaatcaccctcgacgatgaacagttcggccacgtcgtcattgcccggctggcagtcggagagtttggccggcatcgaggcggattcgagcgcgttcttgcggcgcgtgacctccttggccttgcgcgactggatgcgtgcgtgcatttcgccgacgatcttctccagcacgcggccggattgttccttgtatccgcgtttggagccggtgatcatctcgccgaattgcttgtcggtgagccgggtgacgatcggcttgacctgcgcggtgccaagcacgtccttggtctggccttggaactgaggttcggccacgcgtgcggtgaccacggccacgagtccggcttggatgtcgtcgcgctccaccttcatggcggagtccttcatgttcaccttgagcttgcgggcgttgtcttccaccgccttgcgaatctgcttggtgatggcgttcatgaaaccgtccacgtgagtaccgccgccgggcgtctccacgatgttcacgaagctcatgattgtggtgtcgtagccgttgacccatcgcagggcgatgtccacgccgcaggtgcgttcgatttcctgggcgtgcagttcaccgccttcgcccacggtctgggtctcctccttataggtgccctcgccttggatgcgccagatgtcggagatcggctcgcctttggataggaagtcgacgaagtccttgacgccgccggtgtgcaggaattccacgacgcgcgggtgcgcgggctgctcgccgaacgcgccatcgacgacctggtcgccggccgtcagcgagaagtcctcctcggacaggctctcggtactgtcggcttgagcctcggtggagtcgtcgaagagttcggcatcgttggacgagacgtccaaagccggggcctggtcttgcgcaggttcgactgcgtcggcatcaatggcttcggcggtgtcagtcgccgtttccggtacgttttcgtcaacaatggtgattttgagtccgggcaccaggaagctggtctggcgcacgcggtcgatgagctgttcgtatgagaattcggcggttttgttgaaaatctccggatcataccagtagcgaatacgggtaccagtggttttgggagataccttgccgatgatttccagctcggtgggtcggttcttgcgagtgcgcttgaacggggaatcgggagacggattggccgggtcggcatccgtgtatacgccagggtgaccttggtggaaggtcatgtggtgcgtcttgccgtcacgatccacttcgacgtccagtcgggagctcagggcattgaccacggaggagcccacgccgtgcaggccaccgacggcgttataagacgagttgccgaacttggcaccggcatgcagtttggtcagtacgacctccacgccggacaggccggttttcggttccttatccaccggaatgcctcggccattgtccgcgacttccacggaaccgtcggtgtgcagggtgaccacgatatcgttgcagaagccggccaaggcctcatccacggagttatcgatgatctcccacaggcagtgcataagaccctgcgagtcggtggtgccgatgtacatgcccggacgcttgcgcaccgcatccaagccctcaagaacagctaggtccttggcgccgtattcttctttgggcatacagtcctatttttctcttcaaatgcttggctcccctcacagaggggagccagatgatcattgatccaggaagtcgcgcagggtctgcgaacgggacgggtggcgcagcttggacatggtcttggactcgatctgacggatgcgttcacgggtcacgccatacacacggccgatgtcgtccagcgtcttcggctggccgtcttcaaggccatagcgcatcttgatgacgccggcctcacgcggagacagggtttccagcacctgcttgaactgttcctgcagcagggagaaggccacggcgtcggacggagcgatggcgtcggtatcctcaatgaggtcgccgaactcggaatcgccatcctcgccaagcggggtgtgcagggaaatcggttcgcggccgtacttctgcacttcctgcaccttctcaaccggcatgtccagctcgcgggccagctcgtccggcgtaggttcacgccccagatcctgcagcatctggcgctgtacacgggacagcttgttgatcacttcaaccatgtgcacaggcacgcgaatggtgcgggcctgatcagccatggcacgggtgatggcctgacgaatccaccacgtggcgtaggtggagaacttgaagcccttcttccaatcgaacttctcgacggcacgaatcagaccaaggttgccttcctggatcaaatcaaggaagagcatgccacgacccgtgtaacgcttggcgagcgagaccacaagtcgcaggttggcttccagcagatggtccttagccttcttgccgtcggcggcggcccacttgagttcacgcttgcgcttgaactccatgccttcactttcggtgtcgagcaggtgctgggcgtacaggccggcctcgatgcgctcggacaggtcaacttcctgttcggcgttcagcaggctcacacggccgatctgcttcaggtagtccttgaccgggtcggcggttgcgccggccgcgatcacacgacgcttcggattgcccgaagggatgatgttctcttcctcatcatccgtgtcggagaccacgtaggcacccttttccttgggctgctcgggtgccttggacttggcttcttcctcgtcctcgtcgtcttccacatcgtcgtcgtcggcatcgtcctcatcgaggtcttcgtcgtcggcatcgccttcgtcaacgtcgtcaagatcctcgccgaggtcgtcaacatccaaatcgtcgtcgttgacctcggcatcgtcatcaagctcgtcatcgacctgagtgtcctcgtctttgacgagctcatcgtccttggccttcttcgcggttttcttcgcggcggacttgcgcgtggtctttttcgagggctctgcggacttggacttcttggcagaagtcttgcgcgcggtggtcgtagagctggccttcttcttggtctcggtctcctcgctggactcggctgtctgcttggttgccgtcgtttccttcgtggccaaaactgctccttctgatctctcgccgtgaagtgcatataccacacgggcccacttctggcaagggcaaatcgtcaactatgtgagtaaaccaccctccacggacgattattcccacatcgttgcccgacgtgttgccgatcaccacacgctttccttccgcgcatcgcgcataaaacctcggaaatccgccgtttctgttcattcagcccgagcaccatgccggtgccacgcctcgatcggcggctgagaatatcatcgccgccagcgaacaatcctcatcgagcagcaggcatcgcaaggcgaacaccattgctcgcggatcgcccagccaccataaggtgtaggcgatcacggccaatggctgtatgcagtacggcaccggtgaggcttccgcgatatcgagcaacataccgatgccggcatggcaacgctccttatccggcatcatgccttcatcctcgaatgcgcaggtcagcagctcgcccattcgtgttctcgtacgtgccagatgcggtcgcgccgcgaattccatgagccatgacttggggcaacggctttcatcaataaccaacgagagaatcagcgcatcacgaatcgataaggtctcgcgcatgcccaccgcaaacgcggccatcgtctctcggcctaggtcggtgttcccggcatcaagacaagacagccattcatccaatggttcggccacccagtcggcattagcctgttgcgcgcctcgaagtcggcgatcattgcgaaattcctgtgatctcgtctccaactcatcaaagccaaagggctccgtctgctcggcggcgtgccgtttggcgtgtcggctcttacgcggcttgtgcggcgtgttgttgttcatcatgtcctccttgactaatggtgtgcaatctattggtgttgtggtgcgcgccgagccggatagctcatgcgccgagggggtgtgtgcccactatggctgaaaacgccgtatgacgcaggaaaaaacgaccattgtggttctagcttcaaaacccttgatttccaacgttcttgtgttcttcaaaccctgtggataagttattaggcatgtgcacaactgctaacaaccgcgaaatcatcgagccacgcatcattcagttggtgcgggaactgactgccgcccccgccaccgacgaggttgccgacgccctgaaaccggtgatggaacaggttgtgggccaagccgcctcctccagccaaggaggcaaacgactgcgtgcgttgctcgcattggacgccttcgatattcttgccggcgacgtgactcctgatcggcgtgacgccatgatcgacctagcctgtgccattgaagtgtttcagacggccgcactggtgcatgacgacatcatcgacgaatccgatctgcgccggggcaagccttccgcacaccgtgccttggaacaggccgtacacagcggtgccataggccgtggcttgggcctgatgcttggcgatattctggccaccgcctgcattgaaatcacacgccggtccgccagccgtcttcccaacaccgatgccttgaacgaggcgtttcttaccatgcagcgcgaggtggagatcggccagatactggacttggccgtcgagatgaccccgttgtctgatcccgaagctctggcgaacgcctcattgaacgtattccgctggaagacagccagttacaccaccatcgccccactgctgcttgcactgctggccgcaggagagagcccggatcaggccaggcattgcgcgttggccgtaggccggccgctcggactggcgttccaactggccgatgacctgttggatgtcgtcggatcaagccgcaataccgggaaacccgttggcggagacattcgagaaggcaaacgcacagtgctgttggctgatgctctgtctgcggcagatacggaggataaggccgatctgattgccatcttcgaagcggattgtcgcaacgacgaccaggtagcccgcaccattgaactgttcacgtcgaccggtgctcttgatcgatcccgcgagcgcatcgctgccctatggggtgagtcccgtaaggcgattgccggtcttgagctgaattccgaagcgcagcgccgtctgaccgaggcttgtgcgcgattcgtccccgaatccttgcgatagtccacaatgcgagccgccgggtcatgagaccatgaacaccggtgaaaacccgtgaaaactatgcgccgatgctccggccgcgtaaccggggccatgtacactgaacatgtttagtcgtgattaaaggaatcgtacgatacaacatgagtgagaacgagcccgcgcagatgattgagggacgctaccgcatcgtgcgcaatatcgccgagggtggtatggccaccgtgtatgaggccatcgatgagcgtctggggcgcaccgtggcgattaaggtcatgcacacacaactcgccaaaggcccgcatcgggagcagttcgtcgaacggttccgccgcgaggccaattcggccgcgtccatcgccaacccgcacatcgttcaggtgtatgacaccggcgagttcaatggacttgattttctggtcatggaatatgtgcatggcgtcaatctgcggcatgagatgaacgcccaaggcacattctccgtacgtgagacgctgcgcgtggtcgcggagacgctggatggtctggcttccgcacatcgcgccggcgtggttcaccgtgacatcaagcccgagaacattttgatcaatgatcgcggccatgtgcagatcactgatttcggtctggccaaggccgccagccaggccacattgagctccaccggcatgctattgggcaccgccgcttatctggctcccgaaatgatcgagaacaatcaggccaccgcgcaaggcgacctgtattccgtgggcatcatggcatgggagatgctgaccggcaaggtgccgttcgattcggataatccggtgacgcttgttttcaagcatgttcatgaggacgtgccgtccgtggccacggtctgtcagggcattgatccgtccgtggcggcgttcatcgcccatctgaccgcgcgtcaggtggatgcccgccccgccgatggcgcggcagcagctgaggaattgagccagttggccgccaaattgccgctggaggcgtggcaataccgtttgcatgccgaacccatcggaggtgatcataccgatgccaccgctgcagcgctggtaggcaatatcgccgagcaggccccgctgaccggcgtacctgccggtgcagcaacgttcaagccgtccgtaccagcgtttttggccgatgatgtcgcaagcaataccgtcgataccggtggcgccgcagacgtcaatcctccggctcctccggtcgcccccaccacggcacttgattcgtcgacgccagccgatgcttcggctccccataagacgcaaatcatggcacagtccggcagcgagacacaagtgctgcctcaggccggcgatgccttcacccgagcgcttgccctttccgatgagccggacgtcgcttccaacggcaccgggccaaagaagcagcgcagcaaaaaaccgctcatcatcgtactggtgatcgtgctggtactggctgcaatcggcggaaccgccggctggtggtggtttgccggaccgggcagctattggagtgtgcccaagccggatgacgtgacctgcgatgcgaatgcaagcaccgaatgctcgttggccggcgcggattgggccacgtatgagagcacgttgaaggctcttggcatcccctacaagacgcacaaggaatacagcgacgacgtggcggaaggcaagatcatctcttcttccgtgaacaagaccaaggccgttgtgaacagccgcataagcaagcgagccaatcaggagcttacggtggtggtgtccaagggcgtgcggatgaccaccatcccgaaggatattctcgacgcgaattcggccaatggcaaggacccgttgaacgcgctcaagaaggccggcttcgataatgtcaagcatgacgagtcgaaggatgagtattcgatggacacgccgcagggtgtggcattgacgatctcccctgatcccggtaccacggccaagcacaacgatgaggtgacggttactttgagcaagggaccgatgccggtgaccatgcctaacatcgtcggtaagacccaggatgagatgcaagccgcgctcggcgagttgaagctcacggccaatgtcaccgaacagtacgatgacaaggtcgaggccggtcaagtcatttccgcgtctcaggaagccggagcccagctgaagtggggcgatagcgtggacgtggtgatttccaagggtccggagatggcgacgataccgtccggccttgtcggcaaacaggaaagcgccgtaaccaagacacttgaaggtctcgggttcgaggtgaaaaccgacaaggtgctcggtggcctgttcggcacggtacgtaccgtgaaaagtggcgatacggacctatccaacggcggcaagattcgcttgcgcgatgccaacggcaaccccaccgtcatcaccctcaccatcgtgtgagatttgaatgaggctccctctgtcttgagacgagggagcctcatttgttaattacttttcggcttcttcagcggcctgccgggccttgagctcggccttgaccttctgggcgtattcgttcacgaattcctgaccgctcattttctggattgcggtggaaacacgatcggtcagcgaacgcaaatcatcatgtgtaatttcatcagccggcttcttcgcaacctcaatcggcttgccatacaacaccttggtcttgcccttcttgggaatcgacgtgccaatcggctgcagcttgtccgagccgatgatggcggtcggaacaatcgggcaaccggtctcgagcgcaagtcgtgcggcaccggtgtgtcccttgtacagtcgaccgtccggactgcgcgtgccttcaatgtggataccgaacaggtgcccatcctcgataatctcgcgtgcatgctcgagtgcgccaagcgacttgctgccaccggaacgatcaaccgggaacacgcccacggacgtgaaccaccacttcttgaacttgcccttcaatcccttgccctcgaagtattcggctttgcccatgaagtgcaccatgcgcgggcaggtaatcggaatcaaagcatcgtcaatcaccgccagatggttggctgcgataatcgcgccaccctctcgaggcacgttattcagtccgctgacagcagggctcaaacgatgatgagcaatagggccgagacctttgacgaagaaccagtagagcacttggcattcctcccgcagacgaactagccattggccggtcgcctgattagagtgacagttatgactgagaaccagaatagcaatgccgacggagagcggccaacccccacgccgggcaacggacaggattccgatacttcgtccaagtcgtcgactcccggtgccgccggaccggccacgaatggtgccgatacaccgcaatcgcatgacatgaacgatttggatgcggcgtgggccgcgttcgaagccgagcatcaggccgacttgcatgacgtggcttcctccaggcaggccaaaaagttcgagaagcaggccaagaaacgcgagaaggaagcactgctttccgtagatgacttggatatcggctcgttcaccgatgatgctcgcccgagccgtggcggcaaaaaaggcaagcagtcaggcccccgtgatttcaccggctccagctggctggataccgataatgtgatggacgcctatgatgatggcggcttcactcccccgaaccctgatcttggtccggtcaaagcatctacggtactgctgacggcgttgctcatcatcggtctcgcaggcgaaacggtgatgatattcgttcccggcttgaacgcgattcctctcttaggcgcgctgctcaatattctcttcgggctgggcgtcattttgggtctgggcggattggtggccaaaatcctcaaccgcaaagaccgccccggtgatcagggtggctattacgacgacggcgcgagggtgtagttcgcgtaggttgtgtagtccttggctcccctctctgaggccgagccgttaagcaaacagcccagtgggctgtttgtaggcgaggtgtgagcgatagcgaaccaatgtatcacaggcgtagctcgtccgtaattgcggccgagccaagataggtcacgaattgaagtcgatggactcctgcaactcgaaatagttgataatgaaggaaaggtaaacatattcgagcaaacccattccatatcacgccttggacttggcggtttcgatccacttgttgaacagggcttcagccttgccggagtcgacagcatcctcggccagcttgtaggcctcggcgaagcgctcggccagtgtgccgttgccgaccagattgccgtcagccacgatggcggaggcagcgttgagcagcgcggtggtgcgggacgtaatgtccttgccggccaggaagtccttaaatgcgttggcgttgacgtccggcacgccgcccttgagctggtcgacggtaatcttggcgagacccagatccacggtcgggtcgaactcggtttcggtgaccttgccgtcgcgaatctcccagacggaaaccgggccggtgggggcgagctcatccatgccctcatgcgaagtgtagaccaagccggactgaccacggctggcgtagacggcagccatgatcgggctcaccttgcggttggcgcagccgatggccacgtgtgccgggttggcggggttggtcaacggtcccaggatgttgaagacgcacggaatgccgagcgcggcacgaatcgggcccacgaagcgcatggccgggtggaaggtgcgggcgaacgcgaaggtgatgcccacctcgtcgcccacttcgccgacggcctccggcttcaaatccagcggcaggccgaggtcttcgagcacatcggcggcaccgcacttcgaggatgcagcgcggttgccgtgcttgacgatcttcacgccggctgcagcggcggccacggagcccatggtggacaggttcacggtggcgaagccgtcaccaccggtgcccacgatgtcggtggtcccaccggaaacgttcagcggcacggcgtgggagaccatggccttggcggcaccacgcacctcgtcggcggtcagtcccagctgctgctgcatagcgagcgcggcacccacggcggccggattggcgttaccttgcatcaggtcgtccacgaaccactccgattcctcagcagtaaggtggtctcccccgaccagcttggtgagaatcgacttccatgtgatctcggccatgatgccctccttggcgtttcctacgccgtgtgatgtatgttcgccgctcattgtaatggttcgtcatttcaaggccctgaatcttccatattgcaaaatatggcgctattgctgttttcgtggatgtcggttcgtcgtcgagccgttggtttcgtaagcgtgaggggcgttcccgcgtattctgttttccgaccaaagaaatgaatcacgaagaacgctgggcaaaagcccattcaccggattgccgaacgtcaaaggcacggttgcagaggatgcgcggatcacggattcgccgccgcgttccgaacccgtgctcgagatccgggtgcgtccacgtgcgggtatgctccgatgctcccgatgcggaaggaggcgccgcgggcatgaccagggcggcggcgtgcggcgtcgtggtcgcttccgtgccgtgggccgagccgggcagccggtccacacgcgatttcgaatcggaacgcgcgtggccgatgagcgtcgcgaaccagaagaccgtaagcggttttccgcacgtcgcgtggcgcgccgccggaagacgccgcccatagggtcgccgaacggttgaaagcgtcgatgccgtctccgttcggcggcctcacgtcgattggcgtggacgagaccggctaccgcaaaggccacacgtgcatcaccgtcgtcgtcgaccacgaacggcatcgggcgatatgggcgcacgacgggtacggcagggacgtgttcggcctgttcttccaaacgttgacgcccgaacagcgcgcctccatcagggtcgtcgccggggacggggcccggtggatcgactcatgcgtgcatgagtggtgcccgaacgccgaacgcgcgcccgacgggttccacatcgtcagttggacgagcgacgcgcccgacaaagaagtcaggagacacccgtggaaccaggcgcgccgcgacggggacgagaaatccgtcaagcgcatgcgcggcgtcagatacaccgtcctgaagaaccccggcaagctgaccgacagacggtccgaggcgtccgggaacctgcgggacacggaccccaagggccggccctaccgttcatgacggctcagggaacccctccggacgatgcccaaacgaccggccgaccaggccgggaccgaactggaccgccgggtgttccgggcgtcccacagccgcatccccgaga

SEQ ID NO: 630 - DNA, 22482 bp, Unknown
  R14_15m  MAG No. k141_8196
tagccacaacgggccacccagaggcatccacagttacctgtgcgaaatgaagaccgttgaaattaagccgtttctaagattcccgaatagttagccgataatgtacgttatgtcagattagttatccttgacgaggattcagtcgcctgtatcaactagtccacgcataccaggccgacagccaaaaggccgacagccaaaggagcaccggagcgaccaccgcaattgcaagaatcgccgtgcctttcagccaatccttgtcatctcgtttccagtggaatgctcgccaaatgaaccatatcagcatgggaatctcatacagcgacagcaatggcaaaccgatgaaaaccaggtcgaagcccgcggcgcaggctccatcgcatcccatcatgaagaagtcctcgccgttgtgtttcagtgcgtttggaaataacggtttacggcgtcttcgagctgctcaggttgctcaataatttcgtaggcaccgtgttcctccatctcaccggtcggagcgtagccccagcggcagccgatagcgtccaaattgcaggcgtgggcgccgtcaatgtcggtgtagcggtcgccgatcatcacggccctgtcccccgctgcagcatcaaaaccgattttgtcgaagcagtaccgaatcacctgatctttgtccagacgggaattgtctttggaagcaccatagatgccgtccaacagttcggtcaggtggaaatggtcgcagataggcatgcactggtattcgggcttgcagctggccagtgccaggtagtaaccgtcggcatgcagtttgagcagctgttcacggatgcctgggaatacgacgttcaccagtcgtccgggcaccttgttgccgggctcgttcggatcgtcgaacacggcacggtctccgtagtagctgcggtagatgtccacggcccgatccagatcttccgcaggcacatgattgcgacgcagagattcaataatcgccggtccgatgaagcgtcgcagttcggcggcgtccggaaccggtcgaccgatctcttcgaaggtcttgatgacggagccgataatgccgccgtcggacttggtaagcgtgccgtcgagatccaacaggaccactttcatcggatgctgtgccattgagattccactcccccttgttcatgtcgactgctttgaatggtcgtcaaacaatgcgacttgttccaacaatgattatgcccagtcgggatgactgggcatcaagttcacgtgttgttcagtaggagatcactcgtagtcgggaatccaaccgtcacggtgcatttgcaggcgcttttcgagcagggtggccagttcctcttcgctacggcgttccagcagcatgtcccagtgggtgcgggtgggtttgctgatttcgtcgccctcacggtcggcgtcgccctcacggtgggccacggaaccacaacggcactcccactcgtccgggatttcggcaccctcggcaaacggcaggatggtgcggtggcccttcgggcatacatacgccacatcgtttcgcgcggcgaaatcgacgttgtcgtcggactccagcgatttcgctccgatgctcatgcccctgaggctacgttctgccatatcggcatcctccttgaaagatctttaaccctactaatttacgcaacagttcggacttggccgctattccaagcttccgacgtcggctgacaaactcccgtcaaacagccccgtcagtccacgccggagtaggccaccacgccacgattgacccggtcggccgcttcgtgggcgaggcctgccagccgctctcccccgtcgaacggcagcggctgggcgacagcaatctgctgcagcacgtcagccagtcgtttggcagtgcgcacgaagtcgccgccggtcatgtcggtgccgtacaggcacgatcccagcgaaccgccatccgcccattcatacatgatgtcgagaatgccgaaatccggccgctgcatctcgtccagaccgtgatcctcgcacaggatatcgatgtcttcacaaatgcccttgagcttggacgaagcgatggcgatgggcccggagatgccgcccgggtagtgcctcggttcgccgtctcccccgcgtctggcctcgtataccagtgaagagagcacagcggccagtccgttggcgtcgagcttgtcgaacgtgccggcgagcagcgcctcgcacagttccaggtcatgttcactgtagatgcggcgcagcagcagacctttgtcagtcaacgtcatgtcaatgtggccggccgcattgacatgacgttcgaggtaaccaagcccggtgagaatatcgcagatgcaatcgaactggcgtgccacggacccggtgcgggagtcgtagcgatcggtgacgcgctgcagttctcgagtctcgcgggcccagcggtggccccatttgaggtgttgctggaggtccgggcagttgcggcatggatgctcgtgttccgccttgcgcaaatcgcgaatgcgctggtcgaggttctggaaagcgcgtgaacgctcctgatcggtcaggaacacttcgtgcttcagtttgcggcggccttccttttcgatgtcgctcagctccatacgcagggtcatgaactgtttgaagtcgccgtgttcgcatgcgaacgcctgttcgtatccggccagcgcgttcttcagtgtgttaatctgcgattccagctgccaggccgattcgttggcctcccactgggcaaacgactggtccagggtgacgcgcgcggtctcgtagtcgctggagttgagcaggttcacggccatgttgaacgtgggtcggaagctcgagtgcagcgggtagacacgcttggatgacagcgaggcggccgtggcgggcacaaaaccgtgatggtcgaccacgatggcgtggccgatggtgtcgatgccgcgccgaccggcacgaccggtgagctgcgtgaattcgccgggcgtcaggcccacatgaccggtaccgtcgaacttttcgagtttctctaccaccacgcagcgggccggcatattgatgcccaatgccagtgtttccgtggcgaacaccattttgaccagaccttcttcgaacaatcgttcgactatctgacggaacagggcaatcatgccggcatgatgcgaagcgaagccttcttccaatgcaaagcggaacttggagaactgcagggctttcaggtcttcctgagtgagttgcccctccaccatctcatccacgatgcggcgaatcctggtcacttcctcatcggtggtgagctccagtccagcgttgatacactgttccacggcctggtcacagccgttgcgcgagaagatgaagtagatgccgggcaacattcccaggaagttaagctcgtccaccacggcccagcggcgcggggtgtggcgttccgctttcggagcacggtctttggcgcctttgccgccgcggcctctgccgaagcccttgcgcttatcggggcgttcctcgccgcgccggcgtgcggccttgcggtccaactggtcgagccggttgatgagttcggcgttgagtttggtggtctgctcgccgttgccgtcgcggcgatagaggtccagcacctcgggctcggtgtgttcgtccgcctgcacgatgacgtgctgttccaaaggcacggggcggtgttcgctgatcaccagttttgtgtcgcctcgcaccgaggcaatccagttggagaaatcctccacgttggacacggtggcggacaggccgacgatcttgaccgtcttgggcaggtggatgatgacttcctcccacacgggcccgcggaatcggtcggccagatagtgcacttcgtcgagaatcacgtagcgcagtgcgttcagcgtggtggaacgctcgtagagcatgttgcgcagcacttcggtggtcatgaccacgatgtccgcctcggaattgatcgaggtgtcgccggtgagcaggcctaccttgtccgggccgtacacgtcgaccagatcatggtatttctgattgctcaacgccttgatcggtgtggtgtagaaggctttgacgttgcgttcctgggcgaggtaaatggcaaaatccgccactacggttttgccggcaccggttggggccgcgaccagtacgttgctgccggcttcgagcgcgtcattggcttcggtctggaagtcgtccagttcgaaaggcagggattcggcgaatcgcgctgctgcggacgcccgatggcgttggaccttttggaatgatgcgtaccgctgcgaagggctcagcgtctgggaatcggcattgcccttatggtgttggtgacgtgccattgctgctttccgttagttgttgaatcgcttccagcgggcccatgcctgggtgtggcgttcgcgcttggcggccttgccgcgaatcacgttcgcatgggcctcggcataacgattctgtgccacgctgagcggctgagtgaacagaggcggctcgctggtgtcggcagaggtgccgggctcccccatcgcggccacgcgttcaccgagttggccgccgatgtcggacatgtctttcaaggcacggagtccatgaagggctgcatagatgagtccggcaacaatcatggccagcatgaacagggccagaatcagccatatccaccaaggcatgaaaggctccttacttgttctcgctgatgctcagttcgcgttcggcgcgtgccacgatcatggtgcgcaacgtttccggggcgaccgccgtgatatgacgcgcgtgggcgatgcagaaggccacgaaccaggaatcggaggaaacggtcagatgcaccttttcaccggcaccgcattgttcgacggtagcgcccggcaatgtcttgatgaatgccagatcgcgctgatcggtgatgaacaccgcgtcggtaccgttgtcgaaactccacttgcgcagttcgctcaccggcatgttcgggatgttgatctgcttggtgggcttgaccagttccgccttttcgatacgggccaatcgcagtacctgccagatgcgcggtttgccgttggccttgtcgagggtcttgtctttggagacgtaggcctttttgtccttgggtgcggcggaaccaacgtccgtgtagacggcggcataatacacgccttcgtcaatgaagatcttggcgggggccaccagcttgcggcgggtacgacctgtaccgtcggtgtactccatgtccaacagcgaatcggtgttgatcgcacgcttgacgatggagaagcttcggggctccagctcatagccggtcaggctcagccacggggtctgaccgggactgacatgacggcgcaaacgctcatacagggattcggcctgcccacgctgcttgtccggcagcaacggcgaatgcgccaggtagctgaccgaggcggtgagcatgctgaggtattgcggcgaaatgccggcaagacgttcaaggcccagcgaattggtggcggaaacaataccctcggcatccagcagcggccagtcaatatcgaagaactggctgccggccatctcaccatcgtcggaaacggtggtcagggtgttgatgtccttatggatgatgttgacgaatttcttgagttcatcatcgttctttggcttgccgataaagcgttcgcccagctcgctcatcgagaattcctcacccagatgagcggagaggaacagcatcagacgcaggcgacgatcaacctcactgcccgtttggaaagcggagccgttcttcttgttctgagccttgatagactcgggatcacccggctctcgcacatcgcgactaatcgacggggaaaccaccgaagcgctcacaggactggcggattcgtcggccagagtgaaccggctggcggcgtgcaaacggcgatgataagcgtccacagcctcttgcgggctgacaatcgtggcccccggatgctcaagcacaaacatggccaaatcgtcggaatcggtgtatgccacgttcaggtgttcgccatccacgtcaacggtggcggcgaaacgacgcgaatcaataaccttgaccagtgaatccggaatgggctgcgtccccaagccaggcgcaatcgaatccaagccaagcccgggaatcggggtctgcggcacacgcggtgtagtgcgcgacacatgctgggtgagctgggactgatccggctcggaagaaatcgacatcgaacgagccagatagttggcggcggcaagcaccggcatatcttccggctcgaacatcaggcggatgcgcggttcgtcgcccaactgcagacgataggacgcgaagtcctggccttccgacttggacgagtactcaggctgccgtgattcgatggcaatgcccatcgcagcgagcttggcgcgatcacgctggaactgcttggcgaacgcggccttggcggcctgatctgccagctctccatacgagtcggcgtaagccttgacgcgctgcgcaatttggcgggatgtgagccattgcgggaacgcggatgacaacacagccagtacgtccagctcgtgcttgccccatttgtcggaaaaacgccgacgtccgcttgtgccctctgccattagtcctcacgtatagttattgtttcgttataagtgcgtatgagtttccccacactcactctatcttagaggctttttccacagttgagcgccatttcacaaaaataatatcttttttatcgttcgaccgtgttgtaaatcacacccaatcgtccggttcgatgccttgcgggccaacgtattcgccgttcggcacgtagctcggctcacccttatcttcaagtttggcgtcggcgaacatcatgacgtcacgtccgaatgtccagtcgccctgaatggaaaccgagttggctgcggccaaagatggcacggcgtaggggaaccgttcgtcgaaatcgcggatgttcttgtagtatcgcggatcaagttcgacgttcgggaagatgtaattgccatcttccatctcatacgtgtccgtcaggtggaagcgatcggaacgcataatgaacaaatcattggtggttttcaccggaaggaagcgcatacgatccacttggacgcagatagaaccgttgaacagaccgattgcggcacccatggcggtttccagctgaatcacctgttcggagttcgggtccgtgggattcacggtctttttgttacgaatcaccggcaacggcaacacaccatcgcattcggcgagcttgtctttcaaagcgtcgatgcgaatccagatcgagttggtgttgaagtaaggatgcttggcgatgtcttgggccgcttccttatcatccggatggacctggctcatttcacgcagtatcaggcgaccagtggccttgtctcgcacgatatggcctcccttgcgatcggccttggtgcggatagccacttcggccatgaacggggcacctgtgttttcgaagtgctgggccaacgtacgcgaggggcgtgcaccgagattgtcggaattggagatgaacaggtacttgaagccgcgctcctccaatacgtcaagcaggccggactcccagatggtggagaacaggtcgccgtggccgggcgggcaccattccagctccgggttcatggggtagctcaccggttcgccggtggcggccacgagtttgggttcctgatgctggatgatttccatcggcacgtcatgctggctgaacttgcgatgatgcttgagcgccttcatcgtgtccgccgaagtgcggaaagaattcatgaacgtcagcggcagttcgacgtccaggcgggtgcgagcggtaagcacctgaccgatgatgatgtcgatgaagcgcatctgcttggccttgtgcctacgcaccggcaacagcgacttggccttgtccaatcccatggaggtgcccagaccgccattgagcttgaggaatgcggtcttggcgaaggcgtccacggccttgtcgtggttgatggtctcatagacgtcgtggaagctgggcacgtggccaagcggctcgatgtcgtcctcacgaatccagctggaggcttcttcatggcgccatacgtcatacaaatggcggaactggttgatggcggtttcgctcatgccgtgctcgcgcatcttggcggccgaaagctcgaaagtctcatccacttcgggggtgtttacggtttcttcggggatatccgaggtgacggcgtcggtgtcgtcagcggcggcgatatccagttgggccttatcgtttatttcggtcaattcgggtccctttcatcaaatcaataggaaccagtctagcccctgtttggggcaaacacatacgacggggggcggaggcggtgaattgtcggtgataattccaataacacgccaagatgaagtccgtgtttaatccattacgaatggcttacaaaggtaagtccgtcgtcatgttgtctcatgttgtctgaaaacggaaaagccccggaaagcaaccacttagaagtggcggaattccggggctaatcggtcgggccggcgggatttgaacccgcgaccccttgacccccagtcaagtgcgctaccaaactgcgctacggcccgatggtgcaaaagcaccgagtagataatctaccagatatatgaaatctggcaaattacgcgcgtgtcacttccgcttcttcttctcacggatgttcacggagatctgaatcggcgtgccttcgaagccgaattcctcgcgcagggagcgttcgatgtagcggcggtagccgtgctcgaggaagccggtggcgaagatcacgaaacgcggcgggcgcgtggacgcctgcgtggcgaagaggattcgcggctgcttgccaccacgcaacgggtgcgggtgggcggcctggatcttgccgaggaaggcgttgagtttgcctgtaggaatacgctgatcccaggattccaaggccttatccatggctcgcgtcagacggttggtgtgccagccggtcttggcggacaggttcacacgctcggcccacatcacacggtcgaattcggtgttccacaggcgttcgagacgctgcttgtcgaactcgtccatcgcatcccacttgttgaatacgagcacgattgcacggcccgcatccacggcggtggacatgaccttcaaatcctgatcggataccggctgcgaggcatcaaacagaatcagcgccaattcacagcgctcgatggcggcctgcgtgcgcagagaggaataatattccgcgcctgtgagcttgtgctggcgtcgcttgatgccggcggtgtcgatgaacagccagtcctcgccatcgatgttgacgatttcgtcgacggggtcgcgcgtggtgccggccaaatcgttgacgacggcacgttcttcgcgcgccagctgattgagcagagacgacttgcccacgttcgggcggcccaccagagccacgcggcgcaggccggaaggcgtgaggtagccggaagtcttctcggcctgcttgagcttgtcgagcgcgacgtccagcaggtcgcccactcccctgccgtgcatggcggaaatcgagtatggttcgccgaggccgagtttccagaattcggcggcaaggtattcgctggcctggtcgtcgatcttgttgacggccagcacgacaggcttgccggcggcacgcagcatcttgacgatgcgctcatcggtggtggtcatgcccacttgcccatcgaccacgaataccacggcatcggccaaggtcacggcaatctgtgcctgtgaggcgatggcggattcaatgccttccacgtcggcttcccagcctcctgtgtccaccagcttgaagtcggtgccggcccattccgcgtcatagctcacacggtctcgtgtaacgcccggcgtgtcttccacaacggcggcacggcggccgaggatacggttgaccagggatgatttgcccacgttcggacggcctacaacagccagcacgcccaccggcttgggaccggccttgcgcgcgccttccgtgaaaccacggccggaaatcagatcctcatcgccttcgtccagctcatagccttcgagattggcggcatactgctcgtattcttggttctcgatggcgtcctcgaccacaccgatgagcagatcgagcgtgtgggcgaagtccagatcggaattgtcgatggtggtaacgccatcggcggcggtcaggaagctggtgaccttggaatcggccttgtcgcgcgcggccacatcctcagcgcccacgcccttgacagcctggccggtgcgacgggcctgacggacctcctcacgggcggtcagcagcacgcgcacctcggcgtccggggacaccacggtggtgatatcgcggccctcggccacgatgcccaaccccccggagaaggagtcggccgacgcctcgcgggcgatgtaggcgcgctgggcggcgatgagcacgttgcgcaccgggatgacgttcgacaccttggagacatggctggagacttcggaggaacgaatggcctcggagatgtcctcgtcgtcggcgaatacgcaggggttgtccgggtccacggagatatcgaaatggtcgccggtgaagaactcgcccaccgcttcggtgatgacacgctcatccacggtttcggcgtccagatcgatgccctgcttcaggcaccaccaagcgcaggcacgatacatcgcgcccgtgtcaaggtaggcgtatccgaaatacttggccagcgccttggacgtggacgacttgcccacgccggcggggccgtcgatggcaacgcgaatcacaggccaacctccttggacagcgaacggacttccgtctgggacagcacgcggtaggaaccgggcttcaaatcaccgagtttgatcgggccgatctgggtgcgcaccaagcgcttgaccgggaagccgattgagccgaagatacggcgcacgatgcggttcttgccggagtgcagcacgaccttgaccatcgtgtggtcgcgtgaggagtcgatgatcgcgcagtggtcgagcttgatccagccgtcgtcgagctgtacgccggtggtcacgagtcgacggcatacggtgccggagatcttgccttccagtgtggcgacgtaggtcttttcgacctcgtacttggggtgcatgacgtgctgcgagagttcgccgtcgttcgtcatgaggataagaccctcggaatcgtagtcgagacggcccatgtggaagatgcgctcgtacttgtcgcccacgatgtcgcgcaacgtgtagcggcccttcgggtcgtccatggcggagagcaccttgcggggcttgttcagtgccagagtgacgtggttcggattgacgcgtacgcgcgaaccgtctacgcgcacctgctgcttatgggggtcgacgcgagttccgagctcggtgaccagttcaccgtcgacctcgacacggccttcggtaatcatgtcctcgcacttgcggcgggaaccgaatcccgcttgggcaagcagcttctggagtcgaatggaattggaatcgtcttgcgctttcgcagcgcgggaatatgcgtttggcatcgttctcccaacgtggccggacagactctgtcatcgcagagactgtcgatttgtatacatacttcagagttggcggactggaatcccagccaattccaacctatatatcataccgcaacgtaggactgctgctagactggcaaccgtttgtacgggttcgcccgtcttccaacagatgaaaaggaatgaacaatcatggaagaaaccaagcaacagccgctggccctgcgcgtgtgcgccgaattggccggcagcttcctgctgtgctttgccatttacgccttctccacatggggctcggccgtgtatggcatcaatatcgtgttcttcgcgttggctaccggcttggcatatgccgcagtcaccgccatcttctcccgcgtgtccggtggccagctgaatccggccatcaccgtagcctccgtgctggtttccaagacgaaaatcctggatggcatcctctatgtgatcgctcaggtcatcggtgccatcgccgccggcttcgccgtggtcaagctgctgcccacatccgagcaggtagctgccaaagtgtggctgactccggccgttaacggtttcgagaacggctccgtgtcttactcgctgctgacccagtatggcattacgttctcgattacgctggcgattgtcgtcgaggtcgttgcctctctgattgtcgttgccaccgccatgtcttctctgggtgatcacggcgagtcctcggaccgtcatgtcattgccatgggtcttgcctatggtctggccgccgccatcagctacccggttaccggtgccggtctcaatcccgcccgttccaccggtatcgcactggccgcgatgaatgagggtcttacgcaaaatccgctgcaacagctgtgggtgttctggattagcccggtcttggccgccgctgtggtggcgttggtcatgatcatcgcgcagatgatgaccactcccaaagtgccggctgccgccgatcttccacagacggatgccgatgcgaacgcggacacgctcgacgatggcgaattcttcgatcaggccgcctcgtctgatggcgattcagcggaaaaagatgttgccgaagagtccaaagaagctgaagtaggtaatcagcaggccgattcccaaggcgatgccgatgaaggagtcgaacgccgctgagcgcactttccatgggcttttgtcctgaagaatcaggcgaacaagcccggtgatgatggccgtcacggcaagtatgaccgtggcggccatcgtatatccgaaagcaaccagcagtgtgatgacggcgacgacgccgagtacgcaccattcaaaccatggcttgccctcatgcgcttcggatacatagggatggttgtgcatgttgcgattccttctgtcgaacggttacgtgaccacaatagcaggcgaatagcaaaggtgggattccgcttggacccgttgacgggtcaggcggaatcccacctttgtgcgttttggctgagctgctcccctcagagagtcccgatcagtggaagaagtggcgggtgccggtgaggtacatggtcacgccggccttcttggccgcttcgatgacctcctcatcgcggatggatccgccgggctgcacgatggccttgacgcccgcgtcgataagcacctgggcaccatcggcgaacgggaagaacgcatcggatgccgcgaccgcaccggtggcgcgatcggcaccatcggccagcgtgttggcgcgctcgacggccaaatggcaggagtccacgcggttgacttggcccatgccgatgccgaccgtggcctggtcgtgggccagcaggatggcgttggacttcacgcagcggattgcacgccatgcgaacacgaggtccttcagcgtgtcggcgtcggcggcatcgccggccacgagcttccaggcgtccggatcgtcgccgacggcgttgatcagatcggtgtcctgcacaagcaggccgccatcgatctggcggatggcctcgtggcccttcggtggctcggccaccttgaggatgcgcaggttcttcttcttggtctgcagcagttcgagcgcggccggctcatagtcgggggcgacgatgacttcggtgaaaatcgggcgcacgctttcggccatctcaagagtgaccttggagttgcaggcgatcacaccgccgtaggcgctcatcgggtcgcaggcgtgagccttcttgtgggcctcggccgcggtcgcgccgatggccagaccgcacggattgttgtgcttgactacggccacggcaatggcgggagccatatcccatacggtgcgccaggcggcgtccgcgtccacgtagttgttgtagctcatcggcttgccgccgagctgctcggcgtgggcgaaaccggtctggttgagcgggtcaatgtagagggcggcctgctggtgggagttctcaccgtagcgcagggtgtgcgcacgatcccaggtgcgggtgaactgggccgggaacttggcggaatcgacttcagtgccctgatcgtccttgtccacctcgacggcgtccagagaggccggcttgggccagtgcttggcggtccactcgttgatggtggcgtcataggcggcggtgtgcgcgaaggccttggctgcaagccacttgcgctcgtccagagagaagccggtgccatcggccacgcgggaggcgaccagtgcataatcggccgggtcggtgacgatggccacggtggcgtggttcttggccgcgccgcgcaccatggaggggccgccgatgtcgatcttctcgatggtatcggcctcgttggcgccggagcgcacggtgtcggcgaacgggtacaggttgacgaccaccaagtcgaacggcttgatgccgaactcctcgagctgcttggcatgctcggggttggtcatatcagccagaatgccggcgtgaatgtacggatgcagcgtcttgacgcggccgtcgaggcattcggggaatccggtgacatcggacacctcggttaccttgacgcccagctcggcgagcttcctggcggtcgaaccggtggaaacgacttcggtgccggccttcacgaacgcttccgcgagtacttcgatgccttccttatgaaagaccgagaccagtgcccgacggatcggtcggttcgtgtttgtcatcctgttcctccttggattcttgtggttgtgacgccagggaccgcgcctgacggacgatgacggtcttcggggtcgcggcggtggtgcgggaatcattgatcctcccaaccaaccagcctatcgaaaaaacgagcgctgtgccaatcagcgcgagcagccatgccgcggtaaatcccaatgcggtcgaatgaccgacgactctggtggaggccatgacgtcgacgccaatgtgagcgagacgatgatcgccaagcgatccattggacagagcgaacagcaatgtggatgccagtgagatcagcatcgcgctcaggcagaatgacccggcggagtagatcagcgaaaccagtactgggccgcgggtggacgcattccgtatattcaacggtctgcaggtgaatccttgcggtaggaatacagccagcaggcccacgagcgcagcgatggcgagaggcgcgttcaaggcaacggtacgccatagttcgctgctgaccggttcgggcagaataccgaatgccggtattgcaggaagctctttggattggccgagccataacgtgaaactggccaaatcaccgatggcgaatccgccgccgaagagccaggaaacagcccagagcatgacgttgggtagccagatcagcatggcgacggtggtgagaattcgtgaaccggtttccatcccggacaattcgaacaacgatacgacagcggcatggttgcgtaccgaccatacgatgacggtaatcaatccaattgccaggtatatgcccagtatcgcgacggccaagacgacgccgattttcaggcagtggcgtatgtccgccggcacctgcttgcgaatccagtccctgaatgctcgcatcttggctgattccggtacggctgcgcataggaaaccgatcgagaatacgatggctgctttcagcaacaccagccactggtcatcgacaagacctaggtgtacggattgccggaatgcctcgttcaacccgagccaaacattcaatccggcaacatacgcatgcggcccgtatgctttgattcgcatggtgagtgcattgatcagccatatcagcagtatggtcaacatcaatggcgtgatggtgagggtgaacgaatcggttctagagcccgatccctcactcagaagcacaacggcctgtgtcagcgaggttgtgccgacggtgagattgtcgccgccctcttccatggagacaaccaataacatcagcgctgtatagcaacctaatgcaacggcatagatggccatggatgcgagggcgactatggctccccgcacccattggcgaatcacggctttcatcacgattggttggaaccgatcagtcgatgttggccttggcgagtatgtcgcgcatgatttcagcggcctggcccggggtcttgcccacggggatacccgccgcttcgagcgcgttcttcttgtcctgggcggtgcccttgcctccggagacgatggcgccggcgtggcccatctgcttgccttcgggggcggtgaaaccggcgatgtaggcgacaaccggcttggtcatgtgctccttggcccatgcggcggcgtcctgttcggcgaagccgccgatctcgccgatcatcatgacagccttggtgtcggggtcggcttcgaatgcctgcagggcttccagcagcgtcgtgccgacgatcggatcgccgccggcgccgagacatgcggtgaagccgatatcggacagttcgcccatgagctggtaggtgagggtgccggatttggagaccagtccgagcgggccgcggccgacaatgccgtcggggatgatgcccaagttgacgccagggttgccgagcgtgatgaaaccggggcagttcggtccgatgatgcgcacgcccttcttgagcgccagttcgacgaagtatgcggaatcggccaccggaatgccttcagtgatgaccacgatgagttcgatgccggcttcgacggcttcgaccacggcggacttggcgaacttcggcggcacgaacaccacgctggccttggcgccggtggcttcacgtgcttcgccgcaggtggcgaacacggggatgtccacgtcggcaccgttcttggcaccggggaaggtgacggatgtgccggccttgcgcgggttcacgccgccgacgatattggtgccggccttgagcatgcgagccgtgtgggtcatgccctgatggccggtcatgccctggacgataacgggagcgccgtcttcgatgaacagcatcagcgaacctccttggactgggtcgcctcaccggcgagctgcgcggccttggctgccgcgccttccatggtttcggacacatggatattcggattgttggcggaagcgaggatatgcagaccctcggcggcggcgttgccatcgaaacgcacgacgatcggcttggaaccgccgagcttggcgaccgcttcgaggatgccgttggcgacttccacgcaggaggtgatgccgccatagacattgatgaacacggattcgacctgagggtcggacagtacgatctccaggctttcggccatgacggctgcggaggcgccgccgccgatgtccaggaagttggcgggcttgatgttggtgccctgttcctcgccagcgccggagacggcatccagggaactcatgacgagtcctgcgccgttgccgatcacaccgacctcgccgtgcaggtgcacgtagtgcaggccgtgttcgcgggcgcgctgttcgaaggggtcgggaacgatgagatccacgaaacgcgcccagccatcatggcggaaggaggcgttgtcatccaaggagatcttggcgtccaaggcgctcagctgcttggtggattcgtcatccgggtcgccgatcttggcgagcggattgatttccacgagcgtggcatcgttgtctttgaagcagcgccacatcttgagcagaatctgcgcggcctgatcgacgtccgcgtggtagaagccgatgctctgtgccatttcggtggcagcggccaggtcgaagtcgccgagcgcatcgatgtgcaggcgcttgacggcctccggatgttccttggcgatttcctcgacttcggtgccgccgttggcggtggccagcacgtcgaagtcgcgcgaggtgcggtccacggagatggacacgtaatattcgtgcaggatgttcttggcttcggccacaagcacgccggaaaccttgtgcccgtggatggtcatcggcaggatggactcggattcaagaatcgcctcgtcgcggttatgggcgatcttgacgccgccggcctgaccacgatgaccgatcttgacctgcgccttgattacgcagggatagccgattttgtccgccgcttcggcgacttcatgggagttctgggcaaagatggcgtccggggtgggaatgtcctgttcctcgagcagctgacgcgcctggtattcgtaaagatccatcgatccttccctgactatgtaattggtccggcatataactgtacacagtacatgccggaccttgaaaactaactgtacgttgggtgagacggaatctcaggccggcatcgcgatcagcgagctgctgggcttgccgccgagcttatccagaccgtcgagaccatcgagccgcatcacaaaactgaagcccaccacagtgccgcccgccttttcgataaggtcggcgccggctttggcggtgccgcctgtggcgatgagatcatcgacaatgagcactcgctcccccgcctgtacggcgtcggtttcgatttcgacgctggccgtgccgtattcgaggtcataggattcaccgatggtttcgggcggcaatttaccggccttgcgcacggcgatgaaacccttgcccagatgggcggccatggccgggccgaacaggaacccgcgcgattcgagaccggcaatggagtcgaattcgctcggggacaccggcagagccgtttcaagcgccttgagcagaatcttcaagcccttggggtcggcgagcactggcatgaaatcacggaagataatgccttccttgggaaaccccggtatggaacgcaccaaggacaccagatattcggcgtcctgttgccctaccttgctcaatgcgtcgatggtgatgtccgactgtgccatagtgctcgccccttttatgcctttgcgatgcgatactcggatggtgctaccgaatcgaacagcttacttcgtcttggtttcgttgtcgtcaccggtctcgtcagcggtgtcttcctcggacacgacggacgcctcgatcggaacctgaccagcctcatcgttagccggagcctcggtgtcttcgtcgggcagcgggttgccgttctcgtcgacctcatcatcggacacataggccgggcgggtgtactcacgggcgatggcgttgaagccgaaacgcagcttggagccttcggagtcgatgacgatctcctcatactgctcgtcgacttcgacgaccttgccgatcacctggccgatggtgatgacctcggtgccgggctgcaggttgcgacggaagtcctgcttctcctgctgttgctgcttggccttcttggactgccaccacatcatgccgccgaacacgacgacgatcacgatgagcataatgtactgttgttccacgaaacaactccttcaaacgagcgacattgacgaaacgccgccaagtgtgcaaacaggagaaagtctagaagagcttgctgacatcatctttgggcgtaattcccaaatgctgccatgccttctcggtagccacgcggcctttgggcgtgcgaatcataaaaccttcgcgcacaagatacggctcgcacacggtttccacggtttccgattcctcgcccaccatggccgccagattgttcaggcccacgggtccaccgttgaagttgcgcacgatggcattgagcacggcgatgtccagccggtcgaggccttcggagtcgatctggtacagggccagcgcctccttgacgtcgtccggccgcaccacgatcaggtcgtggacgatggcccagtcgcgtacacggcgtagcaatcggttggcgatacgcggcgtgccgcgcgaacgcaacgcaagctcatgagcggaacccgcatcaaggtttacgcccagtacgttggccgaacgttcgatgagcttttccaactcctcatgcggatagaagtcgagatgtgcggtgaagccaaagcgtgcgcgcaacgggcttggcagcataccttcgcgcgtggtggcaccgatgacggtgaatcgcggcagggtcagcgggatggagcttgcgcccgggcctttgccgaccatcacatcgacgcggaagtcctccatcgcgatatacagcagctcttcggcggcgcgcggcagacgatggatctcgtcgatgaacagcacttcgccgacgtcgagggagctcagaatcgaagcaagatcaccggcatgttgaaccgcagggccggaagtcacgcgaatcggcacttcaagctcattggcaacgatcatggccaacgtggttttgcccaagccaggagggccggcaagcagaatatggtccggtggcacatcgcgtttgcgggccgcgtccaggaacagttgcagctgggccttgagccgtggctgtccgataaagccttcgagaacatgggggcgcagctcctcgtcgctgaccggctcgttgccgatcggctgggaggagaccatgcgcaacgactcttcgttggcaccggtgtttgaggtaccgtaatccgttgtctcgctcatcagcggcccctatccatcagcgccaaagccagacgtagcacacgcggcacatcgtcggtggcaagcggcgtgggaatatcgttttcggcgcaagcctcggcaacggcctgctgggcgtcctgctgacgccagccaagtgaaatcagtccttcgacaacctgttccgtaccggtatccaccggagacttggatattgccgcctgagcggaagcaccctcgatctgactcaaatcaatagagcccttaagctcgaggatgattttctgtgcgcccttcttgcccagccccggagccttggccagcgcggtggcgtcgttgtcggcgatggcgtgggccagctgactcggcgtcagtgtggagagtaacgattgggccactttaggtccaatgccggagaccttgatgagttgcagaaaggttttcttggcgtcccgatccaggaatccatgcagggtaatggcatcctgagagaggttcatataggtgaagacgcgggtgtcttgcccggcgtgcagacggctcaggtcggtggcggacatgcgcacttcgtagcccactcccccaacatcaatcaatgcggtatcggtttcgaccgattcaacccgcccggtcagcatgccgatcatacaggtactccttcagggctccaggattcaagactcgaacaactgttcgaaagtatactacatgcctcggtcgtggttgatgcggcggcgcgtggatttctgtgcggcctcagcccactggcgttgcgcggcggtcagatgttgttcgcgttcgccgccctgcaatgcgcctgccgggcgcagcgcatggcaaatggccaaagccaaggcatcggcggcatcggcgggagtcggcattttggtgaggttcaaaatacgtgtcaccatacgctccacctgaatcttctgcgcctgcccgttaccggtgatagccagcttggcttcggtaggcgtatgcaacgccacgggaatattgcgttgcgcggcggcgagcatggcgaggccggcggcctgtgcggtaccgagtacggtgttgcggttggattgtgcgaacactcgttcgatggatacggcatcgggtgcgaagcgatccattttctcggacaggccgttgtagatggccagtagacgcagatcctgggtgatatccggtgaggaccgcaccacgtccacgtgaataaacgaaagccggcggtgctcgccggcttcgatcacgccgaccccgcaacgtgtgagcccggggtcgacgccaaggataatcacgaggattactcctcgtcgagctgggccatcacctcgtcggaagcggtccagttggagtagatgttctgcacatcgtcgagatcatcgaggttgtcgatgagcttggacaccttgcgggcatcgtcgaggctcaactcgacctcgttcttcggctgcatgacctggtcggcggaatcgtagtcgaagccggcgtcctgcagagccttgcgcacggtgaacaggtcggacggaccggtcacaacggtgaacacctcaccgtcatcggtaacgtcctcggcaccggcttcggcggcggtttcgaacagcttgtcgaagtccacgccctcggacggcaccacgatctggcccttgcgctcgaagttgaaggacacggagccggaggtggccagggagccgttgcccttggtcagggtggaacggacttcggcggccgcacggttgcggttgtcggtaaggcattcgatgatgaggccaacgccggcaggagcgtagccctcgtagacgatgtcttcgtagttggcggcgccgtcttcagcaccggcaccacgcttgacggcacgagcgatgttgtcggccggcatggaggccttcttggccttgtagatggcatcgtacagggacgggttgccgtccgggtcgccaccgccgaggcgggcggcgatttcgatgttcttgatgagcttggcgaagagcttgccgcgcttggcgtcgatggcggccttcttgtgcttggtggtcgcccacttggaatgacctgacataatgctcctagca

SEQ ID NO: 631 - DNA, 9049 bp, Unknown
  R14_15m  MAG No. k141_8268
acctacggcgctgcgcccgagggcgtgtgggctgctccgggccgtgtgaacctgatcggtgagcacaccgattacaacgccggcctgtgcctgccgatcgctctgccgcaccgcactttcatcgccctgaagccgcgcgaagacaccaaggttcgcgtcgtctccggcgtggctcccgacaaggtcgccgaagctgatctcgatggcctcaaggcccgtggcgtggacggctggtccgcctacccgaccggtgtggcctgggcgctgcgtcaggctggtttcgacaaggtcaagggctttgacgccgccttcgtctcctgcgtgccgctgggctccggcctgagctcctccgccgccatgacctgctccaccgctctggctctggacgacgtgtacggccttggctacggcgattccgacgccggccgtgtgaccctcatcaacgccgccatcaagtccgagaacgagatggccggcgcctccaccggcggtcttgaccagaacgcttccatgcgttgcaccgaaggccacgcgctgctgcttgactgccgcccggagttgaccccgctggagaacgtctcccagcaggagttcgacctcgacaagtacaacctcgagctgcttgtggtcgatacccaggctccgcaccagctcaacgatggccagtacgctcagcgtcgcgccacctgcgaggaagccgccaagattcttggtgtggccaacctgcgtgtgaccgccgacggcatctccaaggccgatgaccagttccaggccctcaaggaaacgcttgacgccctgcctgacgagaccatgaagaagcgcgtgcgccatgtggtcaccgagatcgagcgcgtgcgttccttcgtgcgtgccttcgctcagggcgacatcaaggctgcgggccgtctgttcaacgcttcccacgattcactggccgccgactacgaggtcaccgtccccgagctggacatcgccgtagacgtggcccgcaagaacggcgcctacggtgcgcgtatgaccggcggcggcttcggcggctccatcatcgctctggttgataagggccgttctcaggaagtcgctcagaagatcgccgacgaattcgaaaatcaaggcttccacgcaccgcgcgccctggccgcgtacgcagcgccgagcgcttcgcgcgaggcctaggacaacccggtgggttgtccggcggatgcggtcgaggtcgagccaataggcgaggccgaggtaatgctgggtcggccgtaggtcgtccgtaattgcaggaccgcgtgcgcagcgccgagcgctttgcgcgaggcctgagccattgcaagctccctctgacgagggagcttcgttttatcccgcaccaccaccatgcccgccggcgaatccggcaccacttattcccataacccccataacgctcctgaaaccaggcatttcgaccatccgcataaggtgatgctcggcctgtacatcggcgcattcctcggcatgctgtccgagacatccatgaacatcgccctgcccgatttgatggacgagttctccgtatcctccggtaccgcccagtggatggtcgtcggctgcatactggccattggcgtggtgatgaccgcgatcggcggcgcacagttctttaccatcggcgtcaactcgggcgttgtgctggtgttctccttcatgttcaagggcggcaaacgatacatgaatcggtaatgaacataatggcgggtgtcttccctataattgggtagtcacccgctttttgtatacgaccagggagttccatgaacaaggcaatcatcaccgtcgtcggtcaggatactgtcggcatcatcgcacgcgtctgcacatacctttccgaacatcaggtcaacgtgcttgacatttcccagaccatcatcgacggttacttcaacatgatgatgattgtcgactacgccaacgcggacaaggacttcggcgcgatggtcggcaaccttgaggacctcggcgacgacatcggtgtgcgcatccgctgccagcgtgaggaaatcttcaccaagatgcaccgtatttgaggcggcccgctcagcaggccgccgcacgcgaggaggcggaaagcccggtgggctttccgctgacggagccatccttatccctctgatgagggtgaccgccaaattagtcttcaaatatcctgtaaggaacaaaccatgctgaacatcatggaggtccacgagaccaatcagatgatcgagcaggagaagctcgacgtccgcaccatcaccatgggcatctcgttgctcgactgcgcctcggacgacgtcgacaagacctgcgacaacatctaccgcaagatcactacctatgccaaggacctcgtttccaccggcaaggccatcgaacgcgactacggcatcccgatcgtcaacaagcgcatcaccgtcaccccgatctcgctggtcggtgccagctcctgcaagacgagcgaggacttcgtcaagatcgcccacgcgcttgacaaggcggccaaggaggtcggcgtcgacctgatcggcggctactccgcactcgtctccaagtccatgaccccggccgaggagttgctcatccgctccctgccgcaagccctttccgagaccgacatcgtctgctcgtccgtgaacgtcggttccaccaagaccggcatcgacatgaacgcggtcgaactgctcggccacatcatcaaggacgttgccgagcgcaccgccgacaacgactcctacggctgcgtcaagttcgtggccttctgcaacgtgcctgacgacaacccgttcatggccggcggcttccacggcgtcaccgaaggcgacgcggtgattaatgtcggcgtttccggcccgggtgtggtctcccgtgcattggacgaggccaagggcaaggatttcgagttcctgtgcgaaaccatcaagcgcaccgcgttcaagatcacgcgcgtcggccagctggtggcacaggaggcatcccgtcgccttggcattccattcggcatcatcgacctttccctcgcgccgaccccggccgtaggcgactccgtcggcgaagtgcttgagaagatcggcctcgaacaggttggcgcaccgggcactaccgcggcgctcgccatgctcaacgaccaggtcaagaagggcggcatcatggcctccagctacgtgggtggcctgtctggtgcgttcatcccggtctccgaagacaagaacatgatcgacgcggcttcttccggttgcctgaccatcgagaagctcgaagccatgacctgcgtatgctcggtgggcctcgacatgatcgccattccgggagacaccaccgcagccaccatttccggcatcatcgccgacgaggccgcgatcggcatggtcaaccagaagaccaccgccgtgcgcgtgattccggtggaaggcaaaggcgtaggggagatggccaacttcggcggcctgatgggctatgcgccgatcattccggtgaaccagaccagctgcgaggccttcgtgacccgtggcggccgaatccctgcgccgattcacagcttcaagaattgattcggtagggtatctgctttcagagaggtacatttggcccctcgcggagagctatctgctttcaaagaggtacctatatgcggaaaccccgggtatgagcgttggaatatcaacactcatacccggggtttctcgattgcggtacctctttgaaggcagatagcattctgcaaacgctcgaatgtacctctttgaaggcagataccagctcgaattacctttctggaggtctattcccgtttcgaggggctgattccgacctttctggaggtctacttccgtttcgaggggctggtatatatgaagaccccgagtacaagcattgatatttcaacggccatactcggggtctcgtcctttgacggccccttgaagcggcagtagacctccggcggatgccaaatccgcccctcgaaacgcaggtggccttatattcagcgttcatcactgcgcgaagctcagtgtttccgctctcgcgcctgtcggcgttcgttcggcgtcgttactcgaaggcccaccgggccttctcctcacgctccgcccgcaaaattgagctggcgccaggcttcgtagatggcgatggatgcgcagttggtgaggtttagggaacgcagggacgggcgcatgggcagccgcacttgttcggccacatgagggccctccatgatgtccatcgggtcggggatgtcgccgggctcggggccgaacagcaggatgtcagtcggcttgtattccacctcggtgtagagcttggtggcgtgcgcggtgaacgcgatgatgcgcgaattgggcatcgactccaccaggttgtcgaaattcgggtgcaacaccacgtgggccatgtcatggtagtcgaggcccgcacggcgcagcttggtgtcgcgcaggttgaagcccagcggctccaccagatgcagaatcgtgccggtcactgcgcacaggcggatggccgaaccggtgttgccgggaatacgcggcgagtaatagcacaggtgcggcgtcacggtttcggtggcggcggccttctcggcggaaagcatcgcgtccaccacggagatggggttgccgtgtgcgtcggtcaccagctcgtccggcccgtaattcgacttgcgatagccgtattcgaacattttctcgactttggtttcgggatttgctggattcggtgtgctctgggggttgtgttttgcctcgttcgtcatagctgctaagaataagaacgatgaacgacacagcaatttctttgcgattgggagcatggtgggaggccaatgcgcgtgacttgccatggcgcttcggacgggccacgccgtggggcgtgctggtcagtgaggtgatgagccagcagacgcagatgagccgtgtggtgccgtattggaacgattggatggcacgctggcctgacgcccgtgctcttgccgcagcacctaaagccgatgtgatcaccgcatggggccggcttggctatcctcgccgtgcattgcgcttgcaggaatgtgcccgcgtggtggccgagcagtacgccgacaaactgccgcgtacgtatgacgaactcactgcattgcccggcatcggcgattacaccgcctccgcggtgctgagctttgcgttcggcgaacgaatcgccgtgatcgataccaacatccgccgcgtgctgagccgtgtgttccttggcgtcgaatcgcgcgggggagcggccagcccggccgaacgcgcgctggcgaaccgcatgctgcccaaagacgagattctcgggcgcgatgctgacgtcgccgataatgccggtagcgccgaacataccgtgaacagcactatccgtggcggcaaacgctcccgactgcatcgtggcgaacgcccatcggtcacatggaaccagtcggtaatggaactgggggcggtgatctgcacggccaaatcgccgttatgcgacacctgcccgattgcggatgattgtgcatttctcaaagccggccgccccggactgggggagcggcgcacccgcccgcggcagcgattccaaggcactgatcgtcaggtgcgcggtctggtgctcgccgcgctgcgcgagcttcccgctggagtcacgttgcccagggaagatgccgacaagctttggaaggaccagattcagcttgccgcctgcatcaccagccttgacgatgacggcctgatcgagattctggacggcggcctgcgattacccagctgacattgtgaaaatggcgggctccccaagcgtgtatgggtgtggtgaccgtagactggaagggttatgtcagtgcagaggaacacatcaggcgcgagaacggcacgcggagccggcaccggggacaatgggccatccggcgggcccgcccgaaacgaccgttccggcaagccgcgcaagcgcaggatcagcaaaaagcagcaggccatctatcgtcgtcggcgtatcgtggccggcacggtgttgctgctgataatcgcgctgattgtattctgcgtgtacagccttggccggggtatcggtgccgtgaacacgatgattcaccatgacgaggtgtatgcgatttcccgcgacgccacgccggctccgaagaaagtcagcaacgtcaaggattgctcggccagtgatgtgacattgcagctttccgcggcctcccaatccgtgccggtaggaggatcgcttgatttcaccgcgaccatcgtgcacgaggggtcaggcaactgtttggtggacggggccgattccggccgtgtgctcaccattacttccggtcaggaaacgatttacaagtccgatgtgtgtccggcggattcacgtctgctgctgatgtccaagggtgataaggacgttcagaaggtcacgtggaataccgatgcgaacgccacgctcaccgaatgcacggatgagtcggattgggccaaggtcaatgcgggaacgtacgtggcgcagctgagtttgaaggatcatccgaaggtgaagagcgatccggtgacgtttacggtggggtaggacctgcggttggtgtttggacgctgggtctctccctcagtctcgctccgctcgacagctcccgcgtcagcgggagctaaaaatgtcctcgcatatcagtattcttttgactttgcatgaggtgtgtcatattgcgggcatgccgtcgacaatgaagcgtccgcataggcatatggtggccatgccggcgctcccaggggaattaccacatattagcgagcgataaggaacgtccattggctactgagtctacgacgaacaccaccaccatcatcgcacgcgccgaccagcatgacattgatctgcacaaggcgtcggatcgcgtgaacttcggttccatcaaggaacccatcgatgtgccctacctgctgggcgtacagaccgacagcttcgattggctgatcggttccgaccgctggaagaagcgtgtcgaagaggatgaggctaacggcaccaacaccgtggcccacacctccggtctcgacgaggtcttcaacgagatctccccgatcgagaactttgcacagaccatgtccctgaccttctcggacccgtacttcgaggagccgcgccacaccgtgcaggagtgcaaggagaaggattacacctactccgctccgctgtacgtgaacgccgaattcgagaacggcgacaccggcgagatcaagtcccagaccgtgttcatgggcgacttcccgctgcagaccccgcacggcaccttcatcatcggcggtaccgagcgagtcatcgtctcccagctcgtgcgttccccgggcgtctacttcgaccgccagcaggaccgcacctccgataaggaagtcttcggcgcgaagatcatcccgagccgcggtgcatggctcgagttcgagatcgacaagaaggaccagccgcaggtgcgcgtggaccgcaagcgcaagcagtccgccatcgtgttcctcatggccatcggcatgaccaagtccgagatcgcccaggccttcaaggactacccgctggtgctcgacgccctggagaaggaaaccctcgagacccaggacgaggccctcgtcgacctctaccgcaagattcgtccggccgacaccccgacccccgaggccggcaagaacctgctggactccttctacttcaacaccaagcgctacgatctggcccgcgtcggccgctacaagatcaaccgcaagctgggtgtcgaggccgatttcaacgaccgttccctccaccaggaagacatcatcgccacgatcaagtacctggtggccctgcacgacggtgcggcgaccttcccgggcaagcgcaacggcgaagacgttgacctgcgcgtggacgtcgacgatatcgaccacttcggcaaccgtcgcatccgccaagtcggcgagctgatccagaaccagctgcgcaccggtctgagccgtatggagcgcgtggtgcgcgagcgcatgaccactcaggacgccgaggccatcaccccgcagtccctgatcaacatccgcccggtgaacgccaccatcaaggagttcttcggcacttcccagctctcccagttcatggatcagaacaacccgctgtccggtgtgacgaacaagcgtcgtctttccgcactgggccccggcggtctgtcccgcgaccgcgcctccatggaagtgcgcgacgtgcacccgtcccacttcggccgtatgtgcccgatcgagtctcctgaaggcccgaacatcggtctgatcggctccctggcgaccttcggccgcgtcaacccgttcggcttcatcgagaccccgtaccgcaaggtcgtcaacggccatgtgaccgacgaggtcgagtacatgaccgctgaccgcgatctcgaccacgtcatcgcccaggccaaccaggaacttgacgagaacggcaacttcgtctccaagtccgcccttgcccgagtcggcgaggaagaggcagtcgatgtgccggtgagctccgtggattacatggatgtctccccgcgtcagatggtctccctcggtgcctccctgattccgttcctggagcatgatgagggccaccgtgcactgatgggtaccaacatgcagcgtcaggccgtgccgctgatcgaatccgagcgcccgctggtgggtaccggttccgaatggcgcgccgccaacgattccggcgacgtcatcaaggccgacaaagacggtgtggtcacctacgtgtccgccgacctgatccgtgtgatgaacgacgacggcaccaccagctcctacaagctggctaagttccagcgttccaaccagaccacctgctacaaccagcgcccgatcatccacgatggcgagcgtgtggaggccggctcagtgctggccgatggtcctgccatccagaagggcgacctggccctaggcaagaacctgctcatcgccttcatgccgtggaacggctacaactacgaggatgctgtgatcatctcccagcgcctcgtgcaggacgacaccctctcctccatccacatcgaggagtacgagat

SEQ ID NO: 632 - DNA, 13771 bp, Unknown
  R14_15m  MAG No. k141_8441
caactcctgcacacgggtgcgatgcatggccagcccacgccccgaccgctcctgcgcggacaggccactctgcgcgtcggcatcgtcacggatatcgttggtctcgcgaatctcaatccattcgggagacagggtgacgaacagcaggtaggaatcatctcccgccggtgcatggcggcggatattcgtgccgatctccgtcatcagcgacagcgcctcggccgccgcctcggggtccacgaccatggcgatgccgttgaccgcggccgtcccccgatagccctgcgcctccagaaactcctcggtatcggtgatctgcgccttcacacgcgtgacgaaggattgcggcatgcccgctgtggattgcgtacggtcatcgccaccggcgttctcaggcacggcattgtcaaccacctcattcgcaatcgctggacagctcccggcgcctaccgggtcacgagccagggcggattctttcgtcggcgaatcaacctgccctgattccgcagtcgccacctcagatgtcccggtgccaccgaccggcaaggactcgtcccggaagccggcgtccattccgctctgctcggtcagaaaatcgatgatgccatgcacttccgcaaaggcacgttggctgcgatccagcacgcgctgccagtcgccaccatcgatgccggctggcgcggccagattattccgggcgatggtcgagatatacgtcagatcgttggacagcgtgtcgtgcagttcaatcgcgagctggttgccgtggcgcagatcggccagcgccgattccatctgctcgttttcgttctcctgattcaccacgcgcttgcgccagcgcaacgcaatgcccagtaataccagcagcacgcttgccgtcagcgccgccgacgccgtgaccagccacgacccggtcaccgcatagacgatggccgccaccgcaagcacaccgatcgggccgaacatcgccagcggatgattgagttctatatcgatatcaatctgatgatgcttcttgccgtcggcgtgaccatacgaatacgacgaatgccgcgaaatgataatcggacgtttcaccggcccgctccccttatgcgccttgcgcttcttctaccatgtccccacacacccatcggcgccttcatcagtgcaggttcatgcgaatccatgcgccgataagttccttgagattgccagcgccgagcttgtcggccgcacgcatcagatgcgtgcgcacggtggtttcggtgatggacagttcggcggcgatctgcggcatagtccggccgcgggaccacagttccgcaacctccatctcacgcgcgctcagccggttgtccttctcggccttgatgcgcgcggacgcaacggccgcggtctcgaaccgcacgtcgccaccatcgccccatattttgccggtctgcacctggcggatagccacggcctgcaatcgcacatcatcgttcttgctcatgatgccctgtgcgccggcccgggccatctcctgggcatgtcggcccacaatcgaggcggtaatggccagtatcgccgtggtcgcgttttccctgcggattgcacgcaccacatccggaccattgatgtcgttcatcgcgatatcggccaatagcacagcaggcgggtgtttggtggccgtgcacagctgaatggctttgctgccttcgctcaccggcggaaacaattcgaagtctggcagggccttcgacaaaatcgactgtaatgccatcagggccatgcggtcgttgtccatgatgagcatggtgggccttggcccatcctgcccgctgatatccggcatatgcctacgtgcgcttagctcttcttcggcttcagcgctgagggcatgggcatcggaatcggcttgcgtggggccggcttcggcttgggcgcggccggcgcggaggccgggaactcgccgctggtcgcctttgcggcggcttcggctgcccacttggcgtactcgtcgaggtcgtcctcctgcgcggcgggcgagaccttggcggcgtcggcgtcagcagcagaatccacatccttgtccgcatactgatcatcaatatcggcgaacgggtcaggagagcccgttcccggctcctgctcgctcagctcttttgccagctcatcgtaatcggtatcggtggtcaggtacttgagctttcgggcaattttctgctgttttgctttttgacgtccgcggcccatctgaccccctgcgattactgtgctgttcgattcatcaacaatagagagtaccactaatagtggcttgttcgttgtcggctcacacttttaccataaaaagcgtttatctgagccctatttaaaggattttcgcatgaccgacgagcagcaactgacagcggcaggcaatgagataagcgcgagcttcctcgcggccaaaaagcgttcggacgaaacgctcgccaagctggaggccaagccgtcgtccttcaccatgttgaccggcgaccgcccgaccggccggctgcacctcggccactacttcggctcgatccgtgagcgtgtcgccatgcaggagcgcggcgtcaacacgaacatcatcatcgccgactaccaggtgatcaccgaccgcgacaccaccgagcacatccaagacaacgtgctgaacctggtgctcgactacatggccgccggcatcgatccgaacaagaccatgatgttcacccactccgccgtgccggccgagaaccagctgctgctgccgttcctgtccctggtcaccgaggctgagctgcaccgcaacccgaccgtgaagtccgagatggaggcgtccggccacgcgctgaccggtctgctgctcacctacccggtgcatcaggcgtgcgacatcctcttctgcaaggccaacgtcgtgccgatcggcaaggacaacctgccgcacgtggaaatcacgcgcaccatcgcccgccgtttcaacgagcgttacgccaagaagaacccagtgttcccggagccggccgccattctgtctgaggcaccggagattccgggtctcgacggccgcaagatgagcaagtcgtacggcaactccatcatgctgggcgccaccgccgaggaaaccgccaagctcatcaagaagagcccgaccgattccgagcgccgcatcaccttcgacccggttgcccgcccgcaggtctccgccctgctgaccaccgccggcctggtgaccggccgcgacccgaaggacatcgccgaggagatcggtgattccggcgccggcgcactcaaggcatacgtcatcgaatcagtcaacgagttcctggccccgcaccgcgagcgccgcgccgagctggccaaggacatggactccattcgtgacatcctgcacgacggcaacaagcgcgccaacgccatcgccgaggagaccctcgaccaggtgcgcgaggccatgggcatgaagtactgattttcccgccgctcgtagcaagacgccgtgtcagccccaactgggcaactgacacggcgttttttgtattgcggcgtctgctgtgtcctatcttcacttcgaggggcggatttcttgttttccggaggtctatctccgcttcgaggggctgttgctcaagtaggcgaggcacaaaaaacggcggaatgacgttggcgtgaatgggattttatctgagattgagcgcatgaccagccccttgaaacggagatagacctccggaaaggctcaaatccgccccttgaaacggagaatcaagcgttagtaactctcaattcaaaaaacacaacatgttttccgtgcaacgcggctatcaagacggacctctggtcacttcatgccgatggcttgcatcaatacgtacgctccccgcacagcaatgtcattacgacgtgttgcggcatagcgcgcatggcttccggagtatcggcggcgtatgggtcggcgtccaacaacaccatatcggccgggtcgccggatgcaaggcggtcacggccagtggcggtcgaggctgccagcgaggtgcgcacatcgaggcactgctcgggctggaacggctcgcggtcagagctttcggagccgaacacggcggcggaaatggccagccacgggtccagcggggccacgggcgcatccgagcccatgcgcagcgtggtaccggcgtcgtggagggccctgaacggataagggataccggccgggttggcccagaaacgggtgatgacgtcgcggtcatccatggcgtgctgcggctggatactggccgtgagccccagctcggcgaaacgcgggatatcgaagggtttgagcatctgcgcgtgctcgatcgatccatgtgcgtgcgtggcggcgactgcgttgagcgcaatggtgttcgcttcgtcgccaatagcgtggcaggcgatgtcgaagccatgctcggtggctaggcgcatatagtcttcgatttgctgcggcgtgtagctcagcgtgccatacgtcggcggctcgatgcccgaatacggcgtggagcagtaggcggagcgggtgttgagcgatccgtccgagatgagcttcatggcgcccacatggccgagcccggcgctgcccggcagtgggttgccggtatgccaacccgcgtcaatggcggcttgcaaccgctcggggtatacaccggcgtccacgcgcaaaccgttaatgccggccgcgaaacgattggtccatgtatcgatgttttcggccatttcataatcgcggatgcccaccacgcccttgcttgcggcgtcctgttcggcctcgcgcagcagacggtcagtctcttcagcagcgcccggcgccttgtcgaaggcggtgtaggcgttgaaccattcgagttcgccgaccagaccggatccgtccacatgtacgccaagcctgcgggccgcggcggagttcacccatccacagtgcatgtccgcgctggagagggccaccggctgttcgccggtcacggcgtcaattgcggccagtgtgggctgctcgtcgtcggcccacagcgagtgacggaatcgcatgcccaccacgaaggcatctgggtcaagcgtgccggcggcgcggcgctcatccagatgacggcgcaacatgtccatcgcttcggcggcggaacgggcattgatgaggtccagtcggcccagcgtcttagcccattgcgtgaagtgcgtatggcagtcccacaggccgggaataacccacaggccgtcggcgtcgatggtggtttcgtcggtgggtgcggcggccgacgttgggattgagacgctgccagaagcaatggcattcgtcgcgtatgccaacgatgtcgtatgcgccttagtctgcatcgtgccgtccgaagccgagaccgttccagcagggccgacagacgcaacaaccccatcgcgaagcaccacatccacgcgatcctgagaccccggaacaccggcattgacaatacgcaccaagctactcatacccgccatcatgccacctttgcatgaacgccatggagattcgttcaagctgaatcgcaccgtcggcggcgattcccgctggctgcctgcaaacccctacgttccatgtaattgcgggatgcctgcaactgcgatgaacgcccatagtttatccaccgacttatccacatttatccaccgaaaaattggggcggtagacaaggccggtagccggactctacactgcgaggacaaagcgaacatcacgaaggggtgatcatcatgggtagctcaacggcattgaccgagctgacaatgcagaagtatcaacgaatgcagacgtgcgcagatgttcaacgacgaagcgcatggcgcccaccctatgccctgacaacagcattggagcttttgtcaattgaagtaccccgcatatcaagcaaacacagaggccttgcaactacaaccattgttgcggttccacatgccaatgacaaacggcacattgtgggggtcaaagtggttgtatggcctttcccactagacacggtcataatcgagggacaattcacatgcacttcaccagcttgcacatgggccatgttctccgcgtatctcgaacttgaagaactcatcgttctcgctgattccatgatgcgacgagatcgaaggctctgcagaacaaccatcgacgccctttctctgtatctcgatgaggccgaggcccaggtgcgagccgacaaagagaatggcaccaattcgtatttgttccgcgggtataacaaatgccgtcgcgccctgcttttggcgcgcgcgggcacagattcctccatggaaacacgaactcgtttggttctcttgaaatacggtctggattgcccgcaggtgaattatccaatattcgtaggaaacaacaccagacccatatatctcgatcttgcataccctgaattcaaggtatgcatcgaatacgaaggctctcatcatgccgggcaatggctgaatgacgcgagacgccgccagatgatcgaagacgctggctggaagtacattcaagtcaccaaattagatattggcgacgaagcgggagaagaggcccttgcccgaagagttgccgagaggatacaggaggttacgggcaaaacggtccagctcacgatgcggcaaaccacccagcaaattagcgatgtccgaaagctacgccgtattccgctgtacaaacggctgaaattcgagcctctgctgccaattattccgacgacgcaggaataataagcccggtagagtcagtccgcaccgtccgcaccgcgctacggtattcaaaacccatttcaaggggctgatttggcctccgccggaggtctacttccgtttcaaggggctgatcatccgctagatcacgtgtatcaatgcccttacgccaacgccattccgccgttttggagccgcgtctactcaggcatcagccccttgaaacggcagtagacctctccagaacgtcaaatcagcccctcgaagtccgttttggcctcaatggttcctgccgaaccacaaaaaagccactcctctgccatacgaggcgaccgcacagcaggcacgtgtcatttgccgctgcgaacctcggactccatggcttccatgggctcgtcgacgagcacggtgccggacggcagggtgccgggcagcggatcgtccatgtagtggtcgaattcgtagagcatacgctcgttcggcttggcggtcagcaacgaaaccaccacgatgaacagcagcgaaatgatgaacgccggcagcagctcatagatggcgaatacgccacccaagggcttgacgaggttgtgccagatcagcacggccgccgtgccggacagcatgccggccacggcgccggccttgttggcgcgacgccagtatagcgagcacagcatcaacgggccgaatgaggcgccaagcccggcccacgcgtaggacaccacctggaagatcgacgagttctggtcgtatgccaccagaatgccgaacaggaacatgaccaccagcgtgaccctggccacgatcatgacctgcttgtcggtggccttgcggtgcagcagcccgcggaagatgttctcgcccatggccgaagcgccgatgatcagatacgaggagctggagctcatcgaggccgcgaaaatgccggagaccaccacgccgcacatgaagctcggcagcagggtctgcgccagcacgatgaagatggtctccgcatcggtggaggtcagcagttcggtgggcatcatcgcacgtcccaccaagccgatgcacactgcgcaacccagcgaaatcacgcaccaggaggtggcgatgattcgggacttgcgcacttcttccacgctgcggatggacaggaagcgcaccagcacctgcggcataccgaagtaacccaggccccacgccagcatggaaatgatggtgatgatgccgtagtcggagggcgcgccgaacacggccttgcccgcctcgacgagctgctggccggtggccgggtccagcttgggcgcggccacctgcgtgccggacaggtagccggggatggcacgcaggaattccacggtgttgtcgatgccgcccgcgctggccacggtgccgatgaacaccaccgcgagcgcgaagaacatgagcatgccctgaatgaagtcggtcatcaccacggacaagtagccgcccaccacggtgtagacgaacacgaccaccgcgccgatgatcatcatgacgtggtagtcgaaaccgaacaacgtggcgaacagcttgcccacggtcacgaagcagctgcccacgtacacgctgaagaacaccaggatgatcacggccgcgatggtggagaccacgcccttcttgtcatggaaacgcttggcgaagaagtcaggaatggtgatggcatcgccggccactaccgagtagcggcgcagtcgccgggccacaagcttccagttgagataggtgccgagcgccaggccgatggcggtccacatcgggtcggccgcgccggtgaagtaggccaggcccggcaggcccatcagcagccagccgctcatgtcggaggcttcggcgctcagggccgtgagccacggccccacgccgcgcccgcccgcgaagtattccttggaggaggagttggagcgtttggagtagatgaatccgatggacagcatggccgcaaaatagatgaccatggccagcagaatccagaaatcgttggccaactgcgacacctccccaatcatgacgccaagcggctaccgccatggcagaactatgtgctgatatgcgtgctgatatgcgattgacgccggagcggcgtcatacagaccgtcacagccgtgaatacggccgcaacgcacttcgcctgatggtagtggatacaagggctcaagcaccttccaccgtttccacactgagacgctgttttatccgagctccccacctgaggggagccaagatgacggtcagatgtcgtagcgccaggacttgtcggtcaccacgcgggccatcgccaagccgatcggcagacagataatcaccatgaacgcacggaacgcccagtccagcgcattcatggtctggaagctgccgaggtaccacatggcacggtacatatacagaccgggcaccatgatcacgatcgacggcacggtcaggcagatgcgcgggtagccgaggtgcggcggtagccagccacgtcgcacggatgaacgccacgccgatgccagaatgcccgccagaaacgcgccgatgaaggtagccatctcgggtgccacgttgaagtcctgcaattccaagcgcagcgtgtccgtgatcgcaccgatcagggcggcggccaggcacatgcgctgcggcgaattgaacagcacggagaagccccacacgccgacgaacgccgccacgaaccgcagcaatccgttgacccacgggtcaagccccagcggttcaaagccttccgggtgcaggtgcaccatcacggccacggcccagcctgccagcgtggccatcaggatgatgcacagcacgtacgccacgcgctggatgcccgaggggaagtcgattttcgccatgtcgagtccgccggtgatgagcgggaaaccggggatcacgaacagcatggcgccaatgtaggccgtatcgtgcgagagcgcgactgggtcgaaaatgccgatgagtcgcagggtgccggtgcaggcgagcgccgccgcggccacgcacacaaaggtgacgaagaactggttcagatggtatgcaaacagccggcgacgcatccactggccaaggcccgcgcccacgaacgcaccgatcatgtcgtatgggccgccgccgagcaggaacacgaaggccgcgcaggccagggcggaggccagaccggagaaccacggcttgtacagcggcttgcggcgctcaatcagatcgagtcgctcgtgcgcctgccgcacggtgataccgcccttggccttctcttcgtcggagcgctcgttgaagtgttcggcgtattccttgggcacgcgattcttgcgcttcgtactgcttgcagcagggctttcggcggttgcgccgttcgccgccgcgccctcagcgcccgcctcggcattcgccgcgttcgccgattcaaccgactcattggagtcaccggtaaacacttcggcatcgtcgtaggccttctcttcggccgctttgtcttcgaccgaagtgacttccgcgctgtccgccaaaagtcggtgggcttcttcattgtcatcatccaaggacttggccacggaggtcacgagtaccttggttttcaacgcaagatccagcgcctcgtccacgctgccgttggccgcctcagcctcggccttggcacgttcgcgcaggcgcttggccagatcggccgaatactgcgaagcgtcacgttcgtccaaatgcttgaccacgccatcggacagttgcgaatcgacgtgatacatcgaccctttgccgagattcacggagaaccagtcggcgaaatgttccagcagccagatacgttcggtgttcacgccggtggtcggcaaatccacgacttcggtgatgcggttacgaccatccgtgcaggtggcctcgatatccgtcaggttcacgtcggcgcgtacgtgcacgcccagcgggtaggcgatgcggtgcatcatttcacgcacgcggaaggagccggtgccggctcccaggtccagcatgccgacccgtacaatcacgctggctttggcggcgataccggcgtccaccaccggtttttcccaatcgcgcgcaatatcttccatgtccagcggaatggagtgggtgtggaatttacgtacagccgttgcgcctttcgcttcgggcgcactttttttcttctgttcgctcacatccctcattactactccctgcctcccccgccagcaatcgtaaggtgctcaaatcttccgcgaatcggacagtgtctcatatgctgtccgatattcggtctctataggtggacaacttggcgcactatatggactccgtaacgcaaatagcgatttcgcggggatacactattgcccacacaacaaccacgttgaatatgggctgtgggctcgcaacgactggcctcaacaactgcggaggagccgcagacgaccggtagaccgagcaacctgttattcggcaaaggaggttatatggcaacacctgaagaacagatcactcccgctgacgccgccatcgtcactaccgggaccggccgaaagggcccggaggagcatgatcttcccgaaagcctgaagtacgacatggatctgtgtcttgagatcctgcgtaacgtactgggcgaatacaaccccgaactgctgtctacgttcgacaccgtgcgtcattacgcggtggaggccagcgccgagcatttcgccgagctgaaggatccgaaccccgaccaggatggcctgaaggaggccgtgaacgtcatcgacaacatgacgttgcacgacgcccagctgctggcccgcgcattcgccacgtatttccatctggcaaacctgtccgaggagaactaccgtgtttccgtgctccacgagcgcgagaacaacgtgtccgttgaccaggcggtcgacccgatcaacgagctcaccgtcgcctaccaccagctcatcaatgagactggcccggccaaggccaaggaactgctcaaccagctcgaattccaccccgtcttcacggcgcaccccactgaggcccgtcgtaaggccgtggaaggcaagatccgccgcgtttccgaattgcttgaggagtacaagcgcctcggcggctcggataagaaggaatgcctgcgccgtctctacaacgagatcgacgccctgttccgcacctctccgatcgcgctgaagaagccgaccccggttgaggaagcggacacgattctcgacatcttcgacaacacgctgttcaacaccatccccaaggtctaccgtcgcttcgacgactgggtcctgggcgataaggccggtctcgtcgagcccgcttgccccgcgttcttccacccgggcagctggatcggctccgaccgcgacggtaacccgaacgtcaccgccaaggtgagccgcgccgtggcccgcaagttctccgatcacgtgatcgccgcccttgaggaagccacccgcaccgtgggccgcaacctcacgatggaagccgagaccacgccgccgagcgccgagctcaagagcctctggagccaccagaaggaaatgagcgagcgtctgaccgacaaggccgccctgatctccaccaaggagatgcaccgcgcggtcatgctggtgatggccgatcgtctgcactacaccatcgagcgcgatgccgacctcatgtaccactcctgcgacgacttcctcgccgacctcaaggtggtccagcgttcgctggccgccgccggcgccaagcgttccgcttacggcccgctgcaggatctgatctggcagaccgagaccttcggcttccacatggtggagatggagttccgtcagcactccgtggtgcacgcccgcgcccttgcggatatccgcgagcacggcctgcacggcgagcgcggcgaactgcagccgatgacgcacgaggtgctcgacaccttccgcgccctcggtgccatccagaagcgcaacggcctcaaggccgcccgccgctacatcatctccttcaccaagagcgcccagaacatcaaggatgtctacgagctcaaccgcttggccttctcccacccggaggacgtgcccaccatcgacgtgatcccgctgttcgagcagcttgaggatctgcagaactcggtggacgtgctcgaggaaatgatcaagatccccgaggttcaggctcgtctgaaggccaccggcaacaagctcgaggtcatgctcggctactccgactcctcgaaggacgccggcccgacctccgccacgctggccctgcactccgctcaggagcgcattgccaagtgggctgagtcgcacgacatcgacctgaccctgttccatggccgcggcggtgccgtcggtcgtggcggcggccccgccaaccgcgcggtgctcgcccagccggtcggttccgtcaagtgccgcttcaagctcaccgagcagggcgaggtcatcttcgcccgttacggcaacccggtgctggccatccgccacgtcgaatccgtggctgcggcgaccttgctgcagtccgcgccgagcgtggagaagcgcaacaccgagatgaccgagaagtatgccgacatggccgctcagctcgacgaggccgcgcacaaccgcttcctcgacctgttgaacaccgacggctttgccccgtggttctcgatcgttacgccgctgaccgaaatcggcctgctgccgatcggctcccgcccggccaagcgtggcctcggcgccaagtcgctcgacgacctgcgtacgattccgtggatcttctcctgggcccaggcccgcatcaacctggccgcttggtacggtctcggcactgcatgcgagaagttcggcgatctggagaccatgcgtcaggcttacgaggaatggccgctgttctccacgttcatcgacaacatcgagatgtccatcgccaagacggacgagcgcatcgccaggatgtaccttgccctcggcgaccgcgaggacctcaatgagaaggtgctcaacgagatggagctcacccgcaagtgggttctggccatcgtgggcgacaagtggccgctgcagcaccgccacgtgctcggccaggccatccgcatccgctccccatacgtggacgcactgtccgtcactcaggtgctggcgctcaagtcgctgcgcaagaaggtggacaaggaaga

SEQ ID NO: 633 - DNA, 7123 bp, Unknown
  R14_15m  MAG No. k141_8470
cacggcttcgaacagctgtgcgccacggtagctcatgatggtggaaacgcccatcttggacatgatcttgagcacgccggtggacagggccttggtgaggttcttgacggcggtgtccgcgtcgaccttgaggtagccgttacgggccaaatcctcaacggattcgaaggccaggtacgggttcacgcaggcggcaccataagcgatcagcagtgcgacgtggtgaatctcgcgcacgtcgccggcctcgacggccatggagatctgcgtacgggtgtggcggcgcagcaggtggtgctgcacggcggaggtcagcagcagggacgggatcgggccccacgtgtggttggattcacggtcggagagcacgatgaagttcttgccgtcggcgatggcctcgtcgatttcggcaaagatctcgtcaagtcgctcttcgagggccttgccgccgccggcgacctggtagaggcccttgaccacgtacgggcgatagtagccgccgaggatgcgggccttgtcaaggcgcttgagctgggccatctcatcagagttgaccacgggcagcgggatgaggatcttcttggcgtgcagctcggaatcggccagtaggttaggctcggggccgatggcggattcgagcgaggtgacgatctcctcacgctcccagtccagcggcgggttggtgacctgcgcgaacttctgggtgaagtagtcgaacagcatgcggctgcggctggagagtgcgggcataggcgcatcgttacccatggatcccagcggttccttaccggtgttggccatcggagtgagcaacagcttcagatcctcttcggtgtagccgaaggcacgctgacggcgctggacggactgtccggagtggctcacgtgctcgcggcggggcagatcgctcatctcgaccgagttgccttccacccacttgcggtacgggtgctgggaggcgagggtcttcttgatctcttcatcggggatgatgcggccttcggcggtgtcgaccaggaacatcttgccgggctcaagacggcccttggacacgatgtgctcctgcgcgatctccggcagaacgccggcctcggaggccagcacgatgtagccgtcgtcggtgagctgccagcggccggggcggaagccgttgcggtcgagcagggcgccgacctgggtgccgtcggtgaagacgatgtcggccgggccatcccacggctcgataagcgtgttgttgtactcgtagaaggcgcgcacgtccggatcgagatccgtgttcttctcccaagccggcggcagcatcatgcagatggcgtgcggcagggaacggccggcgagatgcagtagttcgaggcactcgtcgaaggtgccagaatcggagtagcccggagtggtgatgggcagcagcggctcgaactcgccgagcagttcgctgctcagacgaccttcacgggcggagagccaattgcggttgccctgaatggtgttgatctcgccattgtgggccagcagacggaacggctgggccagcggccagctcgggaaggtgttggtggagaagcgggagtggacgatggcgatggtggccttcatgcgctcgtcgttcagatcctcgaagaagtgggtgagctgcatggtggtgagcatgcccttgtacgtgatggtacgggcggacagggaagcgaagtagacgcctacctcatgctcgacgcgcttgcggatgcggaaggtcttgcgatccaagtccacgccggccagagcaccgtccggagaggcgaccacgagagtcttgaatcccggcatggcggcaagggcctgcaggccgaggccgtccgggttggtgggcaccacgcgccatgcgagaacttcgagtccctcctcgcgcacgattttggcgatggcctgttcctgctgaccggaggtttcgatgtcgcggtcgaggaaggcgatgcctgcggcgtagtggccggcttcgggcagttcggcgggcacggtggcacgcatgaactcatccggcatgctcatcagaatgccggcgccgtcacctgtgttctcctcggcacccacggcaccgcggtggtcgagattgaccagtacctcaatggcgtcagtgacgattttgcgttcaggacgcttgttcaaagtggtgaccatacccacaccacaggcgtcatgctcgttggcgggatcatacataccgtccggagcgtggaccgtgagatcgagcggggctttgaatgtcaccggaatcacctcaattgcttgtgggcacgtaagggaatcgtgcctcttcgttcattgctgttgacacagtaccgttgctccatgtcattttcgtttcgcgtgtccatataccgagtcgccataaaagtcaatagtgattctcaagcaattgtttttatggccagttatgggggtatttcgaactttttcgcccgaaatgtctatttggccacacgaaaatacgatacggaaacgtccgtatcgtgaaatgctgcgttgggtgatgttacggattggcggctgtggaccaccctcagtcatgcttcgcatgacagctcccgccagcgggagcgataaatgcgaactgccagtcaacggtaaggttgactggcagttcgcatttatacaaggcgcaaagtctataagcgtttgttgccccgtctggagggtttctcgcccttgatgctggtgccggactggccggtgaccggagcgatgccggcgtgggcggccaggtgggccgcgcttttgaagttggcgatgtcgccgccgatgccgagcaggatgctgcttgcggtcctgacgcctgtcccgggcgattgtggcatcctgtgcatgtctgacaccatagcgatcggcgcgctccgcgaactcaccgaacatggcatccgcgtgcccgacgacgtacggctcatgggattcgacggcatccccttctccgactgcgccaacccacccattagcactgtgacgatagacgtccccgcaatggctcgtacggttatcgatcgcatggtgacgctgatcgagtcgaacctacggcatgaacggcccgatgacatcacccatgaccatatccagttccaggtgatgccacgcacgtcgactctggccgcctgataccggccggcacccttatgagtgccggccttcatccctgaaaatatgggtctatgccacgtacagcgcggcgggatacgtgagatatgaaatttcatcgagctgatcgaccgtcacatatccggctggcgcgttgagcacgtccggaatgcggttgacgattgtggcgcacgtatgttcgacggtcgccggcttgaccacgtggaactccacgtccggttcaccctcgatcttccaatcgcacatatcgccatcatccggcccgtacaccttgccgatacaggcagtttccaacgtgatgccctgattcgtttcggtggttaccacggcggacatgccgatgcatttgccgaccgaaatcgtctcgtccatcgtctcggaatacacgtcgacatcgctgaaatacggcacactggcctgggtctgcgatgcgatggtaagcccaagcttctgggccagcgcttcattggaattccatacatacgagggcaccacggtttcgggatgcgcaagctcggcctcgaactcctcggcggtcagaccgcagccgtgcgctttggccaaagccaggccgtaatcctcgacgttgtagctcaccgcaccggtgatcttcttgatgctgtggcatccggcggcgacggtggagaccatgttcacccagtagatgtcctgcatgccggagccgaccatggtggcaccggcttccttggcgatgatgtcgagacggttcgtggtggccggatcggtggtccacgggtagatgcattcctcgcaggtggtgatcacgctgatgccgcgggccaagcactgctcgcacatggtggcgatttcgttctcgaagctgaatagcgtgactaccgcgatatccgcgtcgcactcgttgagtacagcctcggcatcggcgcgaatcggcacattgatggggccgatgcctgcaaacacaccggcatccatgcccacgacttccggattcacgtcgatggcaccgacgatttgaatgcctttctcgtgcatatagcgaatcgtgtacttcgccattttgccgcagccgtattgaatggctttgattggttgcataccgcatactcctttgcaacagtgcatattggccattggagaagtctcaccgtcgagaccaagccaatagccttaactctaccaacatcaggctgggcattcactgatatcggcggcactggagcgtcgggaagagtcggcgtagcggtaccgctaccgagcagaaggactgggccagtacaggtcctcccgccgaatcacggcatctcggcatccgtcagttcctgttccgccgtatgggagaggccgatgactatcgtaaaaaacggcatatcagcaacttataactacccttcctgtatccttaatgtacaagccccgtgttgaccgccgtttttcatgtcaccggggcattgcaatacgaggtaagggggcctcgtgattcatgcgttacaatcatccattattaccaatccgcagtggattgaggagtggctttccgccccgcgattccgtacataccttgactcttgccaccaagatgcgcttacagccttactttatacgagtggaatgttgaccttggtcaaatcctcgtgaaggatgtcgcctttttcgagatcgctctccgaaatgcttatgataggaacctcgctaaccattggcagaagggtcagcattggctgtttgaccaacaatcaccggtgaatcggcccattccacgccgaacgagctccggcaaacctttcgacgcgaatactctcagcggccgcgccaacgcctgtcgaacgattcctagccaaaactccatgcccagccattgcgcggtagcatggtgccactcgacttaccatctacttccggttacgcagggcgtggagcatggcgacgaacacgataacgataacgatgaccacagccatgatcgcgtagtcaatctatgcgccggtcacggtggcggcggcatagccggcggaacccaccttgcccgagccggactggaacacggagatcacggtagcccaccacagtggtgccggccgcacccgtgaactgctgcagcgtggagaacatcgcgttgccgccaggaagatgctgcgctggcggaagcgacggcgcagccatgcgctgagcggcacagtaatcgacacgaccagagatagccggtggtgagccattggatggtggcctcgctgatgtggagcacgcccatcagctgcgggaacagcacattcatcacggtttcggtcaggatgccgaagaatgcgagtgagccgacggccacgatcgcgcagatgagtttgccggggatgcgttcgtcgcgggccgattgcatcgcggcgtctgccgctgagatagtgcccgaggtctggggctgagtcttcagagttaccgattgttcaaaagtcacactgtaacaataacactacggaaagcgattaccataaagcgtgctcacagtcgcccatcatgcggacttttcgaaaactgttgataaatagccattttccacaaggaatccttgcataacactatgattcagaacatctattagtatgacgtaaatcacattacgaactatttaaggtaagcgcttacagttcggcatgggagactcctcgtcacgatatgaatgcgctacagtcactatcgattgatacgcacgccccatcgactacgcgatttcgccgtcgccgtacgcgcgttcggaggcacgcagacacggcttgccttgcaccacttcgacctgcgagggcggcgcgtcatcgccggcacgcttggcctgaatctgttcgaacagcatccggaaggaccgctcccccatgtccaggaagttctgggtgtaactggtcagcgccggattccacatggcaccgaagttgcggtcgtcaaagcctacgacgctcacgtcagcaggcacgcggcgaccaacctcccttagacctcggatcacagcgatggcggtctcgtcgttgtcggcgaaaatcgcagtcacatcaccacgacggcccaaggtgcgcccagccttgaccgactcctccaaatcatcgtcgggcacgatgattgggtcaggtaccgtgacgccgcgctccttgagcgcgtcacgccacccattggtgcgggtgttatcggtcggtccttccgggcgccccacatggaacacggtgcgatggccgagatccagcagatgcatggtcatccaacggccaccatccctttcggcgttgatgatctggtattcgccgtcgccgaagctgccacccaccacgaccatcggcatatctttgggaatgtattccagtgcggcgatgccggcccggtcgtactcgtagacgatcacgcccgccggcctgatcgacaaacccatgcgcacacgagccttgacggagtccatgtcggactcatccaaagaaacgatattgagcaggaaccgacgtttacgggcggcggcctcgaccccatggttcgtttcggacgtggagaaggcggaaggattggccgcgaacaccaccacggagtccatctcccggttcgacagggcgcgcgccacaatgctcggctcatagcccagctccttgatggccttggcgatgcgttcacgcttgtcttcggtgacattgacggtgccgttgagataccgggagacggtcggtgccgagactccggccagtctggccacgtccttgatcaccggtcgggtgcggcccgcacttctcgccatccttgtctcccctgttgttgtcagttgttgttgttgcgtacgtcaaggagaaccggcatcaccatggcagtcatccagtcacacccatatccgttcagccgcgctccgacttcggttccccgtttttcgccgcgattcattgtagttcatgacggggaacctatatccaaatcaataacttcgcgaaaaccgtacgctgagttgcggtgagtgtacggtttccgcgaaatcatccctaatttcgtgaagaacgtacactga

SEQ ID NO: 634 - DNA, 34546 bp, Unknown
  R14_15m  MAG No. k141_8656
aattacaccacaccccaatttggcttggcgtagcaactccgaagagttgttcgtcgtacccccaaccggatttgaaccggtgttggcgccgtgagagggcgtagtcctagaccgctagacgatgggggcatattcagtttttcaaccggctgcgaggcgaaccgcgcaacaggtagatatattacgcactaccctgctctcacgcaaatcccggcgtgtcgcgccattttccgccgttctgcgggaacaccccatgcaacgcgaaagcgggcatccgtatgtacggatgcccgccatgcgtcacgctcccatcatccgccggcgtgcggtggacgacgcatcacagatgcgcccgcaggcccttgagacgggcgacggtgatcggcttgccgacgatctccatggactcgaacagcggcggggagacgcggcggccggacatggccacacgcaccgggccgaaggcgaggcgcggcttgtagccgccgtcttcaaccagggccttgttcagggtctcatgcaggttgtcggtcttccagtcagcttcatccacagcctcaagtgcggcgatggcggcggtcagcacctcgccggcggaatccttgagctgcttcttggcgtcgtccgcgggctccagatactcctcggtggacagcagggagccgaccatgccggcgacctcgcccagcaggcgcacgcgcggctggaccagcggggcggcggcggtcagcacctcacgctcacggtcggtcagggcatcccagttgtcggcggaaaccacaccatcgcggtgcaggtacggcaccgagcggcgcaggaagtcctcgggctcgagcatacggatgtgctcggcgttgatggagatggccttgtcgatgtcgaagcgggccgggttggccttgacgtcgcgcacgtcgaacttctcgatcatctcgtccatggagaacacgtcgcggtccggtgcaatggaccagccgagcagggccaggtagttgagcaggccctcgcggatgaagccgttgtcgcggtggttgaacaggttggactccgggtcgcgcttggagagcttcttgttgccctggcccatcacgtacggcatgtggccgaacagcggcatctccttggcgatgccgagttccataaggtaacggtaaagcacgatctggcgcggggtggagctcaggaggtcctcgccacgcagcacgacattgacttccatcatcgcgtcgtcgaccgggttggtcagcgtgtacagcgggtcaccgttcgggcgcacgatcacgtagtccggcacggagccggccttgaactcgatggcgccacgaatcagatcgtcgaaggcgatgtcttcatcaggcatgcgcaaacgcagtgcgggcttgcggccctcggcgcggaaggcggccttctgttcatcggtcaggttgcggtcgtagccatcgtagccgaactcggccggacggccggcggcaaggttgcgctccttgatttcctcgggagtggagaaggactcgtaggcgtagccggcttcgagcagcttggcggcaacatccttgtagatggcggtacgctcggactggcggtacgggccgtgagggccacccacatcgatgccctcgtcccagtcgatacccagccaacgcagggattcgaggatctggttgtagctttcttcggagtcgcgcacggcgtcggtgtcttcgatacggaagatcagcgtgccgccggtggcgcgagcttccgcccagttgaacagggcggtacgaatcatgccgacatgcggggtgccggtcggcgacgggcagaagcgaacacgaacgttcttgggcagttcgggtttggtgttttcagcatcagtcataatcccctattgtgccgcgcgcgccggacgcggagagcagcgctcctcgctcttttgcttcgttattgacatttcgggccaacaccatcccaaaacggccattttccaacgaaatctcttttgcctgtctttggtagtgcccgatatcttgatgcctgtcttcacacctgttttgacacctactttggcgccatccacacgcccgcacgcaaggcttcgacaccatttggcgcaattgttgagttttttacccaaacgatggaagaataggagtcgacgcaatcgtcttatgaaaggggaatcaatgaccgatcccaacaacgtgccgttgccgcagatgcccgcgcccaacggtaccccggcccagcagaatcccagcacgccgcaatacggcgcacctgctccggcccccgcacagccagattatgggcaattcgacgctccgtcccccgcacagccagtctacggccagcccgcatacgggcagcccgctcccgattcttccgcacccggcgcagcgcccggtgcaactcccgcctatggtcagcccgccgccgacccgtacgcggcgaatgcggctccgcaattccccgctcccggcgcggctcctacctacggccagcccggaccggacgccaacgcttacggtcaggtgccacccgcatacaaccagtacgccgctcccactgccacagcagccgtgccgttgaacaagccgtattacgactgccccttccctgaggcattcctccgtttctggaagaagtatgtggtcttcaagggacgtgcctcccgcagcgagttctggtggtggacgttggcctctgtcggcatcagcgtcctgctgagcctcctcagcagtgccacggacgacaagctcgggttcctttccagcatttggagtctggccatcctgattcccagtctggcgctcgccgttcgccgtctgcatgacacggacaagcccggctggtgggtcgccatcttctatggcgcgatggccctcggcatgatcatcatggttgccggcggtggcgcagcactgtatggcgccttcggcagccttagcaactccagctatggagccatggcaaccggcggcctcggtgccatggccattggcggactgattacgctcgctggttcaatcgtctacatcgtgttcatggctatgcccagcaagccggaaggcgcacgtttcgacgatgacgcagtagctgccccgatgcctcagggcgcttacggcgcaccgtacggcgctcccgcaaccccggacttcaaccaggccgctccgggcaccgctccgaacgcacccgctcctgacttcaaccagccagccccagcctatggtcagccgaccgcaccggctcctgactacggccagcccgctgtgcctacgcccgattacggtcaggtaccggttccgcagtacggccagccggagaccccggccccgcagtacggccagcccgacgctcaggccccacagtacggccaggttccgccgattcccgaaaacgttgatgatgggtccaccgtgctgtctccgcacacggctcccaccgatgacaacgcacagaaaccctggcaaggccagtgactgacgccggcgaagttcgcttaagaagttcgcctcatcactcatgaagcccaacaatgaggccccactcatcaagcggcggtagtattccccgccgttcagtaagccaatgccctgtgtactggatcattccagcacacagggcattgtgcgttattgcggcccctctcttcgcgcaacattccccggaatgcgttacggtggaggatggacgctgcgccgagctactcctacaagctgcctacggagagcgtttgggagatcacatgggattctcccgggcccagcgtcacgatgcggtcgcggcataccgccgcttcaaccgccacgaaaccgcgccattcgcccggcttggtgtagctcatattgtcgccgtccgctcccggattccacaccacggtttgcggcgacccggtacggctgatatgaatcgcacgccccaacatgtcatcgcgcagttccagacgcgcatccgagtaatacacacgattcaccggctgctcgccaaacgtcaccacttgcgcgtcctgtgttttcggcggaaacccttcttcggtggcatccagatacgtcgctccctgcaatccgaccagctgagcaccggacacatcgccgacatgcagataggaatgcaacgcggcctcgtacgacataggcgccgtgccggtgttggtcacggtcaggctcatggtcagcgcattgcccgtttgcacgtcatacacggcatgaaactgagcacccggctcgtcatcgaaccaaggcacttcattgtcgttcagctgctgcgaatccaacacataccgtatgtggctgtcgtcgaatgaaccctcgtccaacgcccaccgacgcagacgtgcaaaaccgtgggatggattgagtgccagctgcttgccatgcgcaaaacccgggccgaaccacgggaagcagatcggcactcccccgccgagcgacttaccggcctcgatatgccacgtactcggcgtccacaccacatccgcctgcccggccggggcccagcgcaacagatgcgctccgtaatcgctgattaccacgctgccgccattgttggcgagcatacgcaaatcgacaccattgcccataagtttcccattcccattgtgcgaacgatacttttcactaaataggatacttccttaacaaaaaagaatcgcaaagtatggccgcaggatgcacaaaggccgtgccaccccattcgccgacgaccgccacgcgccaatcgtgcgcaagatcatcggatgcgactggcaatagatgctggtcacgcgggccagtgcccggctcaagcacgacttccccctcgcgcaccagttcgccgtgctcccaatggtgcacataaacgcgatccgcacccaaatcgctggtcagcacgcggccgtccggcactggctgcacccagtgggcgacggcgcgtccgacagcagccgttcgcggcgtagcaccttggcgtcgccactgttatcgccgccggcatccaataccaattgttcgatgccggggcaagccacatgatgcagtttgccgaatccaccaaccagaatatccatgaggatgttccgttttactacgaactacgaaactcttttcgccacacaatacgccgtcgccggcgaggcaaaatatgccaaaattagccaattgcagaaaaagggcgatccccgtataggaatcgccctttgcgcacacactcaggcggagggaagtgcctcaggccgtcaaaccggcgaagagcgccgaccagtcctgagactcatcctcaaggtcgaatcgttcggtgttcatcagtgcctccttcaccggcccgggagccctcccctcaagtttgtgtattgagtaatcggtgagatcactcgtcgtggcccccaatgcccatccggaatgcggcaaatacacgtggaattggattgagcagacgaagacgccgacagtgatcatcgaacgtgatctgccgctgctgggttcccgctacgtcgattcagtgcgcaccaaccatccctatggcgtgcgtaaggcggcggtgcgcttcctgcaacacggtcacacccgtgtgggcgcggcgttcaccgatacaccgacttcggagctgattcaggatggctggaagcaaatcgtgacggaaagcgacgccatcgaatgcccgttcaccatcaccggcattcagccgtacaacaccagggacgtcaaccaaatcgtggacaccattctggattcgggcgtgacggccatgctggtgcactccgattatctggcgatcgccatcgcgcagaccctggagcgccgcggcaagcgcgtaccggacgatatctcgatgatctccgtcaacggctttgccacgcccagcttccgcccgctgaccgtactgcgctcgtccgataaggatctggccgaggcggccatcaacctgctgatcaaccgcatccaaaacccggattctacaacccgccacatctacgtggacccgacgctgaccgatcgcggctcggtaatcgataagcagtaaccccacctccctctgacgagggaggtggcatcgcaaagcgatgacggagggagaggcaccaggcctctaaccgttacgagcgaagcatcggccagagcaacgcccttactctttacaactccacggtctctttgccgggatcatccttgacatgcgcgaacttggcggccagagcctccttattgcgcttttcgtcttcttccttggcctgacgcttagcctcgtccgggttccagagcacatcctcacggtgcttgttccattcggcaacggccagaggagcgatgtattcggcggtggcggtcagggtgtctgcgtcggcggctttggcacgggcattaagcaacccgaggatctgctcgtcggtcaggcagatgcgcggcaccgagcactgctcgcgcagttcgttgacgtagagcagaatcggcagaatcttggcggcagcattggcgacactgtccgctgaaccatcggccacagcatcaccggacacctcacccaataacgcatcgcacacggcgagcgcggtggcgaaccgaacagccacatcggcgggcttggcagacgtggccagacgaccatcggcttcagcgtcggcctcgacctgggcttccatggccgcgaccgcctccctcaccgattccgccgtcgcggaatcccagtcgattcccaacacgtcggccgcctcaacgatcagcctggcatcaccggactcggcgtagtcggccatcgtgtcgtaggcgtcattggcggcgagcagggcgtccacgatgctctgcgggcgaccgggaatctcatcggcaccttcgtagacgaactcggcgtccggcacggtgacgtcctcgccggtcaggatgcgggcgaatgcacgggtgacgcgcacctgcaggttctccgcgtactttgcgtcattgtccatctgcatggcttcggtcagcggccacaggccgatcagcgccgagccggcttcggcggcctcagttaccgccggcaatgccgcgacctgtgcgattgcctcacgattgagttcaatggtcatctatgctcctttgcgtccaccactcgattgcagtgcgtcttagctcccctctctgaggggagccaatgtcctaacaccagtgtgccgttacttgacgttggctgctgggtcgacatacgtgattgacatcacacggccggtttcgttgtcgtacgtcaccgaggtcacggaggcgagcgccgtgtgccgcaggaacatccagtgctcggggtggccggtctccagataatggcgataactgaaaatcggcgattcgtggctgaccaccacaatctgctcgccggggtgctgggccaccttctcgcgggcgaagtcgtccatacgcgccgcgatgtgctgataggactcaccccagctcggcttgtacaggttggtgacgagcttccagttgccgttcttccacagcgcgccctcgccatggccgatgcgcttgccacggaactcgttgccggcctcaatcacccgttcatcagtggtgagcgtgagcgaagcctcgccacgagcctcgcgcacggggttcagcgcatcgagaatcgcgccggcggtctcgcgcgtacggtcgagcggcgaggagtagacggctgcaatcgtattggtttggggattcttggccaagtacgtggcggtggcttgagccatgcgacggccaaggtcggaaagatggaagtcgggcagtcgctcatagagcagatggtcggggttatataccttgccatgccggacgaaatggatggtggtagcgctcatgagccgcctttctgcttcccgccctgaagggcatgagaacgttgtcttaatatctccaatctaccgcgtgtcgcggagtggacacccgtagagtatccgtgacgcaaatatgcggatgggaaaatccgacgcaaactttgcgcgaccatggacaacacatcattcgatgagggcttcgccggcaacgccacgccagcgggggacatccaatcgggagcggaaaggagcgtagtgctgttatgtccaataactcgtccaactcgaactcgagcaccattctggccggcatcaaggaagtaggccacaaagtctttggtgggtatgcggaactactgcgcattccgcataccgcccgttattccatcggctcggtcatcgcctgcatgccattcccgatggtcggcatgaccatcaccatttccgtacagcattattacggcaactattcgctggccggcatgctcaccgccattcaggcgattgcgctggccgtggccacgccgctgctgggcaagctgaccgacaagttcggccagaggcaggtctcgattccgacgattatcgtttggattgtggccgccatcgcgctggtgacggcgattaccaaccgcgcgccggaatgggtgctgtactgtctgacgccgttcctggccgccattccgccgtggggcgcgatgagccgcgcgcgctggaccaagattcttaagggtgaccgggagcgcacgaaccgcgcgctgtcgctgtgcggcgtgctcgacgaatgcatgtgggtgatcggtaatccgctggcctccacgctggccgtgatctccggtttgctggcgttctcgttcaccggcatgtgcgtggtggtcggtgcgctgatgttcctgaccgagctgaccactgagccaccgtcgcagaccgcgctggcgcgtgccgagggcatctcccgcaaggaataccgtgagcgcgaggccgccaaggctgaggcgctgaaggtggaaaccgccgccgaggagacccgccgccgtcttgagcgtgaaggcgtgaccgatgaggccacgattaacgcagccattaagcaggcggtcgccgatgcgcgttcgggcaagaaggcgtccatttggggtccgggtctgattgcggtgtgcgtcacctggttcggtttgggcgcgttccagtcggctacgggcatctccatcatcgcgtttgccaccgaagcgaatatgaagcagtacacgggctttgtgtttgcctgcttctccttcagctcgctgatgggcgcattggtgtatggcgcgaagaactggtcgattgccctgtggaagcgcttctacttctgcctggccgtggtgaacatcggcatcagtacgttcctgttcgccaagcatctgtgggtgatcatgatcatctacttgattattggcgtatgccaggccccgacgtggatcaacggcaaccagctcatgttgcatctggtgccgccctctcgcttgaccgagggcatggcgtggatgggtgcgatgaattctatcggctcctccgccggttcggcgattgccggccagttcatcgaccgcatgggctcgcacggaggcttcatggtggtgaccaccttggcactggcctcgctggtgattgcactgatcggcttcaagcagatcaagggctccaccgagcagccgaccctgactgaagtgagtgtgtgagacgtatgctaagccccctctgacgagggggcttagcatacgtcaaaacgctacttcggccagcctttgggcgtgtgctccaaggaccagatgccgagcttgtgggagaagctgttctgccacttggcttcaagctcctcggcattcagtcgattttcagcggacttcagacggttcatcgcattggtgtgcgtatcgtcgagcagccacttgcgaatcaagaagttccagatcattaccacggcagtggccaccaacttgccgatattggtgcgcaacagatattcggcatgctgcgatacataggcatcatggttcataccataggtggaaatccagataatcgcgtcattcatgaacagaccgactacagcgcccgccacgaagataaggatctccatccagcgtgccatgtcatcacgatgcttgaatacgaatttcatgctcgccagatagttgaaaatcagcgagatgatgaaagagatggtggcagccagcacgttgtgcatgtggaatatgccaaccaataggttgaggataccccagtcgataacaaaggcgataacgcccacaatgccgaacttcatcagctgttcaatcagttttctcacaagagtattcaacactattgggctgactgcggaacgtgtattggctggaaaggccaataatatccccaattggccttgccccggtccgttctgcaagcagcttcctacgtccgcatgccatgttcaacagcagccgctgaggctagactggaagtgaaccgaatcaaggaggaattatgcccgttattcacactcatgtgtccgtgtccaccacccccgagcagcgtgaggcactgaaggccgcctacggcaaggcgattaccgctgtgccgggcaagtccgaaggctggctgatgtgcccgttcgaggacaatatgccaatctacttcggtggtagcgatgaccagcccgccgcctatgtggaggtcaacgtattcggccgctctgtgccgggctctgcttgggaaaagctgaccgaaagcattatggccgcgctgaactccacactcggcattcccgagggccgcacctacatccgctacaccgccaccaccgattggggctggaatggcggcaacttctagttgccaccattcccctcgcagcatagctgttcgcatcgcctacggaaagcccagtgggctttccgtttaatggctcagggtggcaactagtttgcgtattctggctcccctcagtcagcttcgctgacagctccccctcaaagagggaagctcagatgtagaaagcccgccggtgtcgggctttctacgtttcaaggggctgatttccaacattcagaagctctactagcgtttcaaggggcttttaaaacaagaaacccggagtataaacattgcaatttcaatggtcatactccgggtttcgcaatcgaagagcccctcgaaacgcagatagacctccggaaaaccggaaatccgcccctcgaaagcgagttacctcacctcatgcctgtcatcacacaatcttgggcatgggggtggtgaggctggtggtcaggttgacgtggaccagaccggcaccggcatgcacctcgaccttcttcagggtcacggtgcgctcttcttcgggggcgcggtcgttgtcggtcatggtcgccggggacttgaccgccacgaacgccagatcatccagcgagatgcctgcgctctggcacagttccatggcctcggacacggactcggtgaagcccggcttgtagatcacgcgctcggccggtacgccgtaggcgttctcggccacccacttggcgttctcggtcagggccatgcccttgtgcgaatgcggttcagccggcatggagccgttctgcaatgcatcgacgaaaccgtcaagctgcgggaccagcgcctcgccgccgtcgcggaacagattgccgacgatcggcgtgcggaagcccagctcgtcggcggtggcctgcagggacgggacctgatcgtcctcgccttcccacaggttgatgagcgggaaggttggaatgtccaggttctccaggcgctgcacgtggaacgggtagcgccaggccagctcgggatcgtcgcgccaggtggaggcgcgggtcaccacgatggcggcggacggccactgcgcgccatactcgcgacaggcgatgtccagccacttctgggcaccggcgtcggtgccgtaaccggcttcgacgacaaccacatcatgcagagcgcaggccatttccacggaaaccagcgtcggaatgccgatggacacgttggcgaacgggccaccgtgcacgtagaccggggagccgttcacggtctcggtcttggccggcttgaccgcgtcggccagaatgccggtgatgcgccacaggtccacgaactcgccgaaggtcacggccttgccgtccttggtgccggcgatcatcttggatacacgctcggaaatctcgtccatcgagcgggagagcaccatgatctgcatgagctcgcaggtcggcgtgagcacgaccttctccggcacgttgcccttgccgtagtccacggcggtggagcgcagggagcggctcggcacctcggagacacgcggcacgagaatcgtgtcaagcttgccttcatcgatggccttctcggcgaaggagacgagcaggttctgggccgcctcgatggcgcccatttcgccgcacagaccccagtcgatgagctcggggtgggtcagggatgccttgccgccgccggaggcaccgcccttggaaccggctgcggtgatgcccatgctcggctgacgcagcacggcggccgcatcaatgccacgcttgttcagggcgtcgatcaaggcgatggtcgtggtggtcttgccttcgccgcgcgatgccttgagcggcgtatcggcggtgacgagcaccaccttgccgtgcttgcacggggcgtccgggttctcggccaggtacttcatgtaaccgaatgcgtcgatcttctggaccaggccgtactggctggtgaagtcttcgatggtggtcatttaatgcctttctgtgctgatgatggcggagcggggtggtggggcggccgccgccgcctcttcgcctagaaacagcccactgggctgtttcttaacagcttagcctctcagtccgcttcgcggtcagttcccctcagggaggggagctcaatacggactaaaagtcggacatgtggaagccgttcttcatttccatgctgcgagtgtacagcacggagtcaagcagcttgtcggtttcctccttgagctggtcggccatggtctggttggcggcggcgagaatctcgcgcacttcggggttacgcagcgcggcgatggtctcgtccggggtcatcggctgcacatcaccgtctacgttgtcggcctcgaattcctcttcggcagcagactgcgaggcttcctcggcggccgtcaagccaaggcgtgccacctgctcatcagtggcagacaccaaacggtggcccatcgcgccggtcttctcctggtagcgctcgacggcgttggacgtggagcggaaggcgccatcgcacagggcggcgatgatgcggttggcccagtagaagttctcggacgtcacgcgggtggtggtgtcctcaaggtaagcgggcgtggtgtccacgttcgggaagaacggcaccagcgtgttgaacgggttggagccgtatgccatccactggatggtgcgggaggcctgcgggcggtacgggcggatctgcatcaccgcaagctggctctggcggttgatgccgatcgtgcggtacatgtggcgggtgcgctcatcgcccagctggccgtatggatcgaacggggtgccctggtagtgggagctcaacacgtacttgatgtcctcgatggtcaccttgcgctcgggctggcgggcccacgggatgtcgtcggaggtgggcttgtggtcggcgtccgggccgtcccacacctcgtcgtacgggttgaggaagcgctgcatgtaccaggcgcgcggggtgttgtacacgtggtcggagtcggagtgggagccgaaggcgtcgcgcgggttgaacggggtggtgctctccaccgcgaggtccaggtggttggtttcgatgaattcggcgagatcttcggagcacatgtgcgcttcttggtcgcccagagcgtcctcaaggtcgaattcgtcgataccgagctggttcggcatggtcacgtaggcctcgtccggcacgcgcttggcaatccagtgatggccgcccacagtttccagccaccagatttcgttggagtcggagaaggcgacgccgttcatctcataggtgccgaattcctcaagcagcgcgccgaggcgctggacgccctggcgtgcggtcttgacatacggcagcacgatggtcaggaagtcctcttcgccgatgccgccgggcacctcgggctcatcgcccctggccggcgtgtattccacgaacgggtcggcgccgagcacgcgctcgttggtggtcagggtctcggtggcgctcatcgccacgttcgcctcgttgacgccggcctcgccccagatgccttccttgaggtccgcgttcggcacggcggtgtactgcagcgggtcgtccggcagagtgatggtcaggtgggagatcactgatttgtattcgcgcggctgttcctccggtttcacgacgatgaagcgcttcgggttgaactcgccgttcgcggaatcctcgttgcgggcaatgatggtcgaaccgtcatagctcgcgtctttgcctaccagaatcgtggtgcaggccatagtgtgatggtgtcctttctcttattcaagctccccttgtcaggctgagccgttcagcaaacagcccggtgggctgtttgtaggcgagggtgggagataagtcccaccacagatgttgcgagcggtagcccgtccgtaattgcaggacgagctgtctcgcaaagcgagactgaggggtagtcactctagctgtctctcccccagtccgcctacggcggccagctccctcatcagagggagctcacatacgccaactaaaaatcacgccttaccggtcaggaagatgccgtcggtgtcgggcgcttcgccgctgttgcgcagcgcgtgcaacagctcgttgagccagaagccctgattcaagccgggcaacggcttcttggtggcccacacctgcaggtagtactcgtggtccttgtccggcggctgcggaccgttgtaccgcatgatcaccgctgggtcagtgctgcggcccaagaacttggaggccgaagaattgcggccttgcacggtctcgggaatcatggccggcagctgacgggagaagtccggcgggatggccaacgcatgcgaatcattgaagtcgtacatcagcgcgtcaatcggcagattggccacggaccagtgaatccactcgaagccgcagaccggaatcgaatccgggtccacgaactcccagtgcaggtaacgggcctcggggttcacatcaccgatgtagaacgggaaggagacgaccggcacgccgccgttgaagtactcaggcgcggcggccttggcaaaatcgtccggaatgacggtgaaatcggcggaaatcttcatatgtcccagtatcgctcatatgtgtgacgtactgggggctgtgcgttacgggggtctctccccccagtctcgccgcgctcgacagccccctcgtcagagggggctggttgcgtcgggttatggaattagggcgcagaagagggattcgaataccagtagcgggttgccgttgccggctagacgcttgcgggcgtgggccacttcgtccagacgggtcacggcaccggcccggttcaaccgcaccgacaattcggtgatcggcgagcggttctccaggttgatgaggcccaccgaatcctccgcattgttctgcagcaccgccacatcccggtagatggaggcgatggagttcagcgcacgatccaatacgtcgcgcgtacggcgggtgaccaaacgcttcacatcgtctttcttggcgatctggttgaacgcgccacgcagtttcggcgggatgcggtcgttcggtgccagtccgttgatgcggcggaattccgcttcctggccggcggtgatgcggcttgcgtccgcctcggcctgggccttggcattgtcgataaggctgccggccagcagcaccgcgtccgaggcgcgagcgaggttcagtacgcccaccaccaattcgtcgcgatccgtcatcacctgctcgtcagtggcgtacaacttggcgatgccgatgtgtccctcggccagacgggccgcacgctgcgccacttttggctcgacattggtggtggaggtcaggaatccggccaccgcctgggtggagggcacggcgaggttcacgatgcgcgtgcgcgagcggatggtgggcagtacatcctgggcactcggcgcacacagcagccagatgcagtgttcagccggctcctcgatctccttcagcagcacgttggtggtgcgctccagcatgcggtccacatcctcgatgatgatgatgcgccatggtgccgtggcaggcatttgctcggaggcggtgatgatctcgcgcacctggtcgatgccgatggtcactttgttggtggccagcactgtgacatccgggtgggtgccagcgagcacctgttgggtgacgcgcgtgggctcatcgttcatgccgtggtcggggctttccagcgccgccgcgaatgctcgggccatattggaacggccggagccgggaggcccgcaaatcagccacgactgggtgatctgacccgggtcgccctgcgcgatgcgactgagcatgtcgattaccggctgctggccgactagtgaatcccatacgctcatcggacaccgcccatcgtcacggctcctgtagacgccccggatcgcgccatcaccgtatccacatctgcaacattgtcccgcagcagtgtctgaatgtccgcttcgatggcggaccacacctgttcgatggactggctggcatcgatcacgtggaaacgattcggctcggccacggccaagtcgaggaacgcctgacgggtgcgggactggaagtcgctgccggccgactccatgcgatcttcggtatgctcaagacgattgtgggaaagcgccggatccatatccagcagatatgtgcggtcgggcagcaggttgttggtggcccacatgcttaaggctcgaatctcttctggcgtaagttcgcggccaccggcctgataagccaaggaagagtctagatagcggtcggtgatcaccacttcaccgcgctccaatgccgggcggatggtttcggcaacgtgctgggctcggtctgcagcgaatagcagcgcctcggcgcgcggtgcgatgtcgacggcgcccccatccacaccgtgcaacagcagttggcgaatggccttgcctagcgcagtgcctcccggctcacgggtaacgaccacggtacgcccctgagcctcaagatacgcacgcagccgctcgacttgcgtggtcttgcccacgccatcgacaccttcaaacgaaacaaacagaccgctcatgctattgaccttagcgttaggcgcagagttgtgcccaacaggcagttaaaccagctctacctccgtttcaaggggctgatttggtcttttctgaaggtctacttccgtttcaaggggctgttacccaagtagacaacgtcccaaaacggcggaatgacgttggcgcggagccgttcatactcgtggttcagcagatgaccagccccttgaagcggaagtagatattctcaaaacgagaaatcagccccttgaaacgcaagtagagcaataattccgctcagccacgcttgggaattacggcggggcgctcgtagccctcgttggcagtcagccagtcgacatccttcttgacggtggcggcggtggagctgagcttttcggcgatgcgctggttggaccagcccttgtttgccagcttcttcacctcggcacggcgtccggcgcgcttggcctcggcggcattggtcgcagccgaagcagcgcccttcttggctcccttggctcccgacttcgcggcaccggcacgcccagcaccgcgacggccacgggtggagggaccagccgcacgcttttcggcgagcagtcggaaggcgtcatcaggggtgatggattcaggcgtgtactgacgcggcaccgtgcggttggtctcgccatcggtgatgtacgcgccgaaacggccgtccttgatggtcacgttcttgccggtgttcgggtccttgcccagatcacgcagcggcggcttggcggcaccacggccacgcccgcggccgtacttaggctgcgagaacagttctttggccttgtcgatatcgaccgtgaagatctcgtcttccgaggccagcgagcgggtctccgacttgccgtcggcacccgtcttggtcagataggggccgtagcgaccgttgttggcggccaccgtgcattcggatacctcgccggtttcggcgttggtttcctcgtatgtgcccacttcgcgcggcaggctcagcagctttagcgcgtcttccagcgacagcgattcagggctcatcgtcttgaacaacgaggccatcttcgggcgcgacgcggcggcggccgcggccttcttcgaacccttcttggccgcagaagcaccagcagtatcgccagcagcgccagccgaagcctcagccggcggcaccagcgccacatacgggccgaaacgcccattgcgcacctcgacggtaccgccggataccgggtcaacgcccagctcgcgcggtccaccggagtggttgtcgatcaaatcgcgggccacggccaccgtcagctcatccggcgcgatggtgtccggcagagacgcgcgcttcgggttgccttcgacgtccagatgctccatgtcttccagatacgggccgtaacggccgacgcgcacgtgcaggccgtcgccgatgtcgatggtgttgatggcgcgcgcgtcgatctcgccgagctgcgcgacctgctgttgcaggccttcgtgcgcctcgtcggcgttgcgggcggcgccctcgccggaaccgaagtagaagtgggtgagccagtcgcggccggattcctcgccgtgggcgatgcggtcaaggccgttttccatctcggcggtgaactggtagtcgaccagcttggggaagttcgtctcgagcaacttggtcacggagaaggcgagccagctggggatcagcgcacggccacgctcgtatacgtaaccgcgatccatgattgtggagatgatgctcgcgtaagtggacggacgaccgatttccttggcttccagcgtcttgaccagcgtggcctcggtataacgggccggcggctgggtttcatggccgtccggttcgatgtcgcttgcctcgacctgctggccgacgctcatcggcggcagggaggtgttggattcggaggcgtcacccctgacggccttgacgtccgtcttgccggcggcagcagcctggtccgagccagccccagcgccgggagcggcggctttgggcttgcgcccctcccccgtggccttcataaagccggggaattcgatgacggtgccggacgcttggaacacggcctcgccctcggtggggccggccggcgcagacaggcgcacggtggcggtggagccggtggcgtcagccatctggcaggcgagcgtgcgctgccagatcagcgtgtataggcgcagctggtcgccgggaagtttggaagccagctcatccgggtcgtggaagcgcgagcccgccgggcgaatacactcgtgggcttcctgcgcgccagcggttttggtggcgtactgcttgggctcggcggagaggaacttgtcgccgaaatggtaggagacggcgttgcgggcggcggtgatggcctcctgcgacagcgtcaccgaatcggttcgcatataggtgatgtagccgttctcgtacaggctttgggccgcgcgcatcacgacgcgagcacccatgccgaggcgattgccggcggtctgctgcaaggtcgaggtggtgaacggcggctgcgggcggcggcggtacggcttggtttccatcgacatcacagtgaaatcggcggtcctcagcgcttcagccacggcagtggcaccagcctcatcaagcaggcgaacgttcgccgcgaacccgtccggggtcagctggccgtcggcaccgaaatccttggagccggcgagtcgcttgccgccgagcgcgatcatgcgggcggagaattcggcacgctcccccagcgcgtcaggcgcggccaacatggcgacgatatcccagtacggcacacgcttgaatgccatgcgttcgcgttcgcgttccacgatcaggcgggtggccacggactgcacgcggccggcggacaggcccgggcccaccttgcgccacagcaccggcgacagctcatagccgtacagacggtcgaggatgcggcgggtctcctgtgcgtcgaccatattgccgtccacgtcgcgcgtgttgttcagggaggcgttgatggcgttcttggtgatctcgtggaacaccatgcgcttgaccggcaccttgggtttcaaggtctgcaccaagtgccacgcgatggcctcgccctcgcgatcctcatcagtcgccagatagagttcgtcggcgttcttcagggccgatttgagttcgctgaccgtacgcttcttgtcgccgtcgacgatgtaatacggcttgaacccgtcgttgacgtccacgccgaacttgccgaacttggccttgtctgccgcgggcacctggctgggctgcgcgaggtcgcggatatgaccgaccgacgccatgacggtgtaccccttgcccaggtagtcaccgatcttgtgggccttggtcggagactccacaatcaccagtttggtagccatacccactccttatgtattgcgcgaaacacacgacgtttctggcgtcataatactcatgaatcatatccaactgccaaattccgccgttgtgccgggcaaattcggccgttcgcacctcatgttttaccgtttgggcggtgccggcggagcgccgatcaggcccagcctgcttaagggcgctgcagtgatctgacgtagggccagcaacagtccgaatgcgagcatggccacacccgtaatgcccacaacagcgctgacattcgccccctgaaccgcccaactggcgctgacattgagccccggcaccacctgccagatcacataaccgctgtaggcgagcaacagcaggcccccggtaatcaacacgctgccgacgatctgcacactcactgaggagacgcggtggcccggctcgtccatgccggacttgcgtgtaaccgccagagcgagcagggccaatcccgccaccagcaggatggacatcgccacatccgaagggcgatgccattgcccgtatatcacagagacaccgacggtcgccgcccaaaccacgccgatgacgcccgccaaagctcgaaccgcgcgaggcacggtaagcagcagaatcaccgcacaggctgcggccagcatcgtgtgtccggaaggcgcggaattagcggcaggcgattcagtgttgatgatgaacggacgcggcaacagacccttgatacgggtgacggccaagcagaccacggcgaacacggcgatttgcccggccaaccaccagcggcgtcgaatcagcgccgtaataatgccgattgcggcaattgtgcagctgacagcgataaccagccaggattgtgcgacggcgttcatcatgccggtggtccaggacggtacatcgttgtgcaggtttttccagaccagttcgtcgtacgattgtccgttttcggtaaacacgcacccccaccacacgccgaagccaatagcgatcaggagcagaccgaataccacgcacagtacgcggctggagattcgcgggcgcacggtaagcgggtcaagccgggccaagccacggtcgatatcagatgccccatccgcatcgtccatgcccagcggcctgaaatcccctaaggagcctgatgtggatgccgatgcatctgaaccggagaccgggccgagcgcagccaatgggtcaacaacgttcgacgacgagtcaggctgcgctgcgcctgagccgaccagattgaccgccgcatgcgggtcgcgaattctaggggtctgtgcgtcattcatacgttcgactgtacggccgcgccccggacagggagccgtgctcgtgccagctcacggccaaatccgcacaaatggaaaacctccacgcacccgtcagaggccacttacccttgctgcattcctgccctgggggagttgggtgacatagcgccgcgtggaggctggggataagtctatggagacgtatggaccagcgcagcgacacgaaacgtgcgcgccgggtcgcacggcaggccaaccagcgcattcaggcaatattcatgcagcatcaaggaacgtgcccaattgtaagaattccggaaaaataccggcataaatgcgtgtggttacgctcacgtcaaacgattgttcaaggccaacagttacggtggacaccatggcttcttatactcgtcgtgcacattcgggaggcaatggccccgctctgaggcaaccgcgcaccgcgcaaagcagagccgaccactccgcacaggagggcccctatacgccccaggagagccgttcccgccacgcaagccacaaggcttccaatagccatcgagccccgaacaggaagaaaaagaacacaggaaaaggcaagcaccgtgtactgaaatgggtgctgggcatcttcttctccctgattggactgggcttgctggccggtatcgcagtattcgcatacctgtacaccaccaccgaggtcccgcaacccgaaaagttcgcgttggccgagaaaaccaccgtgtattacgcggacggcaccaccgcgatcggctcctacgcggaacagaatcgttcaatcatctcttgcgaggggctgccggactacatcggcaacgcgattgtggcgtccgaaaaccgtacgttctacacggataaaggtcttgatctgaagggcatcgcccgcgcattcattaataatgtgaccaagggcacgcgccaaggtggttccaccatcacccagcagtatgccgagcggtattacatgggcgaaaccacatcctatgtgggcaaggcgcgcgaggccatcgtggccatcaaaatcgcgcaaaccgagtccaaggacgaggtgctgtgcaattacatgaacaccatctatctgggccgcaactcctacggcatccaggcagcggccaaggcatacttcaataaggacgccaaggatctgacgctgtctgaagcggcgatgatcgccggcattattccgtcaccgtccacgtgggatccggccgataacgccgatatggccaaatcgcgcttcaagcgtgtgctgaacatcatgcaggaggatggttacatcactgccaagcagcacactgatgccaagttcccgcagactgccgcggtggcgcagcaaaacgaatacgcggggccgaacggttatctgctggatatggtgcgccgtgagctggtgcagtccaaggcctttaccaaagaggatttggataccggcggatacaagatcatcaccaccatcgacaagagcaagcaggaccttatgcagtccatcggcgacacccgtctggacgacatgcctgaatccctgcaaatcggcggcatagcgctggacccgaagaccggtgaagtattgtccgtatacgccggttcagattatctgtccaagcagctcaacaatgccgatcaggccgtattcgaaccgggttcgactatgaagccgttcgctttgctgggggccgcgcaatccggcgtcagcttcgatacgttgttcaacggcaattcccaccagcacttcaccggcttggatcaagaagtgaataacgctctggagaacaactggggcaacatcaatctgtatcaggccaccgccaactcggtgaacacggtgttcatgaacgtcaatgagcatctgacgccgaagcgcacggccgcaatcgcccatgaagcgggcattcagggcgatatcgatgaaaactccatgtacaacgtgctgggcatcaacgccctgaccgtgtgggatttggcgcaaggccattcgaccatcgccaacaatggtgtgaagagcaccttgcacatggtgtccaaagtgcttgattccaacaataaggacatgtacaacgcgcccagcaaaggcaccaaggtgttcgatgccaacgactgcgctttggtgcagaaggccatgcagggcaccaccacgtacggtacggcggccggcacatccaacatgctgggccgacccatcgccggcaagtccggtaccgccaacgacgaaatggcttcgtcgttcgtgggatacacccccagcatgatgaatgtgtgggctatctggaacccggacgataagggcaatccgcaggcggtgccggccttctccggatacggcatctcttccactggataccccgcccacctgttccaggagttcatggctcaggccttgcaaggtaccgaggtggagcagttcccgaccgctaaagacaatggcaagatcggtggacccgacggcacttggggcttgggcaagggacagagcagcggcctgtccaacaacaccaacaagcagtccaccgaagacgcgcagaagcaggctgagcaggacgcacagcagaaggcggccgaagaggaagccaagaagcaacagcaggcccaggagttcgcccagcagtgcctcgccaatccgagctattccaccgagtgtccgaattatcccggcaccactaccggcggagatggcaacaatggcaacaatggcaacaatcccagcaataccggcgggaacaacgggaacaataccggcaacgataatggtaattccggaggcaccggcgggaacaccggcaccaacggcgtcacccagtagtaagtaagcacagacaacaaagctccctctgatgcaatcagagggagctttgttttgttgttagcgctcagcgcttgcgctgggaacggttgatggcagagataatcgacttcagagcgctggtggtgatcgacgaatcgatgccgacgccccacacgatctgcgcatcatcggcctcgccgacctggcattccacgtacgaggcggccatggcgtcggtgccgacggacatggtgtgctccacgtaatccataatcgaggcgtcaacgccaaagttggaaatggcgttgaggaaggcggcgatcggaccgttgccgatgccggagacctcgcgctccacgggcgcatcgaccccgacgttcacgccgcggtcgagcaggcgagccttgagcacggtatcggagccatcctcaccggagctgacggccaccttgagcagcttcaagcggccccacggcgcgagcgaggcgtcatgagtatcgcccacaaccacaccggcggcggtcatgccggactgttcgatcggcaggtactcgtccttgaacagacgccagatatcctcgtccttgacttccttcttggtcgtgtcagcgtagtcctgcacgatcttgtcgaattcaatctgcagacgcttgggcaggtcaagattgtggttggtcttgagcaggtaggccatgccgcccttgccggactgcgagttgacgcgaatgatggcctcgtacgtgcggccgatgtccttcgggtcgatcggcaggtacggcacaagccacacgaagctgtcgagatcggcgccagcgcgctcggcggccacctgacgagcctcgagacccttcttgatggcatcctgatgcgagccggagaacgcggtgaacacgaagttgccggcgtacgggtgacgctcggagatcttgatctggttgcagtactcaaccgtcttgcggatctcgggcacgttggacaggtcaatctgcgggtcgatgccttgggtgagccagttgaggcccagcgtgaccaagtcgacgttgccggtacgctcgccgttgcccagcaggcagccttccacacggtcggcgccggccagcacggccagctcggtggcggccacgcccatgccttcgtcgttgtgcgggtggagggagagcactacggagtcacggtcgtcgaggtgggtggagacgtactccacttcgtcggcgaacacgttcggcgtggtcatttccacggtggcgggcaggttgatgatcatcgggtgctcgggagtcggcttgataacaccgatcacggcgttgcacacctcgacggcgtactccggctcggtgccggtgaaggattccggcgagtactcgtagtacaggtcgatgcccttggcctcgttctcgaggtccttgcacagttcggcggcgtcggtggcgagcttcttgatctcttccttgttcttgcggaacacgacctcgcgctgcagcacagacacggagttgtagaagtgcacgatggcgcgcttggcacccttgagcgcctcgtaagtacggcggatgaggtgctcgcggcactgggtgagcaccacgatggtcacgtcgtccggaatcagctcacgctcgatgagcatacggatgaagtcgaaatcggtttcggaagcggacgggaagcccacctcgatctccttgaatcccatggagacgagcaggttccagaaacgcagcttgcgctcggaatccatcgggttgacgagggcctgattgccgtcgcgaagatcgacggagcaccagcgcggcgcgcgctgcagtcgcttgcccggccacgtgcgctccgggtaatcaaacgggatctgcttgtcgtaggcggcgtacttgttatacggcatacgactcggcttctgcggatcgccgatgaatcgtgccggaggcagcagcgggtcgttgttccccccattggacgccgcagccactgccgcgagatcaaaaacggatgattgaccctgacccattgttcctcctttactgtgcgaaccattcatacaatcgcttattggatattcgtttacgcattggtaacatgcgtaacttcctccatcctagcgacggcccattccaacaccccgttcatctcacaatatgccagcacacgtagcgcttcccggcgcagtactactagacttgcaactatgcgtggaggcgcatgggcttccacggcgagagaagaggtccattatgacaaatccaagtatgcctccaatgccgcaaatccctcaaccgaacggtcagcggcccgcagctccgcaatttacagcaccgcagccggtcttccagcagcctgcagcaccacgccccgcgcagcccgcagcgccgcagttcgcggcgccacaatatgctcagcctgccgcgccgcagttcccggcgcaggctccggctgccgtacagccgacattcccacagcagcccgcagcacagcaagccacctataacccgcgcccggtcaaccaactgcgcaccaagcgcagcctgctgaagtacatcctgctcggcattattactttcggcatttacgatatctggcaaatgagcgaagtgggcgagaccctgaacctcatcgcttcgcgccgtgacggcaagcgcacgatgcactactgcctgatgttcttcctgatcggtggcctgacgctgggcatcggctggctggtgtggtaccaccgcctcagcgcccgtattggcgatgagcagcaggcccgcggcatgactcccaccgttaccgcagccaccttctggctgtgggacgtcttgggaattttcatcatcgtgggaccgctggtctacttctacaagctgctgcatgcgatgaacgatctgtccgccgactacaacgcgcgcggctgaaacaatcccgtccttctacacttgccgacatatttgccggggcagtgtttttactgcgtttgccgatggccgcaccagtcagaccattagttcggctccgcagtctcgttgattcataggagattccatttatgctttgccccaattgccataccgacaacgcggaaggtagcaagttctgcgaaacatgcggcacgccgctcaccgccaccgaagcgaatactgcagcgtcgagtgcttccatgacaccgcaggacgcgccggttgcgcccacgccagcgggagcgactcccgctccggctgccgcttcagtccccggccccggcggtgcggcagtgccgccgattcctatgccgcagggtgctgctggcatgtcggctccggcggtcgtctccgcaccggcggctacgcagcccactgcgaccgttgccacggccacgcagacggccccggcaacggcaaccacaaccgccgcgaccaagcccggcccaaacaaactcatcattatgctggtggcggtgctggcggccctgatcatcgcgggtgtcgctttgttcctgacatatcgttccgaggtgtggggcggcaagtcgctgcctgacccggcatccatcgcctccagcgtcaccgataagaacggcaagaaggcgtcggccgtcaaggccaaggatgtcacggccgcgctgaaggccaagggactcaacgcgaaaacggagaaggtgttctccggcaaggattcgggtgagttcatcggctataagaacgccgctccgggcgctcgtgtcaaggccggctccacggtcgtggtgcaggaatccgccggccccggcgtgccgaaagacactctgggcgcacaggtcaataaggtgactgagacgttcgccgatatgggcgttccggtccactataagaaggtgtttgtctctgacgccaagaagaaccccgaaggttcggttgtggccacctatcctgccgccggcactggggtcaaggacgacgagaaagacaagggcatctacattggcgtggccgccaagggtgacgacaccgctctgcccatcgacgtgatgggtcaggatgtggataccgtcaaatcccagctcgagtctgagggccacacagttaccgttgaacagcgtttctcttccaaggattacgtgggtaaggtttccggcgccagccccgctccgggatcgtccctgtcttccggcgaagacgtgaccctgtatcagggcatcgatgccagcgacaccaaagaagcctttacaggccatgatttggccgaaacaggcggtgacgcgctgctcggtaccacacgcgcagccgacggccagtggtgcactaatgatgggaagtgcatcaccatcgacaattacaaggtgactgaaggcggcagtgataatgctgactataccagcgattacgacggtactctgattgcctgcaacgccattcagcaggcgtactgcaacagtccgaaagccgactacctagtcacacaagattatggcgccttcgagctcatgccgcatatcagcctgaccaacttttgggccaacggcaaaatgtatgacggcaatggcgtgcatatgggtgattcttggcccacatccggcgaataccacatgcaggatctgttcctcgtagtgcctaccggctccgacttgcaggggttggaagataagggctacttcgacaaagacgcgcttgccgcagccaagaagcagaaggcggtggacaccaatcgaccgttcattctgtaccgcgatccgaagctctacgacactaccaccgctccatacaacggtgccgggaacggcgccaatccgttcctgccctacaacggatacaacggcagtaagtccgacatcgtcaagatgaagccggccccaagcgacgccgacgcctactatctggtcgaagcgtccgaacccgattgggattccctgccggacgcggacgtgaaggcgcccagcaccaaggacaagggcaactccaaggattccaaggattccaacaagagcagtaagaaatccggcacaccggatgcggcctcactgaaggtgttttctgatttggccggtgcccaatacgcttacacgattgctggcgatggcagcgccttcaccaccatttcgttggatgatcggggcaacttctccggcactgtggacgaggcagatatgagcagtggcgattccgcagcgaatgcgccacgtatccagaccaagttcagcggtaagtttgcatccgccacatccaattcagatggcacggtaacgctgaagtgtgatgcgtcggctttcaaaattgacgacaagtccaaatccgacaagtcaggattcagcccgtgtggcaccttcaccggatatccatctggaacctccagcgatgcgttgccatctgaagcacaggccatgctcgtcaagcgtggaacgccggatggaccatccgattggatgctgattaacaccgaaggctctggtgtttttatccgcacccagaaataaataacagttaagcagggttcaggcggatccaacgcttaatactcagtgaggccagttcataccggcctcacgtgtttttatcgcttcttcaccaacgagcggatgacggccataaaaccgaggctcatggcaccggccagcactgcgaatacctgcgggcggcgcaattcgttacgcatgctgatggcaccggtcacgcagtggtcctcgaaccagacgcgcacctcgttgctggagtatcggcccaccagatcaccccaggtgagcatgcgggtcacgtagccggccgggttgctttcatggaattcaaacaggcggatgcctcgatagcgcgacttggggccatagcattcgaatccgcaggtgggtgcgtagcccaaatcaatgccatgcgcgtggcccacgaaggcgttcttgtgatcgtgaccacagaacagcgcgaagtagccgcctgcctcacgcaaggcgtccacttcaccgacgttctcgtctgcacagccaatcgcctcacccagccgcgatcccggccggcagatctcatggttgagcacgtagcaatgaccggcgtgggtacgtgcgccttccaccgcgttcggcgtccatgcgggaacctctttgaggcaatcgtagaattcctgcggcggaatgtgctggaaggcgatggcaggcaccggcttaccgtcgccgttgcgttcgccaagttcggactgtacggctcccagccaatcgatcgcctcggggcttggcgtgccatacccatcggaatcagccaaatcaagaccacgcggattgaccacataggccgggtattgggcgtcgttctcttcgggcttgccggcgtaatcgccggaattcaccatcatgacggacatagctacgcgcccggatccgtcggaagcctcaatgggcagggcaaaagtgcctggctcaaggctgtcgactgggttcaggcagccggggaattcgcggtagatgccgtcctgctcgtcggccaggatgccgcactggaaatcgtgattgccgtaggtggcagcgaacggcacttccgcttcgatgaccgggccaaggaagccggcaaacgtgcggcggactttgtcacgggtctcgtccatgagctcgtccaaagtcgtcggcacatcctgtggatcggatgttgtggagtagaccagcgtggacgcggtggacgcggtttgttgggcgtcggaatcgctgccgtcggacttcatggccagcagacgattgttcacgcggtctctggcccgccgcttgattccgcgcagcttggcctcgacctcggtgaccgcacgcacgcgagcgcccggttcctcgccacggcggcgcaggaaagtgtcgatgtaggcaggatcgtaaccgcggatctggtcgccggtgaacaccaccagatccgggtcggctttgcgaatggcttcacggataaggcggatggtatcggggagcacgttggggccgtcttggatgtcggccatttgcagcacgcggaagctgccgtcttcgcggaatcgcaggttcgtcatgcctcaccagtctagggacgtaatgctgtttcgcacagcatacgcgccggtccttcacgttccccgccgctccgcacggcagctgaatcactacgagaaatcgtagaacgtgtatcccttatccgctccgctcgtcacgttgagcaatgccttgccgttcagcgtatcgacgtcgtttcctatgagatagccgtctcccgtggcccccatatccgagtcatggtaggagcctgagaaggtgccatccttattgactttcattacggttccccatgcgccgacaccggaaccgaaactatagttacctgccgcctgtttcatggcctctttgaatgtggcgtctcgtttgccgctgtccttggacttgtcaccggtcgtctcaccggaagcggccttatcgccagtgcccttgacctcggcgtccggcagggaatcccagtcgagatcgccgttctgctccaccagatagtagacggtcgaatcgctgggagccggcctcatcggcaccagcgcgttctgatagttattgatactgctgttggtcggcacaaacgggtccacgtccttgccccggctggcgctcacactgatctcgctgtacaggctcttgtcacgaaccagaacgtacgggcggctggtatccacggccttctgcttcttggccttcgccagttcggcggcgtcgaagtaaccggaatcatccaatgacttggcatcggaaccggccgggaagtagaccaggaagtccttcatgtcgtaggtcatgccggtcgacccgttctcagccccggccggtggcgtcatttcgccatcgtcgaacgacgcccgttcatagttgccgttcacgcagtactcgcctatcgaagcggacatcacctttgagccgcagttcggcagacccatgcccgcgtacagctcgaacataccccagtctttcaacagcagatggtttttcatcggcaatttgtccgcggccatgccgtattccgaatccgcttccagcatcgcgccgctgatgtcctgagagaagttggtcaggcccaacacatcggccttgtcttcaggctcatggcctttgatttgcaggtactgataatcctcggatgaagtggagccaaagggattcatcgaggattgctccagtgtgatgcagtccttggcggcatccgtcacctcgctcttgcagtacataccgatcattgcggacgcgtggatgctggccatcttgatgttgtcatacgagttggttttgctcagcacgtccatgttgctggacttatcgatgccgtaatacaaggtcaccgactggccggaactcaacgtggatcccggagccgggtacgagccggaaatcttgcccacgtatttctctgacgagtaatgcggttccaaatccacactgtagccttgcgactccaagtcgctgacggccttgttcttgtccgcaccaagaatatccaccgggataccatcgcccttggaggccacgccaatgtaaatgccgttgtccttctcgccatcggtgagccctacaccgggagccgggtacgtgacgctgacctgcccttccggagtcttgctgtccggcgaaatcacaaccttcttatagtgaatcggcacgcccatattcgcgaacgtgttcgtcaccttgttcacatccttgccgaccgtgcccttcggcacaccgggaccggccgactcctgcaccaccaccgtggaaccggccttgacgcgagcgccaggattcgtgccctcgtagccgaggaacacaccgcgatcctcgccggagaacaccggaaccgtcttcgcgttcaggcccttggccttcaacgcctcggtcacatccttggccttgaccaccgatgccttcttgccgttcttatcggtgacgctggaggcgatggacgccggatcaggcagcgacttaccaccccacacctcggcacgatacgtcaggaataaagccacaccggctacgatcaacgccagcagcaccgccacgagcgcgataatcagcgtattcgggccacgcttgcccgaaagattcggcaatgtggcggttgcggtcgttgtgccgctcggcggcgtggctgcgcccggagcgacaggagcacccggagcggcctgcggcactgctcccggtgcgatcgacccagtatgacttgctcccggtgcggtcggcgctcctgccacaccgctcgatgtcggcacgccgggctgcccataggcgttcccatcgtttgggccgggcagcggcgggtgatcaagcaccgtcatagtattgtccggcagcggcactggaatcgggccggccgccgcctgaggagcaggagcactcacgtcggttagcggcgcaccacagtgcatgcagaaccggcttcccccatcattgtcagcaccacaattcttacagatcatcattgctcttctctctggtcgaatgacgcactatagcctcattctactgggaaatgaacgcgatggaatagtccccactcagccgccaaccaaaaggcgtggtccgtatacacagttgcatgtgcaaatactgcttgtactatttgcgcaacgtgctatccaccgaggcaagcacttggctcatcagctgagcggcacgatcctgaccttggttttgcgtgaccacagagaccgcggccttgttgccattcacctccacgatggcgaagtaattccacgtgttctggatgcccatgccacgatgtgcatgcacggtcatgccgctcggaatcaccacgccctccgaagcaatatcagtgttcatcagaccagtgccaccgaccgcatcaacggcaaccagcatgcgggccgcgtcacgagcggtactgtaattctcatatccagcattgctggcctgtacatcaccgaaatcacggttgaagctggtgccgctgtacccatgggaactcagccatgaattgacagcactccatccgccaagggccccgacagcctgattgccggcactattatccatgccggtcatcatcgtatttgccaatccttccgcattgccgttgccttgagaggcaagatacaccggcagatacaggcctgcggcaacgaacttcttactcgactgcgacgtattggcaatggccgagtcttcagacgacgcatcggcgctgg

SEQ ID NO: 635 - DNA, 16033 bp, Unknown
  R14_15m  MAG No. k141_8733
gccgccctgaccgcccgcatgcactatcaggatgaggccgaccacttggatgtggtggttaaggccgatgggtccgaggaacagtccgaggctgagcccgcacccaagtccgagcccaaggccgcagccttcaagaagaccgagccggccaagcccgaagcccatgtcgttgtcgtggacggtgtgacccacaccgccagctccattctgaccggcgaagcgctcgacaacatgagcatgaccgccgagcgtgacgtgtgcaagctgtgccagaaccactgcaagctcaccatcaccacattctccgacggctcgcgcttcgtgaccggcaaccgctgcgaacgcggcggcgacgccaagaagaagcgttccgaccgcccgaacctgtacgactacaagtacaagcgttgcttcgcctaccgccgtttgaccgacaagaaggccactcgtggcgagatcggcattccgcgcgccctcaatatgtacgagaactacccgttctggttcacgctgctcaccacgctgggcttcaaggtgatgatctccggccgcagctcccacgagctattcgagaccggcatcgaatccatcgcctccgaaaacatctgctatccggccaagctggtgcatggccatatcaagtggctgatcaacaagggcatcaagaccatcttctacccgtgcgtgagctacgaggagaacctcgtgcccaacacggacaatcattacaactgcccggttgtggccaactatccgctcgtcgtcggcgccaacgttcctgagctgcgtgaggacggcgtgcgctacatgcacccgtacttcaacctcgccaaccatgagctcatggttggccgcatcgtcgaagagtttgcgtgggccaacgtgacccgcgaagaggccgaaaccgcggtcaaggccgcctatgccgaagacaaggtcttcaagcacgacgtgcagcaggaaggtttgaccgcgctcgcctacatgaaggagcacaactgccgcggcatcgtgctcgccggccgcccctaccacatcgaccccgaaatcaaccacggcatccccgaaaccatctgctcgctcggcatggtggtgctctccgaggattccatctgcgaactgcagccgggggagaagctcaacctcaccgaattcctctcggaaggcgaagccgacccgcgctccaagaacgccgccggattccgccacgtgggagaccgcacagtcaccaagatgccgttgcgcgtcaccaaccagtgggcctaccactcccgtctgtacgcggccgcacacttcgtggcctcctacccgggcctcgaactcgtgcagctcaattccttcggctgtggccttgacgccatcaccaccgatcaggtggccgaaatcctggcagacaaggcggacgtgtacacgctgctgaagattgacgaggtctccaacctgggtgccgccaagattcgactgcgctcgctcaaggccgccgtcgaggaacgcgaagccaacaaggcccgcgaagccgccgcggccaaggccgtgcaaggccccaagtccaccggattccgcaagaccggctccaccgcgccaacccccggccgccagattctgcttgacagcaccatggccgccaacccgaagctcaccaaggccatgcgcgccgcctccaagcgtgccgccgaacgcgacctgcaggccgcagtcgccagcaagaacggcacttcggacggcaccaccggcgtgacgaacgccaagaacgccaagaagtccggccacaacaacgccaccatgtcccgatacgcgcatcgcgagaagttcgttaaggacatgaagaagaactatacgattgttggccctcagatgagcccgatccacatgtccttggtcgaagcggtgattcgttccggtgggtacaagttcgacatcctgaagcacgcgagccgtggcgatgtggaaaccggcctcaaatacgtgaacaacgacgcctgctacccggccatcatggtcgtcggccagctcatcgacgcgattctggaaggcaaatacgatcccgaccatgtagcgctcgccatcacccagaccggcggcatgtgccgtgcgaccaactacttcggcctgatccgcaaggctttggtcgatgccggctatccgcagattccggtcatcgccatttctacccaggggctcgaagataaccccggcttcaaggccaccctgcccctgctgcaccgtgccatcaaggcgctgattctgggcgacttgctcatgaagtgcctctaccgcgtgcgcccgtatgaggtggagaaaggttcggccaacaagctgtacgagctgtgggacaccatcgtgcgtgagaccatcgagcatcacggctattccaagaccgcagccaagacgccgagcatcaagaagggctatctgccgtataacgtgctggccaaggagatcgtgaaatcctttgatgcattgccgctgcgcgacatcccgcgcaaggtgcgtgtcggcgtggtcggcgagattcttgtcaagtaccagccggacgcgaacaaccacgtggtcgacgtcatcgaatcccaggattgcgaggccgtggtgcccggcatcatggaattcatgaccacccgcccctacatcaccgactggaacgagaagaacctcggcatgggcggcaacaagacggtttacgccctgatgcgcaagggcctcgacctgtacaacgcgccgatcaaggccgcgctggccacatcgaacggcaagttcaagcaggacgagccgatgcccgaactggtcaagaaggctgctgaagtcacctccatcggcgtgcaggccggtgaaggctggctgctgacggccgagattctggaactcatcgaacagggttgcccgaacgtgatctgcgcgcagccgttcgcctgcctgcccaaccatgtgaccggccgcggcatgttcggcaagatccgccgcctgcatccggaagccaacatcgtctccatcgattacgatccgggtgcctccgaggcgaaccagctcaatcgtatcaagctgatgatcgccgccgccaagaaggctcacaacgccaagttcgccgaggccggcgagccgcagggcttcacctccgcggactgatttatgctctggctcgtccgcaattaaggacgagcttcgctcgcgacatgctggttcgcctatcggctcaccctcgcctacggacagtccactgggctgtccgctttacggctcggcctctgtgaggggagctgtcgcgcagcgactgaggggagtctctagagcgagaaaccgggccggagcctgctatcggtttttcgtatagcgtattacgggctttcgggcacgcgcaccggccggctcgaatacgatacaaagcatggttactccccgaatcagttacgcgcacctgctcgccaagccgaaccccaagcacgtcgaaagcctgctcaagttctttgagaatggacgctcccagcggggcgccggcggcttcggcgtggagatcgagcacctgcccgtgcacaacagcgacgacaccgccgtgacctactacgagccgaatggcatcgaggcattgctcaaacgcttggctccgtactacgacgaggagaaggaatactgggagaacggccatctggtgggtctcggccgttccggcgtcgccgtttctctcgagcccggcggacaggtggaaacctcaatcggcattctgaagaagccgagcgacctgaatacggtgtattccaagttccgtcgcgagctcgacccgattcttgacgatctcgacttccgcttggtcaactatggttaccagcccaaatccagctttgcggatgtgccggtcaaccccaaggatcgctacgatgcaatgaccgactacctcggccgcgtgggtcagttcggcccatgcatgatgcgttgctccgcctccacccaggtcagcatcgactacgtggacgagcgcgattccatcgaaaaactgcggttgggcaccgtcatcggtccgattctggcgtacttcttccgcaacaccccgtatttcgaaggtgagacgaacccatggccgttgctgcgccagcgcatgtgggattatctcgacttccagcgcacgaatgtgctgccgagcctgttcgacccgcgctatgggtgggaggattacgccatcgacgtgctgtccacgccgctcatgttcgctgacctgacccatacccctgaagctgtggcttctggagcaagtcccaaggaactgcatcgcccggccttccgcgagaacgcgggggaggtgtacccggaccgcgaactcaacccgtacgagatcaaccacatcatctccacgcacttcaatgacgtacgcctgaagaacttcatcgagcttcgccactgggattccttgccgatcgagcgtgccgaacgtctgacggagattgtgtcctctctgttctacgtgcccgagcatcgcgaccgcttggaaagctacttcgagggcatcagcgaggaagaggtgttcgaggccaaggccaacattcaggcccacggccgcgaagccacgccgtacggccagccgctcgacttctggaaggaattcctggggctggagggccttctgtccgacatccccggagacccgaagcaccccgacgtgttccagaagtagttggggcgatcgaggaaagaagtcggttactatgttgcgcaatggcagattgcttgtggatgtacaactaatctgccattgggggctggtgacgttttgttggactcgtcattgattccatcaccaccgatcatgccacaagaccgagctcgcgtcgacgatccatgatgcccgtgtccgggctccgtcttgatccgcctgtcccggtaccggaccatgtagtcgtcgagcatgtcgatgaacccgtccatcgagacgcccgcgaagctgcgcttgcggaagaactcctgcctgggacggccgaagaacccctccgcggccgcgttgtccggagaacagcctttcgcgcccgtcgaacgcgtcaggttgttgtccgtgcggatgcggatccgctcgggccaccggtagtggcggccgcggtcggaatggatgattggtttctctccgtccttgagcgtggagcagacgtcggcgagcatgccgttggccaatgccgagtccgggctggtgcggcgaccggcatgccgtcatggcagtcgatcacgggcggcaggtaggcctttcccgcggggatggagaactccgtgaggttcatggcccacggcatgttcggccgctcggcgtggaagtcgcggttcgccaggttcttcggcgccttggtcagctcgcccttgtacgagctgtaccgcttcgcgctcttgaacaggggcactaggccgtgcctggtcatgagcctcatgattggattggcaacggtgtgttggacagttccttagaggacgagcccttgttcggtgaattccttcgggctccggtatccgggggtggagtggagccgctggttgtcggactgccacacgtagtcgtcggggtcgcgccccggctgctcgatcgtggcgtagctgttccggtacacgagctccttcttcaacagcctgttcgtcggctcgaccacggcgttgtcataggggttacccttgcgtgacagcgatcttttgatgccgaacacgtcgagcagctcgtcgatcctcgtgttgtcgaactcgcttccacggtccgtgtggaacacctggacgtccgtcagcgggaagtcgagcgtggcgaacgcgcccaataccaggctcgcgtcccgggtccgcccgacggaatggccggcgatgtccctgttcgccaggccggccagcaggcacacgtacgcccacccgttgccgaccctcacgtaggtaaggtcgctcgccaggtgcgtgtgcggggcgtagccgtcgaactcgcggtccaacaggttcgcgagcctggcctcgtcggcccgcgtcttgtgcggttcggaccgtctgcgcgcgtacgcgctcgtcatgccctgttcgcgcatgatgttgccgatgcgtctcctggacgcggtgacgcccctcctttccagagcggccttgatcttcctggcgccgtagcgttcgaggccgtcgcgccggaccgcgcgcacgtcgccggcgatcggatccgcacgctccgtctcgggatgcccggtcatccagtagtaggtggagcggggaacgccccgcatcccgcatcgcgccgatatcgggcagcgggcggcgttggcccgtatcacgcctgccttcgtgcgaataccggcgccgcttgttctgaaacgcccaccccccatctccaaccgccggccacgcctccccggcccggccggctcgttctgctcgggcgtgcggttgtccgcggcccgggtggagccgctgctgcggatgccctggacccagcgctgcagggtcgatcgcgcgatgtcgtactcggccctgatctcccgggatggcttgccgctcccgttacgactgcacgatctgccgtttgaacgcctcatcgtagtggcggggatgcttcgggccggccatcgtcggcctccaacctcatgtcaatcgtccctcatcggaccgtctaatacattatagccaatccacagcgagatcgaatgcggcgcacgcgaccttcccgaactcgagcaacgggccatccaatggatacactcgacaaccaacccaaaacaacacacccaaacgcttgacaatgtataggagcatcaaaacacactggtccgcgtaccacgacagcaacgcgcccttgccgggatggccgagctcgcggatcacgtcggcggcgcagcgttcgtatttgatgtacaggtccacggccctgtcgcgctgctccctgccgtacgtcgccatgaggggttctcctcccggtcagggagtccaagaaaacgtcaccacctcgttgcattgtttttatttgacgtactcacacttcaatgtgtcgggtcgggaattattagctcgataagctgccgccattcctctgcgaagtcgagtgcgcagccgctgctgagccagcgcagttgcaacccgtccatggctcccagcacctgaatcgcagtgcgttccggattggacacatggtctcgtgcagcggcgacggcatattctttcaagacgttcttctcgcgaagctgaaagtactcgtgtgcagggtggtcttcacttaatgcttcaccctgtaatagcacataaagactcactaactgacgacgattggcgttggtttctgctgtagccgtggaaatggttctgagaccataatcgcagtgataagtaatgccgtcattgatatcaccagaaacgccttctacccccaaatatttggcaatggcaatctgattgacgtgatcggcgtactttaacgcttcgaccataagatcttctttattcttgaagtagtacagcaagccagcttcggtaatgccttgggcttgggccacgtcgcgaatagtgaatccccagaagccgaattgggagataaacgtcatcgtggtttcgaggatgctttttcgacgattctctgcgctcatttttttgggggcgtctgttccggtacgacgacgcatgacgttcctttctttggacagcacatagaggcgatattagggtggcgtggataagccgttattcttcgatatgttacgtcctagtaggaacttaacgatatggcaggaacgcgcattcgagcgaaaacatcctctgagattacatgagcgtctgggcgggactccgctcggacgctcatggcctgatttcggaagaggtttgtggatcaggttttgagggggcgtgattacttgccaaagccggcggtcaggcctgcgaccatttgacggcgaccgaagatatatgccgtcagaatgggtagtacgctgatgacgactgcagcaaggatgcccggcacgtcaacggtgaactggccctggaaaagccataggctcagcgggatgacgcggttggatgcgctttgggtaaggatgagcgggaaaaggaatccgttccacacgttcagtgcgtcatagattgccacggtgataatggcaggcttcaccatcgggatggcgagtcgaaccatagtggtgaactcgctggcaccatcgacagccatggcttcaaacagggacagtggcacatcgcgtaggaaattggtcatgatcagtacgctgattggaatagcgaatgccgccgaaggtagaatcagtgcccataaggtgtcatagagcccaatctgaataatgatgtagtacacgggaataatcgtggcctgcatcgggatggccaagccggtgatgatgactttgtatatgccgcgcgaccatgcgtcattgcgacgaacaatcatgtaggagaccatgaacgagacgatcaggataataagcacggtcatgacggtaacgaataccgaatttcccacatacaacaggaaatcgttctcaaacacgcgcttataagcatcaaaagtggggtttgaggggagcgagagcggattctcagtgaaaatatcattctgttgcctgaccgaagtaatcagaatgtaatacaccggtacgatgacggtggcgagccatacccagccaaggaagccgccgagaatgttatattgcttgttcttgatacgaatcatggtcgaatcacacgccttccatctgactttccattttgtctgatcctgagagcttgttcagtagcaacgagatgataatgcccatcgcgaggatgatgacaccgaccacactggctccgcccatgtcgtagcttttgaagcccttcaaatacatgtcgagcggcagaatacgagtggcgttgcctggtcctccctgcgtcatgacgtagaccagatcgaagtaggtcagagaaccaacgatcatcaacgtggaatcagtagcgaatgtgtacttgatttgcggcagcgtaatggaaaagaactggcgcatagggcctgcgccgtcgatcatcgcggcctcatacaggttttgcggaatctggcggactgcgccttgatacagcagagagtgcaacggaataaagcaccaggagaccaccatgataagtacccacagcgcggtatttgggtcgcccaaccagttatgggccagccagtcaacgccgaatgccttgccgatgccgaattgtgggtccaacaagttcttaaaggcaatggccactgcggtggagctgaagagcaggggaatgaagtagaagacggacaagaatgcacgatacttctgtttccccgccataaaaacgccaaggaggatgcagatgggggtttgtacggcccagctgacaatcgtcaggataatcgtcagtcgaagaccgttgaggaccaaggggtcggtaagcattctggtccagttgccgataccgttgaaggtaactgcgccgagaccatcccagttcatgaaggacagtaccaccacaccgatcagcggaataattgcaaatattccgaacagaaccagtgcgggagccgcataccagactgacggtcctttatgcaatacggttggcttattgttagctggtttcgaaaccttggaactcatggcatcctccttatcgtcctatctattgcttcattgcgtgaatcacttgagcgtagagttcatggcatcgacgaattgttccggggtcatggtcttgaggaacacctgctcgaggttgttcagcacggcctgtccttggtcgctcggaagagcaacatcccaagaaagctggtagttcggtgcattcttgacggaatcgtagatccaggtgtaatagccggaaccatcgtcagctgcggcaatcttgtcttcaatgcccttgaccggaggaacttgtccctgttccaacatggcatccaccatggtgtcagagtaattcttttccttgatgaagttgacgaaggtatccttctgcttatctgtcgctttggaagaaagctgccagtagcttgacagatttccggtcagatcgcccatatcgcccttgcctccatcgacggaggggaacggtgcgaaaccaaggtcgtctgcggtgaagctgtcattgatggagatgaggtcggcgtacacccaagagcccatcaattccatacctgcttcgccggtcgcaatcatcgcggtatctttgcggtcgtcagcagtcaacgactggtagttgttgccgaaggcaccggcatcgatgagatcttgaatcatggacatcgcctgggttacggctggatcgctccaagcatctttattgccgtcgagtacaccttggaagacttcaggcccaccgatgcggtccacaagatatgcggcccacatcagatacggccacttgctaccaccggctagggcaatcggcgttttgccggcagcctttagcttggccactgcatcgagtaggtcgtcccaagtctggggagcttcgtcgactccagcatccttgagcacttgcttgttgtagaagaaaagcaccggctgcgcctgaccagtgggcactgcatacagtttgccgtctcggtagccttcggcggaaacggaatcgaacaccttgctatcaatagtgtccttaagatcgctagttaggtcggtaacggccttggaactgacatagtcggtgagaggagagccaccccagctggggaagaaggtcggtgcattgcctgagccgacggcggtacgaatcttctccttgtaagcatcattggcgaagctttcctcactgatctgagcatcggggttagctttgttccattccttgaatgcatttttgatcggatcccatggggaatcggtcattgcccaagtggtgacattggcgcccgtggcctgagtgttgccggtctggccaggcttattgccgcatgcgggaagcgataccaacatcgaagtggcggccagtgctgcaatggcttttgtcattgacttcataaggatctcctccttgagtccatttcctttttgcttaaggtgcatcttccgtcattggaattgtgtgtctccctttttcggaagatggttatactatatacttagtagttgctaagtgcaagtcgcttggtgacatactatgccgaatatcaatggtgagtgctgaaaggaaccaatatgacggacgccgcaaaaatcaaggaaatccacgtcgattgcaatgccttgcaaggaggagatggcgctcgcgacacgccggtgaataccatccaagcagcagccgatattgcccagccgggagatgtcgtcatcgtgcatgggggtgtatatcgcgagaacgtgaatcccaagcgtggcggatacgatgaatattcacgtatcacttacacggttgctgaaggtgagcatgccatcatcaaagggtcggagatactgggtaattgggatctggtcgacggcaccatatggcatgccagcgtagccaatgacgtttttcatggctgcaatccttatgccttgcctctcgaaggtgattggttggaacgtccgtccgattggaaacttagtttgggcaatgtgtatctcaacggcaaagccctttatgaagctcccagcgtggaagctgtgaaggcggcggagcggcgcgataccggattcggccccgattgggtcaatatcactgaaccggtggcacgcccggaggagaccatttatcagtggcatgctgaagtaggggattgcactaccgaattctgggttaacttccatgactatgatccgaatgcggaattggtggagattaatgtacgtcgcacatgtttcttccctgatcgaactgggctgaattatattacggtccgtggtttcgaaatggcgcaggccgcttgtccttgggcccctccgactggtgatcagattggtctgattggcccgcactgggcaaaaggctggatcatcgaaaacaacgatatccacgatgctcgatgcagtgccattagcttgggaaaggaagactccactggagataacgaagcaactcgatgggggcgcaagccagggtatcagacccaattggaaactgtgttcagggcgcggcacaacggatgggacatgggaacgattgggtcgcatatagtacgcaacaacactttgcacgattgcgggcaaaatggtgtggtcggtcatttgggatgcgttaattcgattatcgagaacaataccatctacaacatcggtgagcgccatgaattcttcggtcatgaaatcgccggtgtcaaactgcacgctgccattgacacgcagattcgcaacaatcatttccatgactgctcattgggcatttggttggattgggaggctcaaggcacacgcgtgtcttcgaatgtattccattccaatattcgtgatttgatgattgaagtgacctccggcccgtgcctcgtggacaacaatgtgttcgggtctgattacaacttcgacaatgtggcccaaggcaccgctttggtccataacctattctgtggctcgacgcaacgtcgtgccacgctcaatcggtttacgccctatcatctgcctcactccactgaggtcgctggttatgcctgcgtatacagcggtgacgatcgcatctaccagaacatttttgtgggtggcgatgcctatctgccgggtgtcacctctcgcggtactgagacttatgatggtgcacctactagtgaaaacgaatacatgaagcgcgtacatgcgcagggcattggcgatcttgagctgttcgaacaggtgccgcaaccggtgtatgtggacggtaacgtataccttaacggtgcgcaatcttttgatcgcgaagaacatcgattctctgacaatggtgatgcccatattgtcgtgactgaagacgcggatggttctgtgtggctggaaggagagattccttctggagtattcgaggttgatacctcatatatcgatacggcgaaactcggtgttccgcgtattgtctggcaacattatgagaaccatgacggtacgccgattgttatcaatcgcgatgtgaccggtatcgcacgaggtgcgcatcccgtgcctgggccggttgagtctctgaagcccggttcgaatcgcattcgcctcgcctgacgaatgtgctgtgtataggctggttgtctgctgtgatggcagaacggatgaccagcctatggaaaacatgataaggggttcaccatgaccacatggattgccaccactcaagacaataggctcgtcgatcgttcgggtgaggtaactgccactggcgcaaccaccgcacctgatttgcaactcgacggcaacgaataccaggcgctgcgcggtttcggcggctgcttcaacgaactcggctggctgccgttgcagaccgtcaccgaggcggaacgcgaccagatcatcaaggagcttttcgaccccgaagagatgaacttcacgttcaaccgtgctcccgtgggtgccaacgacttcgccgaccactggtacagctatgacgaggtcgacggtgactacgacatggagcacttctccgtggaacgcgacgaggagacgctcatcccgtacatccaccgcgcccaggaatggcagccggacatgaagctgttctccagcccgtggtccccgcccacctggatgaagcgcccgaaggcctacaactacggccggctcgtgcagaccccggaaaacctcaaggcctacgccaagtatctggcccgttacgtgcgggagtacgccaagcacggcatcgaggtcacccagctgcacgtgcagaacgaggtgttcgccgaccagaagttcccgagcgccctgtgggacgccgaagccctgaaagtgttcatccgcgactatctgggccccgaattcgaagccgccgggctcgataccgacatctggctcggcacgctcaacggcccggaagacatggcgtggaccggtggcggctacggcatgaggctcaacaactacaaccgtttcgtggacaacatcctcttcgacgacggtgcccgcaagtacatcaagggcatcgcctaccagtgggcgggccagaactgcatcgtccgcacgcacgaatcctggccggaaatcgaactcatccagtccgaatccgaatgcggcgacggccagaacacgtgggaatacgcggaatacgtgttccacctcatcaaccactacctcaagaacggcgcgaccgcctacacctactggaacatgattctcgacgaccgggattccacgtggggctggtggcagaactcgctgttcaccattaccgccgacacgcatgaggtgcgccgcaaccccgaatactacgtgatgcgccacttctcccagtacgtgcgccccggcgctaaagtgctcggcaccaccggccacttcaactccatggccatcgcgttccgcaacccggacggcacgattgccgtcgtggtccagaacgcgctcgaaaccgcaatgccgttcgagttcgccgacccggctgacgcctcccgcggcatcaaagccaccctcgccccgcgctccttcaacaccttcgtgatcgactagcgcccacgcccgtatcggtgcgcaggcagggcacaacgccctgtctgcgcaccgctttcgtatgttcggccgtgctggagtgtgtgggccggcgtgcgggagggcgggctgcggatagactggcgggtatgtccacacaagccacaacccggcctaagcgaatccgcaagttgccggaagagcgtcggcaggaaatcctcgatgccgccgtacgcctcatctccgaacgcgggtacaacggcacctccatacaggacgtggccgatgcggtgggtgtcaccaagcagggcgtgctgcggtacttccccagcaaggacaatctgctcgccgcggtgtaccacgagaactacaacatgtccggcgacatcgaggacttcatgactaccggtctgcccggctccacacccggcgacctgcggctgcccgcctacctgcggttcctagtgtggcacaattccaaacgccccatgctggtgcagctgttctccatcctgcaggtcgaatcgttcaaccccgaccacccgctgcatgacgaattcgcgggccgtcgggattcgatatggcactactattcgatacacgactggaacctgcctcccgaattcgactcgttcgaggagatccgccccacgttgcgccgcgccctggagatcatggacggggtgcagttgcgctggttgcgggtgccggccatcgatctcaacgacgaatgggctgatctggagcccatgatcttcccctcgccgctctgggacgggtaccgctgagctttcttgcgataggtgggcgttctggtgcttgcaggatatctaacagaaattagattgtcagaaaaccgtgtattcgcagcgtgtttcgtcattaggcatgctaaactaccaatcggtaactaaagaaccgttcgatttcaccgaagaaagcgacaccgcatgaccgacaacaccgcaacctccgcaaacgccgaaaccatgccgtacaagaaccccgccctgcccgccgaggagcgcatcgccgacctggtcggccgcatgaccctcgaagagaaggtcggccagatgatgcagctcgacgcacgcagcggcgacctcgaagacctcatcgtcaacaagcacgtcggctccatcctgcacaccagcccggccgacctgccgcgcgcggtgaagatggtcaacgagcagacccgcctgaacatcccgctggtcatcggcgacgactgcatccacggctattccttctggcccggcgccacgatcttcccctcccagctcggcatggccgtcagctgggacgccgccaaagtcgaagccgctggccgcgccaccgccgaagaggtctcctgcaccggcgtgcactggacgttctccccggtgctgtgcatcgcccgcgacacccgttgggggcgtgtggatgagactttcggcgaagacccgatgctgatcggcgaactcgcctccgccatggtcaagggctatcaaggcggcgccaaggccggcgaggccctgccgaagaacgcgatcctggcctgcgcc

SEQ ID NO: 636 - DNA, 23554 bp, Unknown
  R14_15m  MAG No. k141_8783
ggccgcaacggcttcacgcctgcagggttcgccgccgcgcttgccgagctggtgccacttgccaaggaaggcgtgttgcatatcgtcggccagtggagtcaccttgccgtggccgattcgcctgacgtgcctgagttcgtggcctccaccgaccgccagatcgaaacgtttaaggacttcaccgcacgtatggaaaaggccggaattccgccggagattcgtcatctggccaacactgcggccactctggatcgcccggaaattcatttcgagctcacccgccccggcatcgggctatacggctacgagcctgatccggccatgggcaccccgcgcgattggcatctgaccccggccatgcgcctgcaggcgcagctcggcacggtcaaggatgtggaggccggccatggcatctcctacggccgcacgtacctgactccagacaacacgtccactgccatcgtgccattgggctacgccgacggcatccaccgctctgcctccggattcgatatggaaggtgccaagcatgtggagaagccgggcgggccagtgcgcattatgaccaccgagggcccgaagctctaccgcgtctgcggccgcgtgtgcatggaccagttcatcgtggatttgcacggttccgccgccgaactcggagttcacgagggcgacacggtcgaactgttcggcccgggtcgtggtgagcagtttgtggagcccactgccgacgactgggcccgtgccgccgataccatcagctatgaggtcttcacttgcctgcgcaatcgcattccgcgtctctacgagcacgccgccgaggtgctgcccgctgacgacctcgccaagctcgatccagccacgctgctgtaacactgtacggcagccgatatatgggcctatgcttggactatggaaacaacgcaagatggggaacgggtgctgagcgatgagggctacagtgcctttgatgaagagcgttgggcacctgaaccgccgaagtccaaagcccgtaccgcttttgagcgtgaccgcgcaaggctgatacattcgtccgccctgcggcgtctcggcgcgaaaagccagattctgattgctggtaccgatgatttcgctcgcacccgcctcacccacacgctggaagtcgcccaaatcggtcgacaaataggcgcaatgcttggctgcgatcctgatgtggtcgactgcgcttgcctggcccatgatcttggccatccgccgttcgggcacaacggggagcgggcgctcgccgaaatcgcgcgcaatattggcggattcgagggtaacgcgcagaccatgcgcattctgacccgtctcgaacccaaaatcttccatccggacggccgttccgccggtgtgaacctgacccgtgcagctcttgatgccgcggtcaaatatccgtggactttggctgaggccgaccagcatcccaagggggagcggtccaagaagttctgcgtctacccggatgatgagcccgtgttccgatggttgaaaatcggcgcacctgtggctaccaagccgatggaatgccagatcatggatctttcggatgacatcgcctattcggtgcatgatgttgaggattccatcgccactggtgccttcgacccgattgtgctcgccgattcacagattttggaccacattatcgagcagacgcgcgactggtatgggaccaagtgggatgcggataagctgttggcagcattcatgagactcaggcgtgagcatatgttccctgcgcatttcaacggatcacgtcaagctttggcgcagttgaagaacatcacctccgacttgattgggaggttttgctggtcggtggaaaccgccactcgcgatacgtacggaccgggaccgttgacgcgttactccgccaatatcgtgattcccgaggatacgaattacgagattgtggcattaaaaggcatcgccgtgtatttcgtcatggcgccgcgtgagagggagccgttccaccaggaggaactgaaaatcgtcgaggacctgatcgacgtgctgatggccgattcgccgcagccttccgacgcgctggaaagccagttcctggccgattggaatgagtccaccaacgacaatgaacgtttgcgcgtggccatcgatcaagtggcgtccctaaccgacaattccgccttggctctccattccatcctgtgctgaggctgttccgtggcgggcaccctcagtcagttgcgctgacagcttccctccctgagagagctatgacctatcccttggcttccctcgggtgaggagagctgtctccataggcgagtgaggggagccaagaaagtaacggtacatatctaccgtgtctcacacgtggcgctactctagagacttatggtcggaatgattaagaaggaagacgttgagaaggtgcgcgccgccgcggacctgtatgacatcgtatccgcgaccgtaacgcttaagccctccggaaccggcacattcgtcggcctatgcccgttccacgacgagaaaaccggcagcttcaacgtgcgcccctcgctcggcgtgtggcactgcttcggttgcggtttgggcggcgacgtgttcaaatacgtcgaacaatccgagaacatcgacttccgtgaagccgtggaactactcgccgacaagtaccacatcgagctgcactacgagaacagcggcaacgggccgaaccgcgaaaacgccggctccaagcgcacccgactgctggaggcctgcgaggaagcccagcgtttcttcgtctcccaaatcctgaccaaggaggcattgcccgcccgcaaactgctcggcggccgcaacttctcccaagccgactgcgaacgtttcggctgcggctacgcgccgcaaggctgggataatctggtccgccacctggcgaacaagggcttcacgcaaagggagatcctcgacgccggcctcgcccgccaaggccaacgtggcatgtacgattatttccgcggccgcgtgacctggcccatccgcgattcgaccggccgcacgctcgggttcggcgcgcgcaagctgtatgaggacgaccagatcgccgccaaatacatcaatacgccggatacgcagctttaccgcaaaacccaggtgctctacggcatcgacttggccaaatccgccatcgtcaaaaaacggcaggtggtgatagtcgaaggctatacggacgtgatggccatgcacttggccggcatcgacaccgccatcgccacctgcggcaccgcattcggcgccgaacacgccaagatcgtgcgccgcctgatcgccgacgattcactgggtgcggtgcaattggttgggccgttgaaggtcaaggaccagccgttaagctcgcgcatcgtgttcacgttcgacggtgacgccgccggtcagaaagccgcgctgcatgctttcggccttgactcggcgttcctttcgcagacttttgtggccgtggccgacgacaatctcgacccgtgcgatctgagaatcgagcgtggcaacgaggcggtgcgttcgctgattgcccgcgccaagccgctatatgatttcgtgattgacgctgccatcaatcgtttcgacctgacttacacgcccggacaggtcggcgcgatgaaagccgtggccccgctggtggcacagattcgcgaccgctccctgtgggatgcctacgcgcgcaaatccgcaggacgtatcggcgtggaccttgaggtgatgcgccgcgaggtgatgaacgcgcgccggcagatgcacgtgcgcgatgaggacgcctatgcgcccaagcgtcggttcgaacgtgacgagccgcgtgtggaacccggcaccaacccgtacgccaatccagccacgcgcaaggctctggagcgccgtgatgccgccgaacaggcatacttcaagattgatgatgccgtgttcatcgccgagcaacagttcatggccacactgattcaggtgccgcgtgccatcgaccgtaccatgttcggccagttgaccatcgaccatttcatgacttcggtgttccgcaccctgtttcaggtgattgcggccgccggcggactgccgtccgacgacaccccgcagggtctgtggatgcacaacctcatcaaggccggtgggcctatgttgaatcaggtcatcaatgagctggccgtcatgccgttgccattgcccggcgatgacactggcaacggtgcgcaacctgcgcagcctggcgtgcccggtggcgccggtgcgcccagtgccgccgccgtacagctgcgtcccgccgcgccagaagagcagcgttatgccactgaactcctcacccgactgctggacatgggcttcatgcgccagatcggtttggccaaacgccgcatggcccagctgcccgacggcgaagagaagataaccctcctcggccagatcacccgcatggaaaccgcccgtaaagacctccaagcccaaatctacggcaacaccgtcggctaatacctcccactgattgcgcgcatcttcgaatacgtgccggatgcataaggccatacaaccggttgccggattggatgggtgcagaagttgcagattggccccatccaaattggactggtttgggtggggccaatccaatccgttcaataatgaagcgcgataccaagcagcgtcgaacgaagggaaactcatgacgcagaatcgtgcggaactcaaccgtaatctggcccagatgctcaagggtggcgtgatcatggacgtcaccacgcccgaacaggcgaaaatcgcgcaggatgccggcgcgtgcgcggtgatggcgctggagcgcatccccgctgacattcgtgccgccggcggcgtctcccgtatgagcgatccggccatgatcaagggcattcaggaagctgtctcgattccggtcatggccaaggtgcgtatcggccacatcgccgaggcccgcattctgcaggccatcgacatcgactacatcgacgaatccgaagtgctttccccggccgacgacgtgtaccacatcgacaagaaccagttcgacgtgccgttcgtgtgcggcgcgaagaacctgggcgaggcgctgcgccgcatcgccgagggtgctgccatgattcgtaccaagggcgagcccggcaccggcgacgtgattcaggccgtgcgccacatgcgcaccatgaacaagcagatccgcgagctcgtggccttgcgcgacgacgaggtctacgaggccgccaagcagctggccgtgccctacgacctggccaagtacgtgcacgacaacggccgtctgcccgtcgtgaacttcgccgccggtggcgtggccaccccggccgacgccgccctgatgatggagctcggtgccgaaggcgtgttcgtgggctccggcatcttcaagtccggcgacccggccaagcgcgccgccgccatcgtcaaggccaccgccaactggcaggacgccgatctgctcgccaagttgtccgaaaacctcggcgaagccatggtcggcatcaacgaggacgagattcagaccatcatggccgctcgcggcgagtgacgggagtcgaagccggagaggacaacatggttgtagctgttgaatatatttccaaagaagagtccgcggacgtcgaaaacgtcaagcacggcgtgaccggcatcctggccgtacaaggcgcattcgccgaacatgcggcggtgctggacaagctcggtgcgccgtggaaactgctgcgcgcggccgaggatttcgatgaatccatcgaccgcgtgattctgcctggcggcgaatccactacacagggcaagctcttgcattcgaccggactgttcgagccgatcgccgcccacatcaaggcaggcaaaccggtattcggtacttgcgccggcatgattctgctggctaaaaagctcgacaatgacgacaacgtctactttggcgcgctcgacgccgtcgtacgccgcaacgcctatggtcgtcagctcggtagtttccaggccaccgccgattttggtgcagcggatgatccgcagcgtatcacggacttcccactggtattcatccgcggaccgtacgtggtgtcggtcggacccgaagccacggtcgaaaccgaagtcgatggccacgtggtgggcttgcgtcaaggcaatatcctggccaccgccttccacccggaactcacggacgatacccgcatccacgagctcttcctgtcgctgtagtcgattcgtctgccgttagactggtatccgactgacgaatcaaggagacgatctgccatgcagcttgagctgaatcgacgcagcaaggtgccgatgtaccggcagctggccgccgggctgcgtgaacagatcgtctccggcgcgatggccgagggctaccgcctgcctcccgaacgcgagctgtcctcacgtctcgaagtcaatcgcaccacggtgttgcaggcgtatcagcagctcaaggacgaaggtcttatcgcctccaaagtcggcaaaggcacgttcgtgctgccggctgcctccgcaagccgaacaccgcacacgtcaaacagtgacttcgggaatgcaataacgcgaacaacacgatcgtcggcagaaatgggaacatcgcaagcctcctcttccggcgacgtagaacgtgctacctccactgatttcttgacgacggaccagggcagcagctctgcggcggtccatacgattcgtgaaagccgctcggttcagggcccggagccaaccgtcgtgcgtccgccatggtcggtgttgttctctgattattccaaccggtttacctaccatgacatcgcctcggccgagcgggcgcagcgcggcgacaccattattgatttcgccaccggttcgccgaacccggcggatatcccggacgatctgctgcgcaaggtgagcatcgaggcgttcgaatcgcgggaattcgacggccaaccggaatcacctatcgagggattcgaagagttgcgtgcgctgcttgccgaacatatgcgcacacgaggcgtacaatgcggcgtccgcaacgtgatggtgctctccggctccgagcagggcatcgacctcatcgtgcgcgcgttcatcaaccccggcgactgcgtgctggtcgaacaatccacgttcttcccggcattgcagaccttccgctcggcggatgcgcgcatcatcggcgttccagtggacgagcacggtatgcgtacagacctgttggacggctattgcgcgcgattccggcccaagctcatctacaccgtcccgacgttccaaaaccccaccggtaccacgctgccgcccgaacgacgcagcgaactcatcgacgtggcgcggcgctatcagtgtctgatcgtggaagacgatgcttacggcgatttgtggtacggcggggaatcgtccgacgcacatcgccccataccgcttaagggcatggagaatgcgggatacgtgatgtatttgtcgacgttctcgaaaaccgtcacttcgggcctgcgcacgggatgggttgtggccgacccgcatgtgattaaccggctggcggctctgcggcgcatggtcgaccagcatacgagcacgtcatcgcagcgcatctgcctggaactgcttaaagaaggccgcgtcgccgaacatttgcgcggtttgatcaaggcttaccgcattcgacgagatgcagcaatcgcagcattggagcggtatgcgccggatgaagtgtattggaccgtgcctgcaggcggctactatatttgggtttccttaccggacggcgtgcgctctctggatgtattggaatcctgccgttcccaaggcgtcacgttcatgccgggcagcgtgttcgacgttgacgaaatggatgattcccacatccgtctcaactttgtgcgcccggatgctgctgacattgataccggcattcgaatcattggcgagacgatagcacagatgtagccaagtgactggctcattgcggttgtcgagttttttgatggctgcatacccacatcgatgggtgcattcgacgaatgaataagcgaggaagccatcatcagttcgctgtggcatgcgcatagcgttgtcgggcgaacggggcagaccacgtggtcgttgcgtgacctggccgatcgagccggcatcgcattgcccctggcgtagtggcgaggtggcgcagtaacgagtcacgccatcgcgagccgatgatgcgaaatgcggaaccggtcgcggccatcaacgggtatcatacatgcgggagcaacgatacgttggcgtcagcacatccatctgactccagaaagggacacgatatgaccacatcctccgtttcgccggtgaccactgaactggcgggcagcgaaaccggcatcacgcttatcattcacgccggagcgggcagtcgtggcaagcacagcacgcctgaacgcatcgcccaggtcgaacttgatctgcagcgcgccctcgatgccggataccagttgttggaatccggagcaccggcgcatgaggctgtggtcgccgccatccacgtcatggaagacgctcccgaattcaacgccggccgtggtgccgccctgaccagcgatggcatcgcccagatggacgcctgcctgatgaccggcgatggcgaggtcggtgcggtcaccggcgtaagcaccgtgaagaacccgatcgatgcggcgcgtgccgtcaaagagcagaccaagcatgtgctgttcgcggacccgaccgatgccgagatcgccgattggggcgtcgcgaccgaaagcaacgagtacttcatcaccgaacagcgtcgtcagtccttggccgaggctcagtccggtggcgatgagtgggagaagcatggcaccatcggtgccgtggcgcgcgatgccgagggcaatatcgccgccggcacgtccactggcggcatcaccaaccagatgcacggtcgtgtgggtgattcgccgctgcctggttgcggcacgttcgccaaccagtccacggtggcggtgtcctgcaccggcatcggcgaggcgttcatcaaggtggtcgccgcccatcaggtgtcggatcgtgtgcgtttcgccggcgagaacgtcgaggatgccgcgacggccactttggacgaagtcgccgcgcatcatggcgatggcggcatgatcgttctgccggcggtcggccgtggcgtggtcgcctacaacagcgagatgatgaacttcggataccgtagcgcgcaaggcggtaaggtgcagggctgattgccccctgtattgcggcatatatcataatggccggtgtgctgcggattcttggtaaggaatccgcagcacaccggccattcatgtatgcggcgagtgccgccgatcagtgcggcggtgcgcgctactcggtgatcgtgttgtacgtgggcatgttcgtgtaatcgaactgcacgttcttcacgttctgtgcagacacggcggcgaaacgtttgaccgggaatactggggtaatacgcaacttcatcgctcctcttcctcgaatgaaactatgttccattggtttgagccagccacgtacggtattcgtgtctggcctgccacacaatgatgcagccgtatatacgggcacagcattgcgcggcagttcattgtatggaagacatgcaaactcaatgttttcttgtccaaataaaaaaacgagcgcggctgatgtgcggcaccggtcaaaaaactcatgtccgccagcgcaacgcgactacgtaccttatgccggtctgcgcgtagaatagaacggctgcgatattgggttattcacggaggaatggatgcgacgctggctgatcaatgtagccaaaaatgagacgattctcatcgtcgccgcaatactcgccctgatttcgtgtttcattgtgccgccggacgccgattacaaaagctacattcacgccagcaccatcagccagctcatctgcctgatgattgtggtgtgcggattccagcgtatcggcgtgttccgcatcatcggttcgcgattgctggagaaggtcagcaccatgcgcggactggtcattacgcttgtcgctttgacgttcttttccgcgatgttcatcaccaatgacgttgcgctggtcacgtttgtgccgttcgcggtggccgtgctcatcatggctgggcaagaggataagaccatcctcgtggtcacgctgatgaccattggcgcgaacgtgggcagtatgctcaccccgatcggcaacgcgcacaacctgtatctcaaagccctgaccggcatgccgaccatggaattcctcggcatcatggcaccgtattccggcacggcggccgtgttgctggtcatcgtgatttccgtggtgtttggcggcaaaccggtcggcgacctgggcgacctcgaaaccggcgtgctggctcccgagcgcaacaaacaccagcccgacgagattcgtatcaccggctacggcgccggttatggcggctggcgcaccatcgtctactcgctgctgttcatcgtctgcctactggccgtctccgacgtgattcccctgtgggtgatgtgcgtgatcgtggtcgtcgtgttcctgttcaccgatcggcgcgtattcaaatacgtggattggggactgccgctcaccttctgcatgttcttcatcttcatcggcaacatgaagcgcgtgcccgaattctacgaactggcgcgctcgctggtcggcggccatccgctggaggtggcggtcggctccagccaggtcatcagcaatgtgcccaccacgattctgctttccggcttctgcgaccaatggcgcgatctgatcattggcaccaatttgggcggcatgggtacgctcatcgcctcgatggcctcgcttatttcttacaagaacgtcgtgcgccaatacccgcacaagaaaggccggtatctggccgtctactccgccgtcaacgttctgtttttggccgtattgctgaccttgagctggatcatcgagccgagtctctgagccgccgttgtgggttgggccggtctaccgcgcgtatacggtgggggagccggtcagtcggctcatggccgactgcgggatgtcatgaatgcggccgatggtggcatccagcgtggatacgccggatacgccgtctgtgttggctgtggtggatgcagaggtgatgctggatactccgactgcggacgatgatacggccgcaaccatcggctgacgataggcgttggagttgcgggccagccgggcgagcgcagggcgctgcctgcggaacagattgataaacataccgcatactccttcatcgttggccggcggtcttctggccgccgtggtttccatcctgccctcccgtgcttgtattcgctatgggggatagcccctattattccctgaatctgcacgattccccctcatccttgagggtgattctaacggcaaaggaatcggcctaatggccgatgccaatcagcgcgaagccaccagcgtgacgctgtacggcttgatcttcatcgccagcaatgaagacggcgacggcaatgtgtaagcccgacgttccggcacaatcgcccccgaagcctcgccgcggtatccgatagtagttttcgccgtcggactggcgcttaacgtcgtcacctccaaacgcaccggtcgcgatggcgaggcgcccagcccggccagtccgcgcgcgatttccaacgtcacatccaccggggaatcggaggtattgacgattttgatgtaacggcaggcgtcatccccgtcatgcccggtggcactgacatacagatgtttggcggggcgtgacgcggtctgctcgatggatacggcatacgtcgtgtcgcccagatgcgtggaaaacagccgctccacctcataattcaccgtggggttcacatgcgccggattgaattcgataagattctgcgcccaccccttagccgggatatgcgcgagcagcggtgcataggaggtcatgcgcaccacgtcggaattgcgctcgcaaccggtcaggaacgcggcctcgccgagtgccgacttccacgtgttcgcgccctgttcggtctgcggttggccggcaaaatagccgttggctgaatattcgccgaaatagacgccggcgccgcaacgcgggtaagcgtcgaatcgtgacgcttggtatgcaaaccattcgggggagtggtaagaatgttcgtcgacgataatcgcgtcaccggtggcggaatcatgtgccccggaatcggttgcggccaacgctcgcgcatggtcccagctgcgtttcatcgtcggctggaaggggaacagtccggcgctcatcacacacagcatatccgggtatcgttcgtgaatggcctcgctgatcatgtcaaacttggccacgtagtcagccccgaagttttcgttgcccacgccgatcatgtccaggccgaacggttctggatggcccatatcacgccggaccgcggcccacgagctggactccggatcgccattcgcgaattcgatgaggtccaggtagtcctgaatcacattgttgcggaaagtggccgaattgatatccatgtggcgcggatcgcggccgggcgactggcatgcgatgccggcgaacagagtgggcagcggcttggccttgaggtcctcgcacaggcagaaatactcgtagaagccgatctgatagctctgcgaatagctggaaccatccggcatcttgaacgaccacatcgaatactgttggcgtcgcgcggccagggagccgacggtatccttccagcgatattcattgccgggcgtcacaccttcgacgatgcagccgccggggaatcgcagaaacgctggatgcaacgcctgaatggtttccaccagatcgcggcgcagcttgccgtaacgccatttcgggtcgcccgcgccccaatagtccgcatccatgaactgcaccagatccagatcgaacgtggtgcgttcgccggcgtcaatggtgatacgcagcttgccgtaatcggtgttcaggccggttacgtcggcgttgaaccggtaccagccgtcacggccgatggcgatggcaccatccgacgaatccggactgatcgaaacgccggaatcctgcgcattggcgccatcgtcctgcctcagaccggtctcttccgtatcgtcaagcggatctgcgtccacgatatacgacaatcgagtggtgctggtgagcggcagaccgtacctatcgaccacgccgacggacagcttggcccgcccatgaaccggacgtaccgcgagactgacggaataggtgtggtcggcgacgatggagaacgcgggctcgcccccgttgtcgccgcctccgttatagccgaggttttccagatatgcagggccggtttcggaaggaacatcggacgtgatgcgagcgtatcggctatgtgcgtgaattggcggggcggggcagtcggtggtcacccgctggccgtgaatcccgcgtatctcactgccgaggctggcggcggaacagttgatgaaatcccagaaacgcagggaatcggcctgtgtacgccatcgttcggcgccggccatacgccacgtgtgatggtcgagatagacgccgtcaaaactgtagttgttcaccatgttggcgttcagcccgccatccgcaccatggttgatgtcctcgaagaacacgccgtacagccgcccgcttgtgtgatgggtggggcttcccacgctaatccgcaccatggttttgattgtagagggaatggagcggaaaggtaaacggaagagttcgctcaccgttcatgttgcggtcaatccaagtcgactgttcgccggtatacagccggtaccctcgaaacaggaatggaaaatacggacgactaggagcgcggctgtgcaatcctcggtgggaatacgtgagcgcatcgaccacgtgtatccgtcgctgcgtccggcggagcgcgccgtggcccagtatattcgggatcatatcgaggaggcggccgacctgaccgtcggccagatggccgacatcgcccacgtcagccagccgacggtgattcgtttcgcccgcaagctcggtttcggcggttaccgtgaactgcggtacgtgttgcgccatccggccgccgagcacaaagtgaccttcaatccgttggctggattcgatctgaatccgtgggatggcgaagatgagattcccggcaaagcggcctatgtcgcgaaggcgctgatcgatgagctgcacagtgcgttggaccccaaggcctatcgcaaggcggtcgccctactcgccgaatcggagttcatcgatattttcggcgtggagaactcgttgacaccggcgatggatctgttcaccaagctcggctatctgggactgacatgccgtctcaataccgacgcttacctgcagcagatcggtgccgggcacctgccccacggcgctgtggccgtcgccttctcccattcgggcagttcggcggatacggtcaaagcgttgcgattggcgaaatcgcatggcgcgaaaaccatcgccataaccaatgccatcggcgcgccgctggccagctgggccgacgtgacgttgctgacgggtcgtgactcgcacacgatctatggcaatgcgattttctcgcgcgtggccgataccgcgctcgtggacatgctgtacatgggcgtgattctgtccgactacggccggttctccaccgcgctcgacgaatccggtcgcatgattcgcgatcgcgtattcgagaactgagctgctgctttatcgcgccttgggctgtattgctctggtcgttgccgctttgttgccgctctggtcgttaccgtcctgaggcatgtgccagcgaatacgtagtggacttggcgtgcgtatgacgttcgatcttgccgctcaactccagctggtccaagagctgcgtcatctgatccttgttcaggccaagcgctttctgcatggttttacggctgagcttcacgccgcggaacgcgaggaaattgagcgtgaactgctccaacgtttgaggcgacggttccagcgtcgctgtatcgagcgggcgggtactgacctggtcgtcaccgtccgggcgctcgccgaatccactgccgagaatcagcgtctgcaatggcgcgcagccgatgatgcgtgcgccggccaaagcatctgcggcgttatccgtcatgcgctgaatcgtggggaatgaatacattttggcgcgctgcgcttcgtcagtggtgctgggcgcggcggaagcatcggtatcggtccgatgcaaggatgcggcctcggccgagaccgggatgggcagcaccatcgccaccgaagtggggcctacgcgcagttgcggactgaccgcgctctgcgcgtaggcgtccataatgcgttgaataccggtaccgcagttctcgcagaggcccagatcggcgaacaattcagccaaacgcggggtgcgtggctggcatacgccgttgagcagatcgttgatttccaaaccatcggtcaggccgccgagcgagacgatttccaggcgggaatcgaagatattgatcagtgtggggccggagtacgtgtaatcgcgatgttccagtgcgttgaccaatgcttcgcgcagggctatggccgggtgttggccggattcgttgatgccgttcagcagggcgctggcttggtcgagctggcgcagcaccgagccggtgaatgtgtgacgttcgcgaatggcgtttttgccattgccctcgaaaatggtggccttgataacgaacgggcattggtcggacagcagggtggcaagcgacgattcggtggcgctggtgaaggtgttgttggcgccggtgttgatgatgctgccggcgggggcattgccggcatcggcagagacggatgcagccatgttggtcacaaccgggctttcccaatccctgccttcactggcaaaacgaccctgtgcgtatgtgaaagtgagctcaccactatcgcctgcgacggtctggcccgatgcggcgtgatctacgttgctctccgttgtccccatatcgccgatggtaccggtgcaagccgacgttacgccgaggtgttttacacccctacggctagacttacatgagtttggccccgtagctcagctggatagagcatgtgacttctaatctcaaggtcgacggttcgagcccgtccggggtcacgatgcaataaacccttggtccctcatcgtctgtgggggccaggggcttttgagtattatgccggtctgggtccgtctggagcctgaactgtcgaccttgagattagaagtcacatgctcatcatcaccatccgggaacacccttaaggggtgcggctcctgcataacggctatactctgacttgagatgtgctggataataaccagctatcgcgcgtccgccaatggcgacgaacgaaggaagaagggcccgtgccgcgagcaatcatcgaggtaagaaacctacgcaaggaataccccgtcgaggatgagacggtggtggcgcttgaccgtgtcaatctcagtatcccgcaaggccagatctgctgcattttcggcgaatccggctccggcaaatccacgctgctcaaccagttggccggcatggaaaaaccgacgcgcggcggcgtgcgcatcggcggcgtacccgtcagcaaactcgacgagcgtgagctggcggccttccgccagaagcatctcggcttcgtattccagtcgtacaacctgctacccaatctgaccgcgctcgaaaacgtggcaatgccgctgatgttccgcggagtgcccaaggaacagcgcgagcgcgcggcgcgtggcgtactcaaacgagtcgggctcggccatcgtctcagccattacccgcgccagatgtcgggcggccaacagcagcgcgtcggcatcgcccgggcgtttgtgaccaagcccgaggtggtgttcgccgatgagccgaccggcaaccttgactccaaaaccaaaaccgaggtcatgacgatgatctgcgcattcgcccatgacttcaaccagaccatcgtgctggtcacacacgatccgcagatggcctcatacgccgaccgcattgtcaccttgctcgatggccgcatcaccagcgatcggctcaacaccgacctttcccacccaactgttccgtccacgccgtccgccccaactacaccgtccacgccgtccgcccatagaacccaaggaactgaccgatgaagcacctctcccaccacaccatcgccatcatcgtcgcgttgctctccacgctgtcactggcacttgccgtcatctcccttccgcatcaggcgtacgcggtcgacggcacagacggcataagcggcacgaacagtacgtctcagggaagcgacggcgattccgcgccgatcgccggaccggtgcccaacatcatcatcaccaacttcgcgtatggaggtgattccgtggccgccggatccaaattcaatctcgacttcaccttccagaacaaggggcaggtggcggtgacgaacatggtcgtcaccgtggacggcggcgagagcttcgccatcgcgggaggcacgaacacgttctacgtcgacgcgctgtgggccggttacgccatgacgcaaagcgtgccgatgcaggcgctcgcctccgcgaaaagcggtgcccagtccgtgaccgtgaacttccgatacgagtatgtggacgccagcgcccgctcctcaagccagtctgacgtcaagatttccgtgccgatcagtcagcctgaccggttcgaaatcagtgatcccgtagtgcccgaccaggtgatcgccggccaggaaaacacggtcacgatggaatatgtgaacaagggcaaaggcgatatcgccaacgtcgaggccacgatggagggcgaaggtttcgatgccacgatgaaaacccagtacgtgggcaatgtggcttccggcgccaccggcacgattggttacgccttcacaccgcacgcgtcaggcgagctgaagaccacgctcaaagtcacgtacgaggattccgacggacagaccaagaccaaggaattcccgctcaccatacccgtaaccgatatgcagccgatggatgattccggcatggccgatccgaacatggaccagaacgccaatcagggattgccggtgctggtgtatgtggtcatcgtcgtgatcgccgtggtcattatcgtggtgattgtgctgctcgtgcgtcgcaggcgcaagcagaaggccaagaagaacgatattgatgaggactgggatgattggtccgaaggcaaggatgataagaccgataccggcgtgacggatggtgctgcggcagacaccgctcctatcacaccagtcaccccagcctcatcagtcgcaccagccggctcatcccacaaggcctgaaaggcccgaccatgcgattcggcgacatactgcggctctgcagacaaaacctatggcggcgtaaatcccgtacgattctgaccgtgctgggcgttatcgtcggctgctgctcgattgtgctcatggtctctttgggccaaggcattaacgagcagaacgagaagatgctcaaatcgatgggcgatctgtccatcgtcaccgtgtacaccaacggttatgccggtccgatggacgatggcggctcgtccaagatgggcgataccaagctcgacgacaaggccgtggaatccttccgcgcgatgagcggcgtatccggcgtgacgccgatgatgaacttcccttataacgtgacggccagagccggcgcgggcggccgttacatctatgattacgtgcagatcatgggcatcgacatgacccagctcgaccagatgggctacaagctcgtcggtggcgagaaaccggtcaaaaaagaccaggtgcttgccggcgaatggttcgcctatggtttcatggacaccctgaagaacggcgaacaacgcaccagcacacgtggcggtcagtattcctcatgcacgtttaaccaggccaccggccagtgcgaggaagatcaggacgaagatccgttcttcgacccgctcaccacgcaaatcagtctgaccaccggcaccaattatcagggcgaccagtacagcatgaacatgtacggcggcggtggcggcggcacaggcggcgcgggcggcggtggcggcgcaagcggcagcgccgcgggtcagtcggaaaacgtcaccctcgatgtgcgggcttccggcattgtggcgggcgactacaacaagggctatgccacctccgacggtctggtcatggatttgcaggcgttgaaggaactggccgccaaagtcgatccagccgccgccaaaaaagccaccgcctatgatcaagtgctggtcaaggccgccgacctcaagtccgtgcccgaagtcgaatcacagatcaaagcgttgggctacgagacctcctcctatgaagacatgcgtaagtcgttggaagaacagtcgcgcgcgattcagctgattctgggcggtatcggtgcggtttcgctgttggttgcggccatcggcatcgccaacacaatggttatgtccgtaaccgagcgcacgcgcgagatcggcattatgaaggcgcttggctgctacgttcgtgacattcgcgtcatgtttcttgcggaggccggcgcgatcggattcttcggcggattgatcggctgcgtgctgagcggactgatatcgctgggcatcaacgttgtcggcgcgttgtatgcgggcggcatgagcggcggcatgtctggcggtatggtcagcggtgccggcgggggctccggcgacggtaccggtggcggaacatctatctggaccatactctggcaggcgatagttggtggcgagaatgtgacccgttattcggtgattccgtggtggctgttcctgttcgccgtgctgttttccacgctgatcggcttgctgttcggcttcggcccggccaataaagccgttaaaatcccggccctagacgccatcaaaaacaacgagtgatcgcctctgtcacctgctccaccgttagtccataacgttcgttcagttcgcccagcgacacgcggtcggtaaattccttggctgcgccgaagttcagcacacgaggattacggctgccgtccgagacatgatgattcgcatagtatgcggtcactttctcgccccagccgccttcaagctgcccgtcttcaagggtgatgacctgctggtggccatcacgcaacgactccagtacgtctgaatccagcgacgtgcactggcgcgggtcgataaccgttgccgtgatgccataatcgtcagacaatgcggcggccgtctgctccgccaacggatacgcattgcccagtccgatgatcgcgacttgcgagcccgtctgattgacccgccaatccagcatgtgacgcgcaccggcatgctgagccgttacgctaacggtcccgcggactgttgcggcagatatgcccccgctggcggaggctggcagcgaagctgactgggggcggtcagcaatctgcccacccgtcaccggcagcagcgtcgcatcccgttccgccgccagaatcgcctcgcccggcacccgaatcaccgccggaccagcaggggcgtccgccgaaccggccggcgcggtagcccatgccaaatcagccagatagtcgcgagccgaagtcggcaccagcatcgtaacccctggaatattggagaacatcgtcacgtcatatgcgccggaatgcgtattgtccgaaccggacaagccgcccagaaaatcaagtaccgtgactcgcgaacggttcaggctcatctcctggaagaactggtcgtacgcgcgctggaagaaggacgccgtggtggccaccaccggcgtgccacccgcccgtgcgatgccggcagcgtacgccacggcatgcgattcggtgatgcccgtgtccacgtaatgcgaacccgcgcgttcgcggaattcgtgggtgatgccgttggagcccggcgtggcgggggagatgaccacgagtcctggctcggtggcgaaacgcggttcgagcgcggccatcgccattttgccgtaatgcttgcgcggatcgtccggcttgccgattgcggcatccggattctgccaatgcgaggcctcgcactggccttcatgcggttcgtgatcggacaggttgcagtgatccgaatgccacggctcgctgtgcagcacgttgctcgtggggcgcacgccggtgtcggagactgccggatccagctcatggacgttaccggccgaggccgagggtgcgccggccacgtgatcggcgccgtcatatcccgcgcccttcagcgtgtggatatggaccaccaccggatggtcgatatcgcgcacttcctcgaaagccgcgaccagcgcggaaacatcgttgccggcctccacataccgatagtctaggccgaacgcgttgaacaggttcggctgggcggtgccgccggacgcgcgcaggcgggcgagcggaccgtacatgccgccgaaatcgccggcgatcgacatctcgttgtcgttgaacacgatgatgaggttgccgccttgctcggccgcgttgttcagcccctcgaacgccacgccagaactgagcgaaccgtccccgatcacggcgaccacattgccgatgccgctgcccggcccctccatgttgcgggttttcgccaggccgcaggccaaggagatcgaagtgccggtgtgcccgagcacgaactggtcgtgttcgctttcgtcggggttggtgaagccggtcacctcgccgaaacggttcggatccatatacgcgccggcccgtcctgtaagcatcttatgcacgtagctttggtgggatacatcgaacacgatacggtcacgcggcgaatcgaatacgcgatgcagggccaccgtggcctccaccatgcccagattggaaccgatatgaccgccgtgttggtggccatatgccagcagcgtggcgcgaatctcgcggcacagttcggcgagctcgtcgggggcaagggccttgacatcggccgggctggcaatgcggctcagcagatgggagtcgtcgccatgggaaggggtaatgctcggggggatgtcgtgaaggcgcgcggtcccctcggcggcactggagacggcgaaggaatcgcttgaatcaaatctgtttcctgacgcgttgcgcataccctcgaatctcccttcgctaatctttccgaagttgaatgctaacgcccggcattgtccgaggtccacatgacgaatcaatgcccccaacatctccgtaaatgggtgattcgttcgctgcgcgatgtgggacaatgaatgcggtaattccttttgataccaaggagcgcgcaatgaaggccgtatacgcatccaccgtcaaccatgacgatccgcttgccgcgttggcggtgggcgagcagcccgaaccccaggcccgcccgttctggtcgaccgtttcggtgcgcgcggtgaccgtaaaccatcacgacgtctggtcgctacagggtgtgggtctcgccgccgaacagacgccgatgatcctgggcaccgatgccgtgggcattctggacgaggacatcctcggcaagcatgggctcaaggccggcagcgaagtggtgctgtacacgttcgtcggcaccgatggggcgggcgtggccccgggcgagcgccgtacgatcctctccgagaaataccccggcacgatggccgagaagacttccgtgccgtccgccaacgtgttcgccaagcccgcaaacctcaccacggccgaggcggccgcactcggcaccagctggctgaccgcctactcgctgctgttcgaggccgccagcatcaagccgggcgactccgtgctcatccagggcgcgggcggcggcgtatccactgcggccatccaactcgcccatgccgccggtctggaagtgttcgtcacctcgcgtgacgcggacaagcgcgccaaagcgctgaaacttggcgcgaacgccgcgctggagaccggtgcgcggttgccgcgcaaggtcgatgcggtgatcgagtccgtgggggcggccacatggggccattcggtgcggtcggtgcgccccggcggcaccatcgccatctgcggcgccaccaccggcgaccagcccggtgccgaactgacccggttgttcttccaggacatccgcgtgcagggctgcacgatgggttcgcgcgaggatttcgcacgattgctgcgcttcgtggagcacgccgacctgcatccggtgatcgattccgtggtcagcgggttggacgccgcccccgaggcgttcgccagaatgatcgccggcgacatgttcggcaagatcgttattgagctgtaagcctcacagaattatgtattgagaacgattcgctgcgtggcttaactccgctatcaggagtacagtgggccttattctcaataactagggagtaaatgataatggcaaatgaatccaagcccgaagtcgcagtggtcatgggatcctccagcgactgggagaccatgaagcgcgcctgcgatattctcgaccagttcggcgtcgcctaccacaagcaggtcatctccgcgcaccgcacgcccgagctcatggccgagttcgcgcacaacgcccgcgccaatggcctga

SEQ ID NO: 637 - DNA, 10623 bp, Unknown
  R14_15m  MAG No. k141_8825
gacgatgacgacaaggacaacaagtgatgtccgagttcaacaaggacgactacctgaacgacctgccggatccctcagatgctgaggctgccggccaggccgctcaggcctcttcaggggctgacgcctccgccgagtccgactctgcgcaggattcggctgcccaggctccttccaatgaaggagccgacgcggctcctgccgcagctgagggagagaagtcggatgccggagagaagactggcgaaggccagtccgattccgaagacaccctcacccccctcggcaaggccaagaaggaagccgcagactacctcgaagccctgcaacgcgaacgtgcggagttcatcaactaccgcaatcgcacgcagaaggagcaggagcgcttccgccagcacggcatcatcgacgtgctgaccgcgctgctgcccgccctcgacgacatcgaccgcattcgcgaacacagcgagatggacgactcgttcaaggccgttgccgccaagatcgacaaggctttcgagaagttcggcgtcgagaagttcggcgaaaagggcgaggacttcgaccccaccaagcatgaggcaatcctgcacaagccggatgccgatgccgacaaggaaaccgtcgacaccgtggtggaagccggctaccgtatcggcgaccgcgtaatccgcgccgcccgagtagtagtagcctccccgcaaaactgataacggccagctcgttaacgagctgacattaccttggctcccgctggcgggagctggcagccgaaggctgactgagggtggtcaaacattgaatataaaccaccctcagtctcgcttcgttcgacagctcccgccaacgggagccaaccataaagactcttcaagaaaggagacatgaatggctgaaaacgaatggctcagtaaagacttctacaaagtccttggtgtctccaaggacgcttcggacgacgacatcaaaaaggcgtaccgcaagctcgcccgcaagtaccaccctgacgtcaacaagaccaaggaagccgaggagaagttcaaggacatctccgaagcctacgacgtgctgagcaagaaggaagatcgccaaaagtacgacgcgattcgccagttcggcatgggcggcgcccgcttcgcaggcggttccggtgccggcggcttcgacgcttccggtttctctgatatcttcggctccatgtttggccagggtgccggtggcaacggttcgcgtatccgcttctccacttcgggcggcggccccaacaacatcaacgacatcttctcgatgttcggcggtgctgcaggtcagggcggccagtcgtatggcggctacggccaatcgccgtacggcaatgccggcggctatggctatgaggaggccctgcgccccgaaaacggcgaggaccgcaactccaagatcagcctgaccctgcgtcaggcggtcaagggcgctaccgtgtccctgtccgtggacggcaagaagttcaaggcccacgtgcctgcgggcgtcaaggacggccagaaaatcaagcttgccggcaagggcaagccgggcatcaacggcggcaaggccggcgatttgtacctgcacgtcaccgtcaagcccgatgccgcgttctcgatgcgcggccacgacatcgtcatggacctgcccgtaactgtgggccaggccgtggccggtggcaaggtcgaggccaaggatatcgacggcaatcccgtcaccttcaaggtgccggcaggctccagctccggtgccgaggtcaagctcgcgggacttggcgtccagcgcggcaaccagccgggcgacctgatcggccgcgtgcagatcatggtccccgccaagccgggtctggccgtcaagcacgccgccaaagaattcgacgaaaaagccggcgactatctcagcctgtaatcaggaggtgaacaatggcgcggttagccaaccaaatgaagcagttgtacgcgatgtgcgcaaccgcgctggtgatgggcagggccgatctcgacggagccgatgacgtcggcttcgacatcgaactgcccatcttcaccgtcggccaggcagccgaactgggcaacatccacccccagaccctccgccagtacgaccggctgggtctggtccgtccgcagcgcaccgatggcggcgcacgccgctactgcctgcgcgacatcgcccgcctgactcgagctcagcgcctaagtcaggatgagggcatcaatctttccggcatcgcacgcattttggccctcgaagaagagaatcgccaactgcgccgcgaagtcaaacgcatgcaaaccggcgaccaggagagcgttttcgccgcaggccgtgacggcaatatcgtggaggtacaacgctccaaccgcgcccgcctctggcgcaacgccatccgccgcgaaacccgcgaactgcccggccgcgataccgctgccgacaccacgcgcgaatccgactccacccccgccgattccaaatccatggtcctgtggggttggtgatttgctgttcggctgtcgtgcggagttggtgagataggtatatcgaatacgaatagttgaggattcactgcgacgtacggaggtaaccatgctgctcaaggccgtgttttgggatttggacggaacgcttatcgattcggagccgctttggcatgacggtgaaatcgagattgcgcacaacaatggcggcgagtggaacgaggacctcggttgggagtgctccggcactccggtgccacacgtggcagaggtcatgattgcgcatggctgcacattgagcgttcccgaaatcgacaaacagctcaaggattatgtgttcaaggcggaggtcgaacgtctgccgtggattcccggcgtattggacgtgctgcactcgctcaaggaggccggcattccgtccatgctggtcaccacgtcgccgcgccgtatggcggagaacatcatgaagcagtccgagggactgttcgccggctacgtctgtggcgacgatccgtacgaacacaagccgaaccctgcgccctatctggccgcagccgacaagcttggcatcgcccgtgaagacatggccaagtgcgtggtgctcgaggattcctcggttggacttcaggccggtgcggcatcgggcgcgactctgatcgcgcagactggctggattcgcacggatacttccggcctgggccagttcgcgtccatcgaatcgtatgacggtatcgatgcggccgcgctggacggtttcgtgcgccagcgtttgggggagtagaaataggccgattgtatcggcattgcattccggtgtgtcgcaagtatttgcaatgtttatatcaaccatttgatgtctgttttgacaaacttctgaaacgttatagaattgttgccaacgaagaaatctgaaacgttctagaaaaaccggcgcacagcagcgtcggttgactggttttccgctccggcaaagcatgcccgagtattttctatggccagtttctgaaatgttacagaaaaagaagatgaggtccaagggaggtcatcatgacggcaattcaggaagccgttcccgccgcagcgggggcagcgcaaagccgtgggggagaggtgagcaacgcggctgcggcagccggcaaacgtgttcgtgcccgcaagcacagcggcgcatcgcagaactcatggcaaagcaagctgcgcccctacctgttcatcgccccgctggtcattctctccggcgtcttcatctactactgcatcggcttcaccgtggccacatccttcaccgactgggacggcatctccagtgagatggacttcatcggcctgaagaactacaccaagctgctcgctcccggctccgtgttctggacggccttgatgaataacatcatcttcatggtcgtcaccgtggtcatccaggccgggctcggactgctgctcgcggtgatcctcaaggagcgcctgcgcggttccagcttcttcaaggcgatcttcttcatgcccatcgccatggccccggtcatcatcgccgccatcttccgcatcatcatggatccgaacgtcggtgccatcaacgaggccctgcgcttcctgcacttggacttcctggcccaaagctggcttggcgatccgcacatcgccctctactcgatctgtgccatcaacatctttgaatggatgggcttctcgatgatcatctactacgccggtctgatgtctatctccgatgacatctacgaagccgccaagatcgacggctgcggattctggaacaccctcttccgcatcaccattccgaacctgtccggcaccaccaacacgcttatcctgcttggcatcgtcggctcgctgaagaccttcgatatcgtcatccagaccacaggcggcggccctggccgttccaccgaattcctgaacacctacctgtacaaggccggcgtgcagcagttcaacggcggtctgtccgcggctgtcggcgtgatggtcctcatcatcgccgtgatgctctccctgattcaacttgccttcaacaagcgtgccaacaactaacgagaggacgtcatcatgaagcgtaaaaccagtgcgacggtcatcatgtacaccgtcctcgtattcttcttcgtcatctggattttcccgatttacacggcaatcaccaagtccctgcaggcaggcggctggaacagctacctgtccgtgatcaacaataaggacgtgcactacttccgcgtggtgttcaacagctttttcatctccgtggtcaccgccgtgatcgtggtggtcatcacctcgctcgccggctacgcctttgccaagatgaagttcaccggttcccaggtgatctacgtgctgctgctcgcctgcatggccgtgccgattgcctccgtgaccatgccgctgttcttcaccatcaagacattcggcctgaccaacacctacctcggcatgatcatcccgttggtggcgttcaacgccctgcagatgctgttgctctggcgcaactacttcaacggcgtgccagacgaaatcatcgaagccgcccgcgtggacggctgcggttccctgcgcatctgggctcgtatcttgatgcctatctccaccccgatgatcgccaccaccggcgtgctgaccttcgtctactcctggaacgaatacctgattccgttgctgctcatccgcgacgaatccaagtatccggtcacgctggcctccacctacttcatggagacccgcagccagacgccggagatggtggcccaggaatacgccgccctgattctgatgacgattccgtccatcatcgtctacctgatcagccagaagtggctgcagtccggcatcaccgccggcgccgtcaagagctgaggtgacccaaaatgaccgcaaccatcagcaacggtgtatccgccagctacagccctgcggaagacgagctcggcgcagctgaccccaccgccttgcttgccgaatctggcgatttgaagccgctggccgaacgcacttatacgaatccggttccatatgcggacggtaagtcccataccgcgcccgacccgttcgtgctcaaataccgcgacctctactactgctatgccaccgacgagcacggcattctggtctccacctcaccggacatggtgcactggacctcacatggattctgctacaccgaagccggacgcagaaacttctgggccccatcggtgattctcatcaacggcgtctttcacatgtacttctcgaatatgccggccgaggagaccgacacccacacggaaatcatgcgtgtggccgtgagcgaggatccgctcggcccgttcgaaaagaaagcggagctgttcaacaccttcgccatcgactcccaagtggtctatggcgatgacggccagttgtacttgctttacgccgacaatcaggtcaccggcctgagcgatgaccggcccggaacctccgtgatgatcgatcgccttgtgaccccgtattcgcgtgagaacaaaccgcgcccgctcatcgtgcccaccatggacgaggagatctttgcccgcaaccgtttcggcgatggccgcgactggcacaccgtagaaggcgccacatacttcgcctaccgtgaccgcgcgttcatcacctactcggccaacgcctacgagcatgaggactacttcgtcggatactcgtacgcacagctgccgaataagcaggccgacgcccacatcgatcagctcgattggacgaaacagctcaacgagaaccgcttcgatccgctgcttatccgcagcccaaaggttgaaggcacgggccacaactccatagtcaaagcgcccaatgccgttgatgactggattgtctaccacggccgtaacgccgatgacgagctgtatgtgggcaccgaacagcgcgtaatgcgcatcgacccgctgtactacgccgaaggagggctcgacaccccaggacctaccgccgccgctcaaagcgcaccgctgtatggcactgtgcatgatgattttgcggatggcctgaacgccggatggtcggttatttccggcgcggcccacaccgaatccgatgtggacggtcacgcgcttgttgccgacgaatccagtgtattcatcgctgtgtcgggcaaatcgtccgcaacccaagtgattgacgtctgggccaaagctcccgtcaccccactgggcgcacgattcggtatcgtggtgcggtaccaggatgccaacaacctcaccaaactcgaggtggatgctggccgtcaggtaattagcgtggtcgatgtgatcggcggcgttgcctccgaacgcgtgaccaatgccgacctccatgacttcgattcccatgcctggcatgagtaccggcttgagcgccgctactgcaggctggagatccgcattgatggccgtttcgccgcgtcctgcaccatcagtgataagcccggtcgggcgggattgttctcgttgcgaacgggggccgcgttcagcgcatatgcggccactgaacatgtgaatctgtggggtgccggattgcgggatctcggtcgagaattgcatgctgaccgccgactcgtcatcgacggcggcgtgaggtccagcggcgtgtgtccggtaacactcgaactggcatacccgctggtcagcaaccgtttcgtccttgatttcgctgggcagacgagccgtgggcaggcgctgttgtctcttggcgaataccgtttgtccggcacggcatcatccgtggagttcatgcgcaacggcaagtctctgccttccaccccggagccggccaggctgcgtgtctttgaagacaacgtccgccgtgaccgttcgggccgagccgtgctcaccatccgtatcgaagctctgaacggcacgatgcgactgcacctacgtggcaaaacctggcaggtgccgtttgcggacaatgcggcccgtgcccgtatcactcttgatcgcgcatccctgaccggatacgagaggacatcgctggaatccagcatcgaggaaaggagtgcgtccggcaattgagccaacatcagccgcacatatcgggtgtggctggcttcgccatccaattccgatgatcttccacaacgaagtgaaccaataagagaaacaaggaaaataaggagaacaatcatgttgaacatgaagaaggcgatcgccgcagtgggcgctctcgctatgtctgcaggtctgcttgccggatgcggttcgggcagcggcggctccgatgagggagtcggtaccaaggacagcccggttgagctgaccttctggacctggcagcctaccgatgcccagtggaagtcgatttacgccgccttccagaagaagtacccgaatatcaagatcaactggtggcgtacttctgaaatggccgactaccagaagaagctgcagacctcgatggccggcggcgaaggcccggatgtgttcggtgtgcaggccggttccactgtggaacagtacggccgtttcgccgacgatatgaaggagctggccgacaagtacatgcccggctgggattccaaggtggccgagggcgccgtggcgcagaccaccaacaaggatggcaagatggtggccatgccgaccatcacctccggctccgaatacatcctgtacaacaagacgctgcttgacgagcagggcatcaaggtgcccaccacctacgacgagctcgtggctgccaacaaggaactcaaggccaagggtctgatgccgctggccctcggcgccaaggatggctggcacctcgacgatatcttcgtgtggctgtccaaccagtacggcgaaggtgacgtgtacaaggccgccgaaggcaaggccaagttcactgatgagaccttcgtcaagaccatgaaggcttggaagcagatgatcggtgatggtctgttccaggatggtgcagttggtactgcgacctacccggatgctcgcgacaactacttctacgcccgcaagtccgctttcttcccgaccggctcctggcacgtttccgccgtgctgccgaacgatgagaccaagggcacggccgttgagaaggacgagctaggcatgatggaattcccgcaggtgggagacaaggctaccggcccgaccactggtgtggacttcggcctgagcgtgaacaaggactccaagaagaaggaggccgccatgaagttcatcgagttcatgaccaccggcgaaggccagcaggagtggatcaacacgctgcagggtgctccggtcgacaaggacatgaaggtcgaagtgccgtctgacgccacggaatccgccaaggccagcatcgatttggtgaccaagggccaggcctcttccaagcttgagcgcaagctcacctcccaggaactcaacgacgagatcggtgtgcagatgcagaacatctacaccggcgacgccaccgttgactccgcgctgaaggccattcagcaggtcaacgaatccatcgaaaggtgagcctatagataggaatatcgcatagtttctactcctcgagtgggcccgtccggtacgaattctcgttgtctggcgggccttctttgttggtttgccgaagtggccctgatttattaccgccggcggagtctgttgacggttgcagcgggagtcgtgggcggcgtgtcggacccgtccctgctagcggggctgtcggcaaggccgactgggggtgattctgcggacgcctaagcgaaacggcctgcgggggcgatatcccacatggtttatgctggaaacacacatctgaaacgttcgacaaccaatatggcgacgtggatggtgccatgccgagtggttgatggactgaatataagggggcgctatggttgcgagttcgcgcaaggcgacgctgcacgatgtggcgaaacgtgcgcacgtgtccgtggcatcagtgtccaattacctcaacgattacccctatatgaagccggccacgcgcgaacgtatccagcaggccattgacgagctgggctatgtgaccaaccagcaggctcgcaatttgcgttccggccgcacaggactcatctcattgtctctgccggatttgaaccagatttacttttccgaactggccgaagagatgatcacgcgggcacgggaatatggataccgcatcatcatcgaatcgaccggaaacgaccgccagcgcgagatcgagagcgcacatgccatggccagcaatatgaccgacggacttattttgagccccacggccatgcgggcggaggatgtggccgagctcgagggcgactacccgctggtagtgctgggcgagcgtatcttcaacgcacctgcgccgcacgtggtgatgcccaatgaattgggtgcccaagccgctaccacgcatctgctggaggccggatgccgcaccgtcgccgtggtgggcggaacgttggacgaatccgtgccgtcctctcgttcgatgcgaaccaaggggtatctcagcgcctttgcggaacgtggagtgacgcctgatctgaacctgatccgcgagtgcggcgaatggaccagtgccgagggcgctcaggcggtacgtgagatgtatgcgcagggcattcgaccggatggcatttttgcgctgaatgatttgctggcgatgggtgttatcagtcagctgcgggaaatgcgcgtgcgagtgccggaaagcgtgcgtgtggtgggcttcgatgatatcgatgaggctaagtacacgattccctcgctgaccactgtggatccgcagcgcgcgcgtattgctgagattgccatcacgtcgattcttgatcaggtcaagacgggggctcgggcgccgaggcggcgtattgatgtggagtattcgttgcgttaccgcgcttcctcgccgcaggtgtagcagttgtgttagccggctggtagggtatttgacggtttgcatataactgtctggttcattgggctggcagctcaatacaagatttaggactcataggaaacacatgggcttcgttaatttcatcctcgaactgctgaaggatccgcgtgccgcgattgccggttggattgccatgggcgtggcgccgaccctcggcttcatcttcctcatcgtatttatcgaaacgggtgtggtgttcttcccattcctgccgggcgactccctgctgttcgccgccggtgtgttcgcc

SEQ ID NO: 638 - DNA, 3048 bp, Unknown
  R14_15m  MAG No. k141_10167
ggtcaatgcgctgctgaccaccgaggcactgatcggtgtggccgacgacctcaatttcccgaacgccgacgctgtgttcgccgccatcggtgatgggcagatctccacgcagaacgtcatctcgcatctggtcaaggatgcgggtgccgacgaggtcgatgaggaggtcgagcaggaggctctgccgctcaagcccgtggagcgcaagacttccagcagctccaccggggtatccgtcaagggcgtgggcgatgtgtggatcaagctggcccgttgctgcatgccggtgcccggtgacaatatcatcggcttcatcacccgtaatcagggcgtatccgtgcaccgcaccgactgccagaacatgatcgatctgaaaaacaagcagcctgagcgtgtggtcgaagtcgaatggaccagcaccaagggcctgttcatggtcaagattcaggtcgaggcgctggatcgacgaaacctgctttcggacgtgacacgtgtgctttccgaccatggcgtgaacatcatttccggtacgatcgccaccggttccgatcgcgtggccaccagccagttcagcttcgaaatggccgatccgcagcatctcaactcgttgctggcagccgtgcgcaagattgatggcgtgttcgacgtgtaccgcatcaccggtgccaaggaatccgccgaacctcgactgcgcaagatgaagtaggccgttgcttggctcccctccgggaggggctgtcagcgaagctgactgaggggagcagcgcgggcttgcggaactcccctcagacgtctgcggcgccagctcccctcagagagggagccaagaatacgaaaaggtcctgactggaataccaatcaggacctttgctgtatatgtgtcggtcttactcggccacgttcacggacagaattacggccggctcgagcgggcgatccatcggatcggtgtccagtgcttcgagcttatcgacgaccttcttggagtcgtcatcggcgacctcgccgaagatggtgtggtgaccgtccagccacggggtcggcacggtggtgatgaagaactgggagccgttggtgccatggaccttgccgtccatgccgcgacgcagaccggcgttggccatagccagcaggtatggcttgtcgaacttcaggctcgggtcgatctcatcgtcgaactcgtagccagggccgccggtaccggtgcccagcgggcaaccgccctgaatcatgaactgcttgatgatacggtggaaggtcaggccgttgtagaacttgccatgggaaggctggccggtgtacgggtccgcccattccttctcgccggtggcgaggcccaggaagttggccacggtgttcgaggccttgtcgtcgaacaggttgatggtgatgtcgccctcggaggtgcgcatgatgatggtagtcatggctccaagtgtctcatgtgcttgagaccggtcggtgggtgcatgagctatgctccttgtgggacctgcccggttgtgaggactactctcgggagagacatgatgttcggagcggttatttccagttgaatgtgtagctttggtccggctgttcctcaccatgggtggtgacggtcgggatgttgccgtgccaggtgacggtgaagttgcccgagcctaatgatttgccgtcgttgtgcagatccgttttgatttccgtgacgttctcggaaccgataacaccgggatcggtgtcccaagagactttgaccgtgatgctgcttggaccgaagaatatgggcgagccgagttcgctgatggtcacttcgcaggtgccgtcagcggatttcgcgttcacgatgcgatgcgacatatccgtttgcatccatatgagagtgcagcctccagcccagatcagcgcgattgcgagaatgatatgctcaacgatgtgtgccgctttatgtgagtatccttcggtcataaattcccacgctcgtgtcatcataccatagccttcaaccggagccttttcatcggtcgttgaaaagatggttggcgatatcgccccgaccgccgaagccggacggcacgtcacccaaagagttcttagcgaagtcgaacaatcccatggtcatgcctctttacctttgggaaaccaatatgactaccgtatcagttgtcggcgtcatcgccgaggcttgcgatttgcggaagtggcccatatccatgcatcgcgtcatggaacaggacgccgtctcgcgcgtaattcgtgcctgtagaatctttaaagaccaagtttggagggagcggaatcatgccacgcaagctgatcatgtgcggggaccatccggtccttgcgttcgaatacgatcccgagtccggtcgcgcgtgctcctctggcgaggtccttgaccatgatcgtctgcccctggagttcaccacgcacggcaagagcgcgctgtatgccaagaggatcgacgaatggtggaggtcccgcgccatcccctccacccgcgacggcatccgccgcgtgctcgaatcgcttggcgcggcatcgaccgatgaactgctcgacaggacctacgggctgagcctgtcggaccagtactgggtcagacgcgaggacgacccggccgaatggaaggacgtcaacttcttcgacaattccttcgacgaggcgctgggcgagatcctgctcacctcgtactcgtcgtcccatgacatcagcctcaacgtccccgacgtgtccactagcggcgatcttcccaaacgctggacgatcgacagggccaccggcaggagactgctcgtcaagtcgggccgtactggccaggagcccatgaacgaggtcatcgcctcgaggctctgcatgcgattgggcgttccggccgtccggtattccctggcacgcaacggcaaccgtctggtgtccacatgcgcggacatgctctccaatcatgaggagctggtctccgcctggcaggtgctccaatccgtcaaggccgtcaacggcctcaactcgcatgaccagtggatccgcgccgccgtcggcttcggcgcagacgaacgggcggttcgtgac

SEQ ID NO: 639 - DNA, 3048 bp, Unknown; identical to SEQ ID NO: 638
  R14_15m  MAG No. k141_10167

SEQ ID NO: 640 - DNA, 2805 bp, Unknown
  R14_15m  MAG No. k141_10282
gtgaacccgtaaccgccactatcaccggtgtcctattcgccggcgcggtctttaccccgaccgatttggtcggcttcgccatgattatcatcatggtgttcctcgtgagatagttcacagctcgcctggctccagaacctagtctggcgggcacaccccgagcgataatgaagccatgacaatcgcaacaccggaacgttatgccgaaatgctagacgccgcacgacgcggcggctacgcttaccctgccatcaacgtgaccagctcgcagacgctgaacgccgcgctgaaggggttcgcggatgccgaatccgacggcatcatccaggtgtccgtcggcgcagccgcatacctttccggcatcggcgtcaacgaccgtgtcaccggatcgctggccttggccgcttttgcacacgaggtcgccgcgaagtacccgaacatcaccatcgccctgcacaccgatcactgcgccaagcagtatctggacgaatgggtgcgaccgctgctcgcacatgaggccgatcaggtggcgcatggtcaggagcccacattccagtcgcatatgtgggacggctccaccgtgtcgctcaaggaaaatctggacatcgccgaggagctgctcgataagtcgcaggccgcgcacacggtgctggagatcgagatcggcgcggtcggcggcgaggaagacggctattccgccaaaatcgacgaacgcctctattccacgccggccgatggccttgaagtggcccgtcgccttggtttgggcgagcgtggccgatacatggccgccttcacgttcggtaatgtgcacggctcctacaagcccggcgtggtcaagctgcgtcccgccctgctcggtgatattcagtcccgtgtggcgcgcgcggtggtcgagggtgagctgcccagcgccgccggcatagtcgactttcccaacggcaagccgttcgaattggtgttccacggcggttcgggctcccgtccggaagagattgcagaagccgtgagccatggcgtgatcaagatgaacatcgacaccgacacgcaatactcgttcacgcgcccgattgccgaccatgtgttcgagaactatgacaaggtcctcaagatcgacggtgaagtgggcgaaaagaagttctacgatccgcgttcctggggccgcaaggccgaggaatccatgtccgcccgcgtggctgaggcatgcaagcaactcggctcggccggcaaagcactcagataacacccaaataaactgtcattcgccgtggcggcgcatcggtgtcggcccgcctcgcgcaacgcgcggcaaagacaccagaagcccgattgcgtgagatggccgcgccccgagtagagggtgtaaggtagtctgtttccggcggaatcgtgcgaatgcggaggtgtgttatgcctggaattgttcttatcggtgctcagtggggcgacgagggtaaaggcaaggctaccgatctgatcggcaccaaggtcgattacgtcgcgcgcttcaacggcggcaacaacgcaggccatagcgtggtggtcggtgacgagtcgtacgccctgcacctgctgccctccggcatcatcaacccgaacctgaccccggtgatcggcaacggcgtggtcgtggacccggaagtgctcttcgaggagatcgacggcttggaatcccgcggcatcgattgctcccacctcaaggtgagcgaggccgcacacatcatcgcgccctaccaccgcacactcgacaaggtgactgaacgcttccttggcaagcacaagatcggcaccaccggccgtggcatcggcccagcctacgcggacaagatcaaccgtgtcggcatccgcgtgcatgacctgttcaacgccgaccatctgcacgacaaggtggaggccagcctgcaccagaagaaccagatgctggtcaagctctacaaccgtcgtccgatcgacgtggaccagaccaccgaggagctgctgaagctcggcgaacgcctcaagccgtacgtggccaacaccggcctgattctcaacaaggcgcttgacgaaggcaagaccgtactgtttgaaggcgctcaggccaccatgcttgacgtggaccacggcacctacccgttcgtcacctcttccaacccgaccgccggcggcgcctgcaccggcaccggcgtgggccccaccaagatcacccgcgtaatcggcgtctccaaggcctacgtcacccgcgtgggcgaaggcccattccccaccgaactgctggacgagtccggcgaatggctgcgtcagcagggccacgagttcggcgtgaccaccggccgcccgcgtcgctgtggttggttcgatgcggtcgtcaaccgttacgcctcccaggtcaacggcctgaccgacatcgtgctcaccaagctcgacgtgctcaccggcctgaaggagattccgatctgcgtggcctacgacgtggacggcgaacgtcacgacgatatgccgaccgatcaggccgctttcgccgccgccaagccgatttacgagaccatgcccggctgggacgaagacatctccgactgccactccttcgacgagctgcccgccacctgccaggcctacgtcaagcgtttggaagagctgagcggttgccgtatctccgcgatcggcaccggtccgcagcgcgatcatgtcatccagatcaattcgctggtcgactgaccgtctgcaacgaatttcccggcttgactggtaacgacgcggcacatgatatccgccggctgattccgcgattcgaccacttgaagtggaagatggcggcggccggca

SEQ ID NO: 641 - DNA, 10370 bp, Unknown
  R14_15m  MAG No. k141_10323
gcgccgatcaccacggccgcggatgcgccgaacggcacggcgagcagcagggcgatgagcacggtggggatggagatcagcgcgtcgaccacggcgaccgacgccgaagcgagcgccgaagaacgggcgaccatcagcccgaccagtaggatgccgatggcagccgagcagacaacggtgagcagggcgatggcaaggttcgtacgcgatccggccatcagccagctcagcacatccgcgccggtgccgtcggtgcccagccaatgcgcggacgacggcttgtcccacacgtggtagccgtcggtggccagcaacgactgcggggtccagaacaacgacaccagggcgacgaccatccacgatcccagcacgatcagcgaatagcggccggtgccccgggaccagatggtgcccagaaccacgcccgaacgacgccatcgaccattgcgatcaaccatcattcctcctttccggcggccagacgcgggtcaagcagcgcgtgcagcagatccaccgccaggccgatcagcaggaagaacgcggcgagcaggaacaactcgctttgcacggccaccagatcgcggttgccgacatcgcccaccagcagggcgcccagaccgggcagggcgaacaggttctccaccaccatcacgccggtgatcatcgaggcgaacgccagtcccaccaccgagacgagttgcggagccgccaatcgcaatcccacgcgcaccaacgcctgggtgcgggtcatgccgcaggacatggccatatcgatcggccctccctcatcggcgatgccttccagaatggagcgcgtgtaacgcatgatgcccgcaccggacacgaatccggtggccagcgccggcaggatcagggacgagaccgcccgcccgggagcgccccacccagcggcggggaacccctgcgagggcagcagaccgacaaggcccacgccccgtgcgaacaggaggatgagcagcaggccgctccacagggccggcacggcgccgcccacgatggacagcacgcgcaggaaaccgcgcacggccggcgaccgggagatcacggcggcggcgcccatggacaagccgagggtgagcgcgatggccaggctcatcacgatcagcgggaacgtgatcgtcgcacgttggccgacctgggaggtcaccgcccgaccggtcagcgccgacacgccgaggtcgccgtgcagcagccctccggcccagtcgagatactgcacgacatacggccggtcaaggccgaattcggcgcgcagggccgccacacgcgccggcgatgcgttcatgccggccatcacgaccgccacgtcgcccggcaggatgcgcagcatcgcgaacaccagcaccgaaatgccgaacagcgccgccgcgaacagcagcaagcgttgcatcaagaaccgcataacgcctcccttatcgattccctcgccaccgcccgtggcgtcaccggccggatgggccgtccacggtcgggcgcgccacggaatcactcccgcgccgcgcccgaccgatgggttccgggactacttggtgtaggtgatccgccagaggggcagcacggtctggctcaggttctgcgggaagccgtccacgcccttggcgtaggcgatggtgaccttccagctgaacagccagtcggccggcgcgtcctcggagacgatcttcgcggccttggccagatacttcgaggcctcgtcatcggaggtggcctccagcgccttggcgtacagggcctgcacgtccttgttgtcgtagtggaagtagtagctcggcgtggtccatccgtagaagtcgtggctttcggcatggtccacgagcgaaagatcgtagttgccgttggcgtgcacgtcctgcagccaagtggagaactccacgtagttgatcttcaggtcgatgccgatgggcttgagctggctcttgagctggtcgccgagctcggtgccgtacacgttggcgtaggtgagggtcaggtccagcggcttcgactcggagtatccggcctgctccatgagcttcttggccttggccacgtcatgcgggtacaggccgctcagatcctcgtaaccgggatcgaccttggggatcggaccgccgaggggggcatccacgccgccgcgcgagacgatgatctgcttatggtcgatggcgtatcggatggcctggcggacgcgcttgtcggagagcttgtcgttggccatgttgaaggcgagcacgaacttgtcggaaccgtcaccggacttgaccacatagttcggatccttgcggaacggatcggcaagggtggcggagatgggcgaaagcacctgcacgtcgccgctcttgagggcgttgatgctggcgttctcgtccggcaggaaccggacgatcacgttctcggtcctcgccttgtgctcggtgccccaatacttggggttcgccttgagcacgatcttgtcgttcgggtcgaaggagaccacggtgtacggacccgagcccaacgcgccgttcttctgatcccaggtggcgtccttgtcgtagaccaggccgggacggctggtgaggtaccacagcatgttcgagttgggcgcggagagggtgagcctgaccgtgttggcgtccacggcctcggccttgtccaggctcttgacctgctcgtagtcgtagtacttctgggccttgagctcgttgatggaccacgccacgtcctcggcgtcgagcttgtcgccgttggagaagttcatcttctcgttgaggtggaacgtgtaggtcaggccatccttggagatctcccagctcttggccagaccggggtggaccttgttgtccgagccgcgcgagacgaggccctcgtacacgttgccgatgaggatctgctcaagggccgaacccgactggtggcggatgtcaagattgaccggggcgagtttgaggccgacggccacggtgtcggatcggctggccgagacggaggcgttcgcgtccttgcccttgcctttcccgccgaagacggtgacgcccacgatgagcgccgcggccacgacgaccgcgatcagcgtccacagccaccatttcgggccgccgttgttcttgtttgatgatttcgcgcgcgcgttcaggctcgcgtcggtgctggcggcttgattcgcgccgtcgatgttcctgtcttcggttgcgccagactcgccgtgcacaccattgttctgggacatggatactccctgatgcattcgggcatgcttacgcccgaatatggtttcgttgttatcttgcgtggttgaccgcccattcgggtcgatcaccacgttctactatatccccggacacgccggaggcaatggctatactggattgcggcgccgacggagggtccgcggcgaccacaacacgcggcgcatcgtcgggcaacgacgcgggaagcgctggcgtgggcacacgtgcggccttggcataaggccgggaggcagctatggcacatattcttctgggcgtcaccggcagcatcgccgcattcaaggcctgtcatctggcatccgattggaccaaggccggccacgaggtgcgggttatcgaaaccacagcggccgaaggcttcgtcactcccctgacattcacctcactgacccatcaacccacccgtaccacgatgttccccgcttatccggccgcgcacggcgacgtgacggccaatccgaccgtgccaacgaccatcaatcatgtggccgatgcggcctgggccaatctgctggtggtggccccggcgagcgccgacgtcatcgcccgcatcgcctgtggattggcgaacgatacgctgacgtccaccattctggcctatgaggggccgaagatcctatgcccggcgatgaacgtgcatatgtacaacaatccggccacgcagcgcaatctgaaaacctgcgccgaattgggctggcagattgtggagccggaggaaggcaatctggcttgcggcgacgtgggacgaggccgtatggaagagccggcgcgcatcgaggaagtggccgctcggctgctggcggatgcgcaggatgaccaggctccctcatcttccccgctcaaggggctgcgcgtgctggtcactgccgggccaacgcaggagccgctagacccggtccgctatctgacgaaccattccaccggcaagatggggtatgcgattgcctcggccgcagccgaatttggtgccgacgtaacgttggtctccggtccagtcgccttgaccgcgcccgatgcggtggatgtggtgcgcgtcatgaccgcgcaggatatgttcgatgcggtggccgacgccttcccggcggcggatatcacgattatggccgccgccgtgggcgatttccgcgtggccgagattgcgccggagaaaatcaagaaggccggccgcagcagcatcaccgtggagctggtttccaacccggatattctggcgtgggccggcgaacgcaagcgcgacgacggctcgcagatcctgtgcggattcgcgatggagaccgagcatctgattcgtaatgcggagaagaagctgacgtccaagcattgcgacatgctggtggccaacaatctgcgcgacgccggtgccgggttcggcaccgacaccaacgttgtcaccgtgctcacgtccggagcggaggatgccggcaccccgaagatcgagcattgggacaagatggacaaaaccgtgcttgcgcaacgactgttgctgcggctcgcagcgttgcgttccggcggcgcgagcaatgtcgatgacgagaacaaggaggcctgacccatgctgatggcggtcgatatcggcaatacgaatatcgtgatcggttttctggagggcgaccgcatcgtcggctcctaccgcatcaccaccaaggcgacgcacacctcagacgaatacggtctgatgatcacgcagttcctggctttgagcgattacacggccgacgatgtggacgatgtgatcgtctgctcggtggtgccgaaggtgatgtattccttccgcgcctcgctgatcaaattcctcggattggaaccgatggtggtgggccctggcgtcaagaccggcatgaacattcgtctcgacgaccccaaaaccttgggctctgactgcatcgccgactgcgccggcgcctaccacacctatggcggcccggtgctggtggccgacttcggcaccgccaccacgttcaactatgtggacggttccggcacgattcgctccggcttcatcaccacgggcatccgcaccggggccgaggcgttgtgggggcagaccgcccagctgccggaagtggagatcacgcaaccgcagtcgattctggccaccaatacgcgcactgctatgcaggccggactgtattacacgttcctcggtggcattgagcgcacgattcagcagttccgcaaggaaatcgatgagccgttccaagtggtagccacgggagggctcagccgcattttcaagaacgacaccgacatgatcgacgtctacgattcagacctgatcttcaaaggcatggcatacatctactcgcgcaatgtgaagtaacgcggtgtgcaggcatcggccgcgcatagcgcagtcgattccgtccctccccgaaaaacctactcaaaaccctacttaatcgtaaagccctgattgaggccgtattctcggaggtctttctgccatcgggccaggccgtcggagagactgactttcttgccgggcttctccaatggttcgagcgggttgccttcctcgtccttcatgcccatctcaatggcttcctgtcgctgctgataggcgtggaaactgccggaccactcgtatgcctggcccaccgtcgatttgaagtcactgcgcgcatacacttcgaatggcagatactggtatccgaccgacacatcctcggcggcctccgacagtacccggttgaacttctgcccgccgaaatacgggatttcaatgccacggtcattggtaatcgtggttttatccagaaaatcagcggaattcagggtggcgtaatcggccgggaaggcaccgccgtctacacgcgcgctaatgccttgggcgtcatgcgccacaaagtccacgaaacgataggccgcatccggcttacgggtcagttgcaacacggtcagcgccgagccgccattttcggcgttggcaggctgcccaccataggtgggcatgggagccacgcgccacagaccggccgcgcccggcacattggacagcagcaacgacggcatccaagccccagagaacacggaggcgatggtgccggtgcccactctgcttttccaccgatccgaccatgtggcggaggtggtgtcaacaagcccctcatcgatcattttctgccagaattcggtgaaccgttgggtgccggcatcctcatccaaatcgatggtcacggttttgccgtcggccgacgtgtggaacggctgaccaccggcgagccagaccatcgcgtcatagaaactgccgtcgcccgagtcggcggcgatatacgcgccgatctccttgagcttttcggcggcctcgtaatagtcatcccaagtcttgatcttggtggcgtccacgccggcttggcggaacacgtcttcgttgtagaagaagcccatcgggcccgaatccatgggcagtccataggtacggccggcgagctgcacggacgaccatgtgccgagggtaaagaagttggaataatccgagccgattttgtcggtcagatcaagcaattggccggagaccgcgtactgcaacagtgcatagtattcgatttgagccacgtccggcgtgccgtaaccgtcttgaatggcggtattaagattgccgtagccggagatattggtccatttcacgcggatgtccggattggctttttcgaaacggcggatgacctcccccatgctcggttcccagctccatacgctgatctccgtacggttgtcgtccgtggcctgcccgcacgaggccagggatacggaaaggatggcagtcactgctatggttgccattcttttgattcgctgtccgatcactcgcatggtgacgagtgtactaggcggggcttaaaacggtaaaagccccgtgacgggattcgtcacggggctttgtgtatcgaacggggtcgcgccggcggccccttcgcgattgcgaatcaccacgtgcggcgcgttgacgccgaacaaacgttcacccaacagtacgagcgggtaatcgccctccaaagctgcgatatcgtcaaccgtcatcatcagagggcttaagatgagcccatccgcgctgtgcgtgcccatcgatgcgatgctttccagcttgcgggcacgattgttggtggtggattccacgatgacgccatagccatgttgccgggcctcggccagaatatcctcggcgagttcggagaagtacacctgccgcagatcgggaataaccagcttgagcaaccgggtacgcccggaacgcaggtttctggccgacgagttgactttgtatccgagcctgtcgatggcttccgcaatacgcgcggccatcgcctcgctcatatatggctgtttgttcagaaaattagacaccgaggctaccgaaacaccggcctcatgggccacgtccgccatcgtcactctgtttttgcctcgcacggtgaccaccctacccgactttgctggagatacgaaaacgactcccctgctacgatgagcagcaagggagccgttgggtaattaggcgctatgcgcggttttacagcttgacgacgagtacgccgttgggctggatggcggccgtgtgctcggactcgttgacctgggccagcgaggcgaccagcggttcgccttccacgtccacgaccgcaacatcgtgggtgcggttgaacaggaacacgaagtggttctcgccagtttcgtccgcacgctcgacgcgcagcacttcaccgcgatcgtcctcagccgaagtctcgatgccgagttcctccagcagcacgggcaggctcttggccaaaccctcacggccgagacgggcaccgacgtatgcggccttgccgtcgccgaagtcgttgacggtgatggcgggagcgccgtcgaaaccggtccacttatccgccttgaaggaggcgaccacgtgagcggtatcggccacggaggtgatcacgtcggcgaaatcgtgcgccacggttccgttgtccaagtcaaggtggtccatggcaccggggaagtcgttgcccatcggggcgaattcctcaacgcgcacacccaccacgtcacggatggaaccggggtagccacccagccagacgtgatccttgtcgtccaccagaccggtgtagtaggtcacgaacagcttgccgccgttcgccacatactcgcgcacgcggcgcgtggtctcttcggacaggatggtcaggctcggcagcacgacggcttcgtactcgtcccaagggccgcgaaccggcaccacgtctgcggtcagaccgttgtccgccagcgcgcggaaccacgcgagcggctcggtccaatggcgtacctcctgagtaggcgtggcggtgtgttccgtagcccactgggactcgtaatcgaagacgacggcgaccttggacttgaccagcttggtgctcagcaggccctcgtcagcaagcttgttgaggtcggcacccagctcgcacacatcgcggaagatctgggagtcggggcccgcgtgaggaaccatcgaagagtgccacttctcggcaccggccttggactggcgccactggaagtagcagatggcgtcggagcccatggccaagtgggccagggagtcgcgcaccaattcgccgggctcgacgcgatagttgatcgggcgccaattgacggcggagctggagtgctccatgaggaaccacggattcttgcgggcgatgccgtcacatagggaggccgagtaagccagctcgtcgaagtgagcttcgccaggcgtgaagtagtgatcgttggacacgaagtccacgtcgtaaccccacttgtcgtaatcgatgctggcaccgccggcggagaccatgaagttggtggtctgcggcttgggggcgatctcgagcagggcgtcgcgctcggccttgtaaaagtcgagcagggcgtcggagctgaagcgcttccagtcaagcagcttgcccgggttcatgaagttgccgtcgccgatgaagcgcggcgggatgatctcggaaaaattgttcatgcgctgcgcccagaatgcggtgccccaagcgtcgttgacggcgtcgatggtgccgtacttcttctcgcaccacttctggaaggcgcgctcggcgtcttcggaatagtcgaagcggttgtggcagccgtactcgttgctcacatgccaagagaccacataggggttgtccttgtagtgctcggccatcttgcggcacaagctgagcgcgtagtcaaggaagaccgggctggtggcgcgccagtgctggcgggcaccgggctggcagacgtcgccgcggtagtcgacccagaggatctccgggtgggcctgggtcatccacatcggcggggatgcggtgccggaggcgagatcgacggcgatgccggccttaccaagcttgtcgatgacgcggtcgagccaatcgaagtcgtacacgccttcttcgggctcaagcttggcccaggagaagatggctacggagacgaggttgacgccggcctgctgcatgagggctacatcttcgtcccacacttcctcaggccattggtcggggttgtaatcgccgccgtaccagatgcggggcttgttgcccgcaagcggctgcggccacttgaactctttacgttccatgatgattcagctcctttattgaattttatcgataatctgcgtccgcgggaataaacagcccacagggctgtttgcctaacggctcagctcgtcagagggggggcttggcactattttacctccctctgatgaggaaggttgtctcggcggagccgggacggagggagagaccccgccgcgaggcggtgaagacaccgcgtcggcggagccgactccatcactccttgacggcgcctgcggcgagtccggactgccagtacttctgcaggcacaggaacgcgatcaccagggggatgatcgtgatcagggagcccgtgatcaccaggttctggatcgcctggccgcccgcggtcgaggcctggtccttccactggttcaggccgatggtcagcgggtaccagtccgcgtccttgagcatgatcaacggcaggaagtagttgttccacgtcgccacgatcgtgaacaacgccgtcgtcacgatgttcccgatactggccaacaacacgctgggggcgagcacgtcgatgtccgtgcccaggaaatcgttcaacgaa

SEQ ID NO: 642 - DNA, 2502 bp, Unknown
  R14_15m  MAG No. k141_10407
ccacctggtcgacgacaagattcacgcccgctccaccggcccgtactccatgatcacccagcagccgctcggtggtaaggcccagttcggtggccagcgcttcggcgagatggaggtgtgggcccttgaggcctacggtgccgcctacacgctgcacgagatgatgaccaccaagtccgatgacgtcgacggccgcgtgcgcgtctacggtgccatcgtcaagggcgataacctgccgccggcaggtatccctgagtcgttcaaggtgctcctgaaggaaatgcagtccctgtccctgaacgtcgaagtgctcaacgccgaaggcgtggccatcgacatgaaggacgaggacgacgatccggccagctccgctgacgacctcggcttcaacattggcgcccgccccgacgcggccgccaaggaagaccagaaggccgaagagcccgaataccagtgatccctcgggctgcatgcggtcaatacgccgcgtgtagctccgccaacgtgaaataaataacgtacagagacctttccggtttgcactacccttcagtcagccttggttgacagctcccctgacaaggggagctcgggaaggtctcaagaacagaaacggattaacaagtgctggacgtcaacgcatttgacaagattcgcatcggccttgccaccgccgatgacatccgtggttggagccacggtgaggtcaagaagcctgaaaccatcaactaccgtacgctgaagcctgagaaggacggtctgttcggcgaacagatcttcggcccgacccgtgactgggagtgcgcctgcggcaagtacaagcgcgtgcgcttcaagggcatcgtctgcgagcgatgcggcgtcgaagtgacccgcagccgcgtgcgccgtgagcgcatgggccacatcgagctcgccgccccggtgacgcacatctggttcttcaaaggtgtgccttcccgcctcggctacctgctgaacgtcaccccgaaggatctggagcgcgtgatctacttcgcctcctacatggtcaccgaggtgaacgaggacgagcgccacaacgatctgcccggcctgcaggacgagttcgattccgagatcaagcgccttgagcagcgccgtgactccgacatcgaagctcgcgccaagaaggtcgaagaggatctcgccgcccttgaggagaccggcgaggccaagggcccggcccgcaccaagctgcgtaacggtgccgagcgcgatatggccgccatccgcacccgctacaacgaccagatcgcccgtgtggacgccgtcttcgacaagttcaagaagctcaagcccggcgacatggtcgacgacgtggacctgtggcgcgagatgcaggaccgctacggcgattacttcgacggctgcatgggcgccgaagccatcaagaagcgcctgcagtccctcgacctggagaccatctccaaggaactgcgcgaggagatcaaggacgcttccgagcagcgtaagaccaaggccctgaagcgcctcaaggtcgtcaacgccttcctgaccaccggcaacaagccggaggccatggtgctcgacgtgatcccggtcatcccgccggacctgcgcccgatggtccagctcgacggtggccgtttcgccacctccgacctcaacgacctgtaccgccgtgtgatcaaccgtaacaaccgtctgaagcgactgatcgagctcggcgcccctgaaatcatgctcaacaacgagaagcgcatgcttcaggaagccgtcgactccctgttcgataacggccgtcgtggtcgcccggtcaccggtgcctccaaccgtccgctgaagtccctgtccgacatgctcaagggtaagcagggtcgtttccgtcagaacctgctcggtaagcgagtcgactactccggccgttccgtgatcgtggtcggcccgtccctgcgcatgcaccagtgtggtctgccgaagccgatggccctcgagctgttcaagccgttcgtcatcaagcgcctcgtggacctgaactacgcgcagaacatgaagtccgccaagcgtctcgtggaccgcggcgacgccgaagtgtggggcgtgctcgaggaggtcatctccgagcaccccgtgctgctcaaccgtgcacctacgctgcaccgtctgggtattcaggcattcgagccgatcctggtggaaggcaaggccatccatctgccgccgctggcctgcgccgccttcaacgccgacttcgatggtgaccagatggcagtccacctgcccctgtccgccgaagcccaggccgaggcccgctcgctgatgatggcttccgacaacatcctgaagccggctgacggtcacaccgtgaccatgccgagccaggacatgatcctcggtctgtactacctgtccaccgtgctggaaggcgccaagggccagggccgcgtgttctcctcgctggaagaggccgaaatggccctcgaccgccacgagatcgacatgcaggccaaggtgctcatc

SEQ ID NO: 643 - DNA, 6097 bp, Unknown
  R14_15m  MAG No. k141_10639
acacgccgcctacgcctagctgaaaaatacaccagcactatatcacgcgatgcacgtcgaatcaaaaaggcgggaggcctccggagaggtctcccgccgacgattcggaatcgaatcacttgccttcgttggcgaggcgttcgcgtgccgcgatgatttccttctcggcggcgtcagcaccggtccagtagtcgcccggcaggacttccttgcccggctccagagccttgtactgctcgaagaagtgcttgatttcggccttgtggtactcgttgacgtcgtcgatgtccttgatgtcatcgaaacgaacgtcggcgggcacgcacagcaccttgtcgtcgccgccggcctcgtcgaccatgtggtacaggcccacggcgcggcactcgaccacgcagcccgggaacacggagttcggaatcatcacgagagcgtccagcggatcgccgtcctcgcccagggtgccgtcgatgtagccgtagtcatccgggtaacccattgcggtgaacagggtacggtccaggaagacgcgaccggtctcgtgatcgacttcgtacttgttcttggagccgcgcggaatttccacaacgacgttgaaggtttctgccatgtcatttctccttgaaaatcgacagttacgttatcgtctcaccacaataccctgtttgcgcctgcaaaacaggtgcggaactcaagaaaccgtgctgagattatgccgacactatgtctaaacagacgaaatcctcccctcaaggggaggatttctagcggtttacgcacacgataaacccatgcacgtcaacggcatcactgttgcattaccgttgcactaccgcatcactgcacggacaggatgtgagccacatccgcccaaggcgccagagacacgtagttgtcccaaccccactggaattcgcggccggtcagctcgtcgcgcacgttgagcgggcggtcggtgggcagacccagctcgccgagttccaggtgaatcatcgactggtgtgcgttgtgtccatcgaggttcacgaccacaatcagcgtgtccgcttggccggtgccggtcagttcggccggcgtgtggcgtgcgaaagccagaatattctggtcggacgtaggcagcacggtgaggttgtggtagctcaacgcggccgggtgggcgcgacgaatcttgttgagcgcggtgagcatctcggccacgccgtactgcttggccttgctccaatcgcgaaccttgacctcgtacttctcgttgtcgatctgctcttcgaagccggggcgctgcttgttctcgatgagttcgtaaccgttgtagataccccaggacggcgagcccatggctgccagcaccgcacgcacgcagtggccggctacgccgttgtctcgcacgtaagcggtgagaatatccggcgtggtgggccagaaggtgttgtgctggtagtagccgtcgtcgccattggtgatcggcagatactcttccagttcgtccttggtgttgcgccacgggaagtagcagtgggactgggtgaagcccacgtagctcagggcacgcatcatgcccgggcgggtgaatgcctcagccaggaacaggatctccgggtgcttcttggtcacggcggcaatcacgtcctgccagaaacgcaccggcttggtgtgcgggttatcgatgcggaagatggtgacgcccgcctcgatccacagattcatgatgcgttcgacttctttttcgatgccgggcatgtcggcgttgaagtcgatcgggtagatgtcctgatacttcttcggcgggttctcggcgaaggcgatggagccgtctggcttgtgacggaaccagttcgggtgggccttgacccacgggtgatcgggcgagcactgcagtgcgaaatcaagcgcgatttccagacccagttcatgtgcacgctggcacagggccttgaaatcgtccatggtgccgagcagcggatccacggtgtcgtggccgcccagctcggagccgatgccgaacggcgagcccgggtcatcggggccggcgaccagcgtgttgttgcggcccttgcggttggtcacgccaatcgggaagaccggcggcagatagacgatgtcgaagccttcggcagcggcgcgttcgaggccggccatcgaggtcttcagcgtaccctgaatgatcttgccggtgttcggatcgatggtggcgccttcggaacgtgggaagaactggtaccaagccgcgaagctggacttcgggcgttccaccttgaaacgctggggctggctgggggagatgccatcgcgcagcgggtgagtctcgtgcagggcggcgatggtagggttgtcgccggcggcgaggcgatcctcggcgctcagcgtctgatcggccatggtctcagcggccttctccaaggtcttgcgatcgcgtgcggtcaggccggcgtccggggttgcggcccaacgggccagcagctcggcaccggaattgagcgcgttgtccacgtcgtccatcacacgcaccttgatacgggcgtcatgcagccaggagacgtacgtgtcttcccaaccttcgatggtcacggtccattcgccgagctgacgcttgacggccgcgtagccatcctcccaaggcttcagatcgctgtgttcgccgcacttgaccatcacggtccaacgatcgaggccgggatttacgcaggtcatggcccggcgcatggtttccttgccgcgcgggttgcgcacgatggcggtggcacccaccttggtacggccttcgatgaacacttgggcggtcatctcaaacggttcgccgagttccacacgggcggggaagatgccacgctcctcggtgggagtgatgtccatgacattgatgcggccgaactggccgggctcgtttgcttcgatggacggtgcgggggcttcgacagccaggcctttcagcgctgctgcggcgcgtgccgtttcggcgctgactctcttgcgcttggttgcggggctctttcgggcagaagtcgtctttgacttcgtcttcgtggtgttgttatcggtattactagtgcgcgtggtcgcgcgatgttgtactgctgccataaggccctattctagaggcttttgaacatatgttgcacattgtggataacttgcaggtaaacgttcggtcaaccgcatgaggtggataactcggcggaagagttatccacaactcgccgacaaacggcaagctcggaccacataggccgaaaaatcggctgtagcgaatgaaaatctgccatgatcgtggcctacccgcacacagtgcagtatgcggggaacgtaccaggaaaggacgaatgatgataacgacatggcggcaacggggcatggccatcgtagcgatgctgaccggtctgataataatggtgggagtggtgttcggctcggcgaatacggcgtatgccgcgacgttgacgcccgccgacgaaagatatcacgtgacgtttccatacaacgatatggaatattacgtcggtgtcgcggggctggacgcttcgggcaacaaatactactgcatcgaagcggggaaactgagcgactatgtgataggccccaccacggtgcttgcctccgatgagaacgcccggcgtatggcatggatccttgaccggtaccgcgacacggatgccgccacccatgcggcgatcggcatcatcgtgcaggatcacttcgggcgcgatcgggacgagtgggcgagacagatggcggtcattcaaggccggtatcccgagatcgtggcgaaggcggcccggatatgggatcaatcggccggcaagacgcctgcgggcacgacggtggaacgcgccgatgccgaggctttgcgcagcggttccatctcggtgaaagtggtgaaccgcgacggtgacgcgatcgcgggagtgccgttcactgtcaccttgcaggggccggcgcggttcatccaaggcggcaacacgttctcgggggtgtcgacgagcgccggatcctcgatcgcgtgggaggcgaccggcgccggcgaggtgacggcgaacaccacatacgagtatgggcggatgcacgtcatggacagcactcaggacatgctggccttcgattcgatggcttccgccggcggttcgtcgtcgacgttccaggtgcgcaaggatttcgttccgtcggtgtccacgcaggtgtccgataaggtgcttgatgcggcttcgccggtgttcgatgatgtgaccagtggcgtgggggacgagggcagtcattgggtgcccggtctgaagctgcaggcgcgtggatactatttcgacgggctcggcaaggacgatctgggcaaggtcatcgcgccgaacgcacgggagagcgcggacgcttttctcgcccggctggcgtcctcgggttatgagccgagtgcttatggcaaggcgtccttcaccggtgtggggcagcgggttcgtgtgcgggccatggccaagccggacggtgacgccgcctatctgactccgaagaccggcggctttggcacctgggtgtgggtgttccggcggagcgagcaaagcaaacgggcgcaggaataccttaccggcgactgggtgagcccgttcatggaggcttcggaaagcaacgtggggcgcgggaaggtcgaagtcatgtcgacggttaccgaacattcggcggatatcggcgccgaactcagcgacaccatcaccgtatcggggttcccggcggaccacggccagttcatgggtgatgaaacctatggtttcgcggcggatcagccgtatgcgacggtgagcgtatggtggtccggcgatcccgacaacccctccaacgatgaggcgtacaagccatccgggggagaggtccccacggaagacgacaaccaccggttgctggccacctgggagattcccgcgatgaacggcacgttcaaaatcggcgccggggcgttggacgcgcatggcgctcccatgcatctgaccgccgaacggcatgggtggtacgtgttcgtttggcggttcgagggggatgaccgtgtttccccggcgtccagccggtatgacgatgcctgggagcgtgtgcgggtgttgcccccatgcgagtcggagaaaccgtgcgaaccggagaaacccgagacgccaccggcgccggcggaggcaaccacgcccaacactcgcccgtcactgcccgtcacgggtggcgatgtgtcgcttgcctcggttctggccgtgtcagctctggcgataggcaccatactgtccatcgtcgttcggtggcgtcgttgctatgaccgatccaagcactggacgatgcgctggccgatacgttgacccgctgcggcatgatgccgatgatgtcggctggatggtgaaccgcactccgcttctgagcagaaggacgggagctgggcacgaagtcgattgtgacatacgacttgtgcccggcttccgcttcgttgagaaacttcacgcctgtcgcctcccgtggattagacaactgaagatccgcgatgaaaacgacgagacgtttatgatcgccgacttccctgggcaccgtagctgcctgatcgcctttcatccatatcgccccggtcaggtcgtcacctacaacggcggcggcagcgtcgccaccggcagcaacgccccaccgtcccgtaccgtgaccgtccgtgcagaccttcggccccgtatggggctggacgtgggccgatccggccgcgacgaccatcagcgccgtcgccctgaccatcggcgtcgtcatcggcgccagcgccctcaaggccaaggcatccaaggccgaataacaagaagcccccgaacctgaaccgtatcacgcggcaggttcgggggcttttcgccgtatatgggtcaggccatcgcgggctgtgcctgattggcggtcaggtatgcggccagtgccttgcggatcagagcgctcttgccgatgtgctctcgttcggcctgtgcccgcacctgtgcgtccatgtcgggcgtgaggtatgccttgtagagcacgtcggccttccggcggggctggtcggcgagggggcggccggcgaagatgtcgtcgatgtcatccatcgtgatcgccctttgcgggcggatggtctcgccga

SEQ ID NO: 644 - DNA, 24883 bp, Unknown
  R14_15m  MAG No. k141_10879
gtcaaaggcctcgcagatggtgagcttcatcgttgccatagtgttcatcggcttgctggtcgcaggccatgatctggagacctgggccatggtaatcggtctggtcatcggcttcgccgttgccaagattcccgcgctgcacgcctgggctttgcacaagtggccgttcttcgagcccaagaaagcggctcccgcccccaagcgcgtcaagaaagccaagaagaagtaaccataaatatcctgaagcatcacattaaccattaaaggctttccgcgcagcactgtatatgccgcgtggaaagcccttaatggttcggaagaggagatggaagaactacaacagaccaatcaaaccatggtcccgaccatctcgcgcaaaggcagggaccgtgtcgattgctgcagacgactcgatgctctgcccacccgcgtatacggcgccgtctcgcaaatcagtccaagtggtcgtctcatcgccaggaaggtagacactacgggaagcagcaccggcctcgactacgggagccacaagaatgtcaggaccgtacaggtattcgtccgcaatgtcggccacgtgttcatcggtcggaaactcgtagaacagtcctcgcaccaacggctgaccctgctcatgggcagactggaacagttcacgggtatacgggcgcatgacctcgcgcacggcgatgtatttacggaatatggactccatttcagggccatagctccatggctcgttgtccgcgcccgaaggcgaacggtgctcaccggttgccttggtgatggtttgcttgccggtcgactcccccaggctgcggtcaccatggttgcgcatgacgggcaggaagcaggagaacgcgcaccagcgggccagcagctccttgaatgaatccgaatcgatcaccccatcatggaagccgcccatgtctgtagtgaaccaagggatgccagccatacccatgtgaatagcacaggtaatctgcgatttcagatcggcgaatgtggagccaacgtctccagaccagaccaacgacccgtaacgttgagatccagcccacgcacatcgagtcaggttaacgatctcgccttccatgccggcttctatctgcccctcgtagaatccgcggttgtaagcctgcggatagacgttacccacgttgaggtcgctgcccatgtggtagcggtagttgcgaaaatcgtagacaccatattcgggttcggcctcatccagccagaaggcgcgcacgcccttgtcccaatagttggccttgcacttgtcccacacaaatttgcgagctcccgggttggtgggatcatagttgacgcacggctcttcgaacatcatgtcaagattgagcccagcttcagcgcttaccagatagttgttgcgcttcatctccacgaagttctcggatgagaccgagacctgcggccacacagacaccatgagcttgacgcccatgctgttgagctcggcgaccatggcctcgggatcaggccagaattcgtcctcgaacttatagtcgcccaaatgaggccagtgaaagaagtcaatgacgatgaggtctagcgggatgttccgggatttgaagcctcgggccacgtcaagcaattgttcctggttccagtaacgcagcttgcactgccagaagcccataccccattcaggcatgactggcgcatgtccggtggcgtcggcatattgcgattcgatctgcgcgtaggagtcaccggcggtgacccagtagtcaatctggtcagtggactgagccgcccattcggttcggttgcgtccaaaagtggcgcggccaatagccggattgtgccacaggaagccgtaccccttggaggagacgacgaacggcacggaggcttgggaattacggtgcgcaagttcaaaggtggagcctttgaggtcaagcacgtcctgttggtattcgcccatgccatacagccgttctttgggatcggcgctgaaagacgtggtcacggcgaagctttcaccggacaccggagtgtagtcacgcgccttgagcaaaagcgacccaccttgtggatattcgcggaacaggagttcgccttcggcgttccagaagctcaggtcacaccggaaggtttcatatccggcagacagcaatggagcatgattcgaatccgctttaacggtgatgctgccgttggtcaggctggcgtgttcgccgtcctcgccgacggcgatgtctgcgacacggccggattcattcttcggttccagaagcgcccaatcgaccgggccgaagccacggttgcgggtggcgcgtacacgtacgctgttctcttcccaaggttcgatgcgcagggtttcgccgtccccggtccagatcagggcgttgccgtcgatggtgaatgaagttgtcatggttgtcgtccttgtggttgaagtgtcgtactgtcttagtccttaacggcaccggcggtcacgcctgcggcgacgtacttctgggcgaagacaagcaggatggtcgcgggaatggatgcaagcactgcggtggccatcatcggcccccattcctgggtctgcgcaccgatgtagttgtacagacccatagtgatcgggcgcatcttgccgccgccggagtcaagggtggaagcgaacaggaagtcgctccaagaccataggaaagcgaacagggagacggtcacgatcgaattgcgcgataacgggatgacaatggaaaagaagcgacgggtacgtgaggctccatccacttcggcggcctcaagcagggaccgcgggatgccggccatgaaagaagtcaggagcatgaccgcgaacggcaccgcaatggtcgagtcggcgaggatcaggccgggcaacgtatcgagcagaccaatgttgttataaatctcgtagaagccgagcgacatcacgacggcgggaatcatctgagccacgatgagcaggaagctgagcgcgccgctgcctggacagcgcagcaaagccagtgcgtaggcggcaggcagtgcgatgaccagcgttagaatcacgcagcataccgctacgaggatggaagtgcccagatagggcatttggtcggcgattacgcgggcgtagttgtcaaaggtgaaatccttgggccacaggtcgccggaacgaatggatgccttaccagtgaacgagatgttgatcatccagtagacaggaaacatcatgatgagcgtcaatatgatgccgagagcggttttccaccaggtgctacgatgcgtcattgcaatcatctccctttagcaggtttcctgggtcttctggacccgcaggtaaatcagtccgaaaatcaacgccacgatgatgagaatcgtgccgagcaccgaagcctccgagtatttgatagtcattgaagttcccttgccaaatgccatcgaataggcccaggtggcgagggtacgcgaggtgccggttccctgggacatcatccagatcacgtcaacgaccttcaatgtatagacgaagccgagcaacagggtgatcgaagtgacgggcttcaggagagggaaggtgatcttccagaagcgctgccaggcgttgcagccatcgagggaggcggcttcacacaggtcgccgctgatgttctgtaggccggaatacaggatcacgaggttgaaggggattcccagccagatgttggcgatgatgacggcccacagcgagttatccgcctggagccaccagatgggttcgatgtcaaacagaccgaggaacatgttgaggatgccggagtcagggtccatcatccactgccagacggttccagaaacaatcagcggcaacagccacggaaccagcatgatgccgcgcaacacaccagagagcttgaagttatcgttgaagaacaccgccagggccaagccgattacatattggaatatcagcgagacgaccacgaacacgaaggtctgccccacaaccggccagaactccacggaggaaatgacttccttgtagatgtcgagacccacgaacagcgcatctccggtaacgaaggttcgtcgcgtgtatcggtgcaggctcattgacacgttctggatgagcgggaacgcgtaaaagattaccaagtagataatcagtggggcaatgaatccggcgatggccagtttggcccggaccggagtgccggactttgcccggcgaacggggcttgttgttgaggctgtcatggtttctcctgtatgaaccgggcggacaatacccgcccggaaaacgtcatctggtacgttggcggagcggtaatcgggaccgatcaagccgcgttaagggccgccagcagggattcggagatgcttgcggaggcttcctcgtatttgagacccaagtcggaggtacggccggcggcgttctcgatggattccttccactgagccaagccgtcgctagccgcgagctgctcggcacgcacggccttcttggcagcgaggttgctcagagcgttgcttaccttaagcagagtctcgtcctcggaaagacattcgataacctgattggcgagcttgtagtgggattccgcatccttcttgtggtaggcgaccatggcgaactcgccaccggtcggcacggtggccacgccgccatcctttgcggggatcggaataagtttggctccggcctcgtctgcctcggactgcatccaggtgccgatttcagcaaatccgtagtcgccagccaggaacagatcccaggaggccgactgggtgttggtcgtggcggacttgggagcccatcccttgctgatccacccggaaagcaggtcttcggcgtccttctgcgcctgggagtcaagcttggacagatcaccacctgcgccccagaaccaaggcaggaactggaagacgccttcctcacccgagatgcccgagaacgtaatgcccttgtatccggcgtcaacgaccttcttgatggccgcgttgagcgaatcccaatcggtgatggtggatacatccacaccggctgcctcaatgatggtggggttgtacataagacccaacgtgttggatccgcccagcggcacgccatatgcctggccgtccactacgcccggagcctcaaggttctcatcccaggcagaaacgtcaagaccagtttcgtcggaaccagcaaccaaacccgcatcgacggcggacggaatcatcgggttgtcgatgaccgcaacatccgggccattgtcttccttgattgcggtggtgaggttgttgagcaggtcggaagtggcgatggcttggcgctcaattgtgtagccttcgggcgcacacgccttgaccagtttgtcgaactcggagccatcctcgtggcgggtccagtcatcccaccattcgatcaccttatcatccgtggcgctgttgctcgaaccacaggcgctgacgccgacaagcatggcgcaggagcataatgcggcggttatcttaagagcggtattggacttcatatctcctccttgagagaccgttccttttgaccatctggtcctttgcatcgacccaccgtcgggtctttaccgcaccagatgcaaaccggtttgcataaataaatataaatcagataaacgaaccatgcaaaccggtttgcattatcggcgcgccgcgatcggtgaaccgttctaaagccctgaaaacacaggggtcaaaccggttagcacaatttgagaaaagatattaggatacattcctatacaggcatggcgattcccgcatagattcgcaaaggcacataccgcaatgtcgacaaaagacgaagggaaaacgtatggtgaccatcaacgacgtggcgcgggaggcaggagtctccaaaaccacggtctcattcgtgctttcgggctcgcgccccgttgctgcagccaccgaacaacgtatccgtgaggcaatggacagactcggctataccgtcaatcatgccgcccgcagcttgtccacttcgaagaccatgaccatagccgtggtgaccagcaaccggcaggacgcctactttgacattgcccgtggcacatacatcaacggcttatcccgagcagccgccgaaaccggctacgacatgctcatcactaacgatccagacggctccgctacggagaacgcctgccaatcacacaaggcggatgggctggtttttttagacgtcaggcagaacgatccgcgtgtgccgattgccgctgaatccggcattccaacagtctcgctaggagtcccagtcaatccaatgaatcttgatgtggtcgacaccgacttcacggacatggcggcctcgaccatgcgtacactgcacgatgccggacaccgccgcgtcagcgtcatcacgctcagtagccgggtgattgccgaacaactcaacgacaccgctcgattcctcagggaaatcgaacgttccggagaacgacttggcatgcatgccactatccgacattgctctacaaggcccggaatcatcgacacagacatcgctcgcattcttgacggtcgaggtgaggacaccgcattcgtcatccataatgaatcggccgtattggtgttcagacgggcagtggaacatcgcggactgcgcatccccgaggatatctccgtcatcgccatcaatgaaaagcagatgtcggacgctctgtatctgccatattccgcctacgaaaacgacgtggaactggtcacccaatctgccgtcaatacgcttgtggaccgtatcgaacatcccgagctgacgccgacacgaacgttgatcaaggcctcgtacatagatcgagactccgtggccaatatctgaaatccttgcgtctctgccgccgcagcaatgatttccgcattgcataacggcaggggacgattgggttcaagccaacatggcatcaaagccactaatggtgcggccaacattccgcttcattatccccgcgagatgcgaagcgtgagagacagtgtcatcaggcatgacgagggctttcctcaatcttgatttatttgattgcccagtcccgctgggtaagttgaatcacgggtgcccgcagtagcaccaaaaaggtggcgtctgattcggcaaagaccgaatcagaagccacctcagtgccaaatgcactcctattccgtaatcgtcagcagcccgtcttgttcttcgacgcacaaaaacgtaggccgttcctggccggggtcgttgggcgagtggaccgcgtaacgcagcacgccatcgagaccgttgaacagcatgccgtggccgccgtggctaagcagaggctcggggcattgcgtccaaggcccagcaatcgaccctgattcgctgatggcctggccgactgcatatccgccttccgtcgaccagctcgaccacagcatcgccagccgtccgttggaaagcctgcacaggcagggaccatcggagaagtaggcgtcctcgtcgatgccgaattccgctttcgcgaacggcaccggcaccgcccacggcgcatccgaggcctggaacaatgtcatgctctcccccaccgtccgagtcaggtcggaggacagacgtacggcatccatgtctccggcgggcacatcctccaaggaatgcgagtagacaagccacatatcggtaccttcaccatgcagagttccgtcaatgcaggactgattcggatcggtcagccggcagacatattcgaacggatcaagcggactatcagcgcgtagcatgtgcacgcttttgcgcccgtccggctcgccgagcgtggcaatcaggtggaatacaccgtctcgctcgtagcattcgggcgcccagtaagcacggtcggccgtgaattcatccggcttgtggaacacctcgaacggaccctcccaattgtcaaggtcgcggctggtgtagcaatcaaaaccatccatcgcgccccacacgttatcagcgcgggtgccatacaggtaatagacaccgtcgtgaggcaggacgaacggatcgcgcaggtggatgtcagttcgtttcattggtcaggtcccctttcatgagacagtcgtcatcagtcacttcgcgctttcgaggcacttcttttggaatccgctcacaccgagagccaccgctccggccagagcaatcgcggcaccgatgaacatcgcgccggccgcgtgcgaaccaaacagtccgttaatcgcgttgacgagcacagggctggcaaatccgcccagtgcgttggccgtggtcatggcagcaatgcccagcgggatgaggtagggcttttcgatgacggtgacgaggaatggcgcctgcgcatagtagatgctcaggccggctccggcaaagaaactgccgatgatgagcagtggcaggctggccgagcagccaagcagcagcaaagacaggccctcgacaatgaagccgaccatcagcaaatggttcttcacgaatcggaccataagaccgacgcacaaaccagccagcagtccgccgaactgtccgatggtggaaatcagtccagcggttccggcatcgcccaagccgcgctgctcgaccaacagggacaagttgttgctgtaggcattgttcgccagaaggaagaagaagccggcaacaaccaagaaccacagtttgccggtcataacctcgcgaatcgacgcggaaggccccgttccctgaatccggccggcttcgtccgtctcaccattcttggtgggcagcgtgaatgcgcagaccaccagcaccacggcggcgaacaagtagatgaggtaggcgtgataccactgtgcggtggcgagtttgccggccacggtcatgaacaccatcgcaccgatgctggccacggcaacctgctgacccataatcgactgtcgctcatcgccctcgtagtgcacggagatcaaagtaggcagcacgttgttgataaagcctaggcatacgcccatcaacgcggaaaacgcgatgactgcagccagactggaatgcacgaagtacggcagcagaccgaacagcagcatgccgcctgcaccaatcagtgccacggtcttccgggatagaatgctggcgagtttgccggtcagccaagcgccaaccagtgcggtcagagtgatgccgaaacaatcatctgcacgctggagagcgagctgtccgggaatgcctgagcaaccaatccgatgaccggcacaatgaaaatgcccgatagcgtaatggaactcggcgataggatgcccaccttggttttcatattactcatcgtcaattctcctcgataacgactttgttattgacattgcagtgctgttgttatcaacgatacgagagtaaaactcggcaatattgacatgattatgctctataatgacctttatcgatggcgcacctacagcagcatctacagcaaaaggagtgacggccatggagcgcgatgctttccggctgccgggcctcaccgccggcgatgacaaccagtatgccgatcacacgctcaccggcatggcagccgatgcggcgaacgtcatagccgcaggcggtcccgccccgctgactagcttcggcactgtcgctcaagccgcccatctcaatccagatgacggcttcggcatcattggccatgatcttgcacacccatcgcacctacaccggcatgactatatggaaatcacgcacgccatcgccggtacggtactggtctgggtcgaaggagagaccaacgtgctgacacagggcggcaccatactcatcaagcctggagcccgtcatctcatctcccccatcatcgaatacgggcaaacaccacacgaggcggacatcctgattaaacccgagctcatcaggcaatgccgcattccgattctggaagcagccggcgccgaccggatgttcattagctggcttgacgatgaccggcagacccactgcctgctggcagccggcaagcaccacgccggcgaggccgctatcagccgcatgttcatcgcctactgcatcaacgcaacctacaggccagacttcaccgtcatcggcaacctgctcgagctgttccacgaaacgtcccgagtcttggaacaccagccacgtaccgatccgctgatcgccgccatcatcgaaaccatcacggcagatcccgccacggcccacaaccaggccatagcggacacacttggatacagcgtgggatatctgtcccggtacgcgcgcaagcacagcgggcacacactcggccaactcatcaacgaggaaaggctccgactcggcgccgaactgctcgtcaccaccgacgacaccattgccgaaatcacccgaaccattggctacgaaagtccagcctatttccataaactcttccgcagccgctacctcattacccccgaccgctaccgcaacgacttccgtatcgcattacgttgcggatgacaagcgccgcttttcccccgcaacgtaccggaatccgagatctcgcgagctggatgacgccgtttgcatagcgctatactcactttttccacgcaccacaccagcacacccgccacgcaagcgacaagtgtatatcggacgaatagcatggcgaatcccgccactatcatcatcacaacaaaaacgaacacatcggcatgatcgcatttgccacggtgcaggtataggtagctcaccacaatcatcgggaccccccagccccgccacaaccagaaaaccgcccttggcgacgttgcctcaggcggttttccagcggaaggagagaaaggagaaagaaggaatggaaaggtgccatgcgggcataacacaacaccgcacatggcgaaactatcgaatcagcccatcgggcgcactggcatcataattgatgtgtacacgcccgatggagcgaattcaatcggtcagaccgatggtcactcgacctcagccagggcatcaatgatgtagttgttgatggtggccttgacggactcgaggtgatcggacttggtggcggcgatgagctcggactgcggcttgtcgaggctgtaggcttcgaggtcggccaaggtgacgttgccctcatcgatgtccttgccgatgccggagtcgtaggagctgtagcgctcggcctgaagattctggatgaagccgtcctgattcatcttgtcggcaaccagcaggccggcggcgtaggcatccatgccggcgatgtgggagcggaacaggtcctcctcgtagaaggaggtacggcgcggcttggcgtcgaagttcagaccaccgtgaggtccgatggagccggcctgcaggacttcccacatgacggcgacggtctcgtacagatcggtcgggaactcgtccatatcccagccgatgagcttgtcgccctggttggcgtcgagggaaccgaggaagccggactcgcgggccacgcggatctcgtgctggtaggtgtggccggccaggttggcgtggttgccttccaagttcagcttgaagacgtcggtcaggtcgtggttgcgcaggaactcgatggcggtggcggcatcgaagtcgtactggtgcagcgtcggctccttcggcttcggctcgatcaggaactgggcctcaaagccgatttccttggcgtaatctgcgcacatgtggaagaacttggcgatgtggtcggtctcgcgcttcatctcggtgttccacaggttctcgtagccttcgcggccaccccagaacacgtagttctcggcgcccaggcgcttgccgatctccaagctcttcttgagctggccaccggcgtaggcgtagatgtcggcgaacggagaagtggcggcgccggacacgaagcgcgggttggtgaacagggaggaggtgttccacagcagcttgacaccggtggacttcatattctcgtcgatcttgtcaacgaccttgtcgaggttggcgttggtctcgcgcagggtgtcgccttcgggggcgatgtcacgatcgtggaagcagaagtactcgacgcccagcttctggaacagctcgaaggcgtagtcgaccttggccagagcctggtccatcggatcggtgtacttgtagtacgggcggtgcgcggtgccggtgccgaacggatcaaccagttcctggttgaaggtgtgccaccaagcaacgccgaagcgcagccaatccttcatcttcttgccggcaacgaccttgtcggcatcgtagtaatggaaggcgaagtcttccttcggtcctttggcgcggccgacgtactcgatcttgtcaacatcccacagacccatttgggcgctcctttgcagtaggcgatattacggattgcaggaccaataataaaacgaacgaactaagtttgtcaaatgattgaattaatacgccgcgtctcagcgtgttgctagtcattgcaatggttttcgaatgcagtcaaggcacagatagtatgggcaagccaagaaagacaactcagccaagaaaacgagacttgataattgacgtcacgcaattcctcgccggccaccgctgaggccggctccaccaccccgccaactccaacagcaccacccccgccaacaccaccgccatggtcatcaccctgatgatcggctcgtttgtggccatcctcaaccaaacgctgatgatctccgccctgcccacgttgatgcacgagttcgacgtgcccggcagcaccgtgcaatggctgaccaccggattcatgcttaccaacggcatcatgatcccgatcaccgcgttcctcatcgagaccttcaccacccgccagctgttcctgcacgcgatgggcatatttgcagaatgatcttggcgttaatgcactggtgtccggtctggtgatgatgccgagcggcatcgccatgggcatcctgaacccggtggcaggcaagatgtatgaccgtatcggtggccggccgctcgccttactgggcttcgcgatcatgacgtctgcggctgtgctgctggtcaccatcatgaacacgcacaccgcggcggccatgcgcaccggagtgccggaagcggcggcatcggccattggcgtgcgggcttcgttccgcacggtcgccattgtgtgcgcggtctgtttggttgcgtcactcttcattcgtgatcgcggccgccgacttggacagcagcgttaggcgaatccttcaccgattgctggccttcttgatcagcgcgcccaaagtaccggcttggcgcgcggcttccacatcttcccagtcgagaccggtgtctttggccctcccgtagaaaaaccgcaccagaccggcaaagtccggtttatatccggtttcccggaatgaacgggccagcgaatcaccgatttgcgggtcatcaggccttcgtgcctcatagatcgggatggaacaggatcgccacacgcctctcacatgtgcgatgcgattgacgatcatgccgccgcgcgcaccatcgtattgcgaggcggcatgtacgtccgccacctcgtagacaccaccatgaatgatgtcctcaactgtcagacgacctttgaccgcgctggcatcgcgaatccagaacatcgaagcgaaattggtgtcatcaagttcgcgaaaatcacgtatctcgcgtgtgccgatacgttcgtccttgtcatacatgaattcggccaaggctaggaatggcgagatacctgcgcccggaccgtactgcaattcgatacgtaaatcttcggattcattgccggtcagtccaataccgctgacggcgcagtcataggcaaaccaatcccagaaccaccattcgatcctttgcagcacctgcttcggatactttttgcatgggttcagattcacttcgcgataatatatgcgtctcgcttcggcatagacggcgagattgcagcgtttgaacatctcggctacgtctttggtgtccagcattgctggcaaaccggcattttcggcagtagtagtggttgcggtgctcatggtgtttccccttcatgtgatgtggacggcgggctacgttgcccgccgtgaggcacactgtatgacgttcgtgcggcggcccgcaagcccgcatggcgagatggtggataagtggaaaacccaatgattccaaggggtatggaatgtgcataacggtggctaccgtcggtggataaccgcactttcttgcaggttatccactgatcgcgcagctgttatccaccgtctctgggttatccacatcgtctctggcgtgtcgtccactgtcagcagtcgatttctgcttcgtttggcgtgtataagtgcacggtgaagtgtataactccgcgcattaggcatatttgctactgagaaaggtcccgaaatcgccttcgaacgcatagctacactcagcagatgtattcagcatggcaatagacccacttaggcaccggcgaatgattttccctcgcttatagagtcggcaaaggcccaacacctgccccaacgccgacgctactgcactggcagcgtcggcagaggaccacaacttggcacagcaacgacgctaaaaccgcccagcatcgttacacgtccaagttttggccgctaacgacgcttaatgaacgcttagcgtcggcagcaggtcacgcactggttctccaccgacggtaacgctccttagcgaagccagcccgccactctttggcacatcaccgacgctgagagaacctccagcgaagccaaccagccaaccgctggcaacatgacaccacccacacccctcagcgaagccaaccggccagcgcatggcaccccaacaccgctgagaacacccaccccaccagtgcacataaaaaaaaactggtcatagcggttgcgatgtaattgcatcgtaatcgcgatgaccagcctcgggggggggggtggctgcaacgagcaccgaatgaatcagatgatgatgccgttgcagtgatcgacttcgtgttggatgatctgcgcggtccagccggcgaaggtggcgtggcgggcgcggaaccgacggtcctcgtagttgacctcgatacgtcgataacgcagtgtgcggcgttcgccggtcagggacaggcatccttcctgggtgtcgaaggcaccgtccgaagcggtgatcacggggttgagcatcaccgtgatacgcccgccaaggtcttcatccacgaagacgatgatgcgtttgcctacgccaatcatgttggcggccatgcccacgcaccgtgaacggttggcctccagcgtgtctacgaggtcttcgatcacctgctcgtcgccgggtccagccgcttcagacggcgtgcgcaaaaacgaccgcgaagtcataatagggcgttgcatgttggaatcacgcttcttcgtgccagtggatgttggtgataagcggcagggagatgccggtaccgagcgacatgaccagtcgggcggcgagcagcatcgggaagttgaccgcgagcgcgcccagtaatgtgccggcggtgaaaatcacgatggccatgatgaacagtgttttggtggcgaatttgcgcaccatgaacggcgagctcggaatcgacaccgacagcaagagcagataaccggtgacaagccactgcaccaccgaggcgccgatggagaactcctccatcggcgtggagtaggcgatgttcagtgacgtttccgataggatgccgaggaaggtcaggatcgcgagcgagacgaccgcgatgacgagtttgttggagaccggttgcttgccgccgttaggcagctgtgttgcggaatgagtcacgatcttgttctctcctccattcattcagatattctgactacgacgttggaagtcttcctgcatgagtcgcagagcctcggtcaaggtgcgtaccgtggtttcgcactggtccgaggtcaatccgcccagcagttggctcaaatgcgcgtgatattcctccatatagatgcggcggatatccaagccgcgttcggtgagcgtgagcgtcaccgcacgccgatcggcggcatcggcgtgtttgacgacgagtccgaggtcggccatttcgccgacgagcttggtgatgctcggcgtagtgacgccgaggaatgcgctgacgtcgcccacgcgcgcggtgccggtatcttgcccattcggttcgttgatatgccagacgacgtcgatcacgtggacatagcgcggtttcatacctttcggcaatgccggcatcagttcggtgatggtcttggccttccagcagacatccaggaggctccgcacctcattcaccggaagcaagccggtcttggtatcggttcgggaatcgcacatcgctggcccaacctccaattagttaccaatagtcattaccataagtaactacatgcaggctctagacaaacccaacgacctgcgcgcccgtgtcgagttccgtttcggcataaaaaaaagccaggggatccctggcttgcaatgcacatatcgctgcaggtttgccgggacctatatgttcccggcaacaacagccgtatatacgttaccgatcagtgctgccctcatcatccttggcacccgccgtggcggcctcagtctccttggcgttccacccggtgacggcattccaaccactccatccgatgaccactagcaagcacagcgagaagacaatagtggcccaattgaacagcgagccatcgttattggcctcgaccagtgactgccagagccagataacgcaggccaagcaggtcaatgcatacatacgggaggtggagcgcgcggtgagtttcatggcggaaaaagtcctttgattacaagaatgacggcagataacagtgtgggatccgcaccagcggcaccggcacgaatcccacatcgaggaggagaaaggggaaggtcagctcttcttgcgcttggatatgatgtccacggcgacggccagcaggagcacgaggcccttgatggtcttcaccacggcggtgtcaacacccataatcgacagaccctggttgataacacccatcacgaatgcaccaatcacagcgcccgggatggtaccaataccaccggtgacggccgtgccaccgatgaagcaggcagcgatggcgtccatctcgaactccataccggcctgagcagttgcggaagccagacgggaaagcatgcagacagcggccactgcggacaggaagcccatgtggacgaacagcaggaagtccacgcggcgggtgttgataccggagaggatggcggccttgcggttgccaccaacggcgtacacgtggcgaccgaacacggtcttggtcaggatgaagttgtagatgaagaccagcacaccgacgatcaccagcatgatcggggtaccaccctgatcagcgttaccggaggaagccagcaggtaggtgacgaaggcgatgacgaccgcgacaagcacaatcttgaggacggtcaggctcatcggctcgggcaccaggccgaccttggccacacgggcgcgcttgcgcagctggctccaggcaaagccgacaatgcacaggatgccgagcacaatggtcagaccgtcgaacggaccccaccagccaaggatgttgggcaggtagttacgggcaatgccacggaattcgagggaggtaatcggcacggattcgccgacgatcacggtggcgagaccacggaagatcaacatgccggccagagtggtaatgaagcccgggatgccgatgacggcgacccagaaaccctgccagacgccgacgatcaggccgacgaccagagcgatgacgatggcgagcatccagttgactccggcgcgttccatcagcagtgcacacacaccaccgatgaaggctaccaaggaaccaaccgaaaggtcgatgtgggtggcgatgatgaccatcaccataccaatggccaggatgatcacgtaggcgttctgctggatcagggacacgaaggagttcggcttcagcagcacacctccggtcaggatctcgaaggccacgacgatgatcagcagtgcgccgacaataccgtattgacgggcattgttggcgaccgtggccagcaggccggtcttttcttctttctttgcaggtgttgcagttgcggcgctcatcaggctgccacctccctttccttggtcatacccttcatcaggtattcctgggtaaatccattcttctcgacattgtcggtgacgacaccgtaggacaccgtgtaaatgcggtcgcagataccgatgagctcaggcagctcggaggaaatcacgatgacggccttgcctgcatcggcaagcttatcgatgatttcgtagatctcatacttggcgccgacgtcgatgcctcgggtcggctcatcgaggatgaggatgtccggctgcgagataacccacttggcgagcagcactttctgctggttaccaccggagagggtggagacattcacatcgatgtcatgacacttgatgttgaagtccttgcggtactgttcgacttccttgcgctcaaggttgtcgtccacaaccccgcccttgctgatcttggtcagggaggccagggatgcgttctctcggatgttctgcagcaggttcagaccgttgcccttacgatcctcggtggcgtaggcgagacctgcgtcaatcgcggactgcacgttgggcatcttgacttccttgcccttgacgaacaccttgccggagatgttggaaccgtaagagtggccgaagatggacatggccatttcggtacgacccgcacccatcagacccgccagaccgacgatctcgccggcgtgcacgttgatgttcgcatggtctacgatcacgcgctccgcgtcgagcggatgatgcacggtccaatcctcgacgcgcaggtattcctcgcccggggtattggaggggtggttcgggtacaggttgtgcagcggacgacccaccatcttgcggatgagttcttcctggtcgagcggcgtctccggcgtcacgtacatcacaccgacggtcgaaccgtctcgaatgatggtgacattgtcggcaatggcggcgacctcgttgagtttatgagtgatgatgatgctggtcacgccctgctcgtcacgtagctgacgaaccaggtcaagcaggtgggcggaatcctcatcgttcagtgcagcggtcggctcatcgaggatgagcagcttcacgtccttggacaatgccttggcgatttcgacgagctgctgcttgccgacgccgatgtccataaccctggtatccgggtcttcgggaagtcccacacgatcgagcagcttcttcgcctcggcgcgggtcttgtcccagtcgatcacgccacccttggcctgctcgttgccgatgaagatgttctccgcaatggacaggaacgggctcaacgccagttcctgatgaatgattacgatgccgtcggcctcggaatcattaatagtatggtatttgcattccttgccatcaaaggtgattttgccggaatagctaccgtatgggtacacacccgaaagcacgttcatcagggtcgatttgcctgcaccgttctcgccgcagatggcgtggatctcgccgcgatcgacggaaagattcacatcggtgagggctttgaccggaccgaacgtcttcgtgatgttttccatcgtcaagatggtgtcatttgatgacatgtcatcactcctcgtcacagttctgtgttcatggacatgcggcgcatatcggccatgcgccgcatgtcattgtgtttgtttacggattgcctgatgaggactacttagtcagctcgtcgaagcgatcctgggtgatgtagttggccgtgaccagatcctggaggttgtccttggtgatgttctgggggtcaagcagcttggacggaacgtcgatgttgttgttgttgaacttgccgttcagaccggagacttccttgccctcggcgatctcgacgaccatgtcgtacacggcgtcagccagcttgttcacgtccttgaacacggtctcgccctgcttatccttggcgatgttggcaactgcgatctccatggcgtcctgaccggtgatgtacggccaggagtcggtgcccggcttcatgtcgggacgcttggattcgatggcgttgatcacaccctgggcgatgccgtcgtacggagtgaggaccgcgtcgagcttctcgccgtgggcgtaggtggagtcaaggatggattccatgtccttctgcgcctgctcggtcttccagctcatcacggagatcttctgccaatcctcaacggtgaagtccttggtcacgccaccctgaccgtgctgggacggggagacgagcacgcccttctcgaagtacggctgcagcagatcccaagcgcccttgaagaagtacttggcgttgttgtcatccggggaaccggtgaacagctcgatattgaacgggccggtggcgccatccttaagcttgagctggtcaatgagccacgtggcctcgagcacgccgacctgctccagctggaaggtggcgtagtagtcgacggcgtcggtgttcatgatcagtcgatcgtaggcgatgaccttggcacctgcatcgcgggccttctcaacggcggggcccactgcggtgccgtccttggaagcgaccacgacgatcttggcgtcgttgttgaccatgttctcgatgtcagcgttctgctgggccggcttatcgtcggcgaaggacaggatgaccttgtatccggccttctccagcttggccttcaggttgttgccgtccttgttccaacgctcttcggacttggtcggcatcgaaatgccgatagtggcgcccttttcgatcttggcatcaccgccagttgcctggccgctacggctgccaccgcaggccgcgaggcccgcgcacatggcaacgcctgccaccacggcgacgatcttcttagtgaacttcatttgttctccttcatcttcgaggggatggcgaaccctccttggtcgcccgaacctgagaataacctcaggttcatctcatagaataccgtattgagttaagttgtcaaactcaagaaagcgaatttcctgtcatttatgttcgaccaatgaacgcaatgtcgatttttcgcgcatcacaaggcgacacgccgaaaaatccacgctctgcgcctcgctgtgcctcatgccggtaacgactacactgaactcttatggcaacaaggcttttcggttcgcagacctcgcttcgcgaggcaaaccgcgccaacttgctggccagcatccacaagttcggcgccatgacacaggtcgaactggcagaggtgacaggactgtccactgcgaccgtgtccacgctcgtccatcagcttgtcgacgaagaccagctggagaccaaaaacaccgttcgcaacggtcgcagagccactctggtgacccttgcacggcatcagggcctcggcgtcgggctttggatcgcgcgacgtcatcttacgctttctatcgttgacttctcgaagtcaatcatcgctgagcacacgctccccctgccgttgggccacaaggcggacacaacgctggaacgcgccatgctgctcatcaatgagaccctgagcagcatcgacgccgaagccagcgagctggtcggcatcggcgtggccgtggccgcaccggtggccaccagcgaccacaccatagcgattcccggcattctgcccggatgggacggcgtcgatatcacggccccgttgcgcacggcgttcaacgttcccgtatacgtcgataatgacgcgaatttcgcggcatacggcgaatcccgtatgggcgtggcggcaggcaaacgcaatttcgtatatatctcagccaacgacggggttggcgcaggcatcgtcatcaacggcgaaatcatgcatggcgtgaccggcctggccggtgaaatcggccatatccaggtcgacccgctgggtgccatctgttcgtgcggtaaccgcggctgccttgacaccgtcgtggcggaaaacaggctggtgcagttgctcagcgtcacacacggcaatatgacgctggatgatctggtgtcctttgccaacgaaggcgaccccggttgccgtcgcatcatcgccgacacggccgtgcgtatcggtcaggtggcggctgatctgtgcatcagcgtggatccggaggtcattgtgctcggcggcaagctggccatgaccggcgacgtattcatccaaccgttcaatgaagcgttgcagcgcatgctgttccctgatgccgtggcacccatcgatgtactcgtgtcatcccacccgaacgacaactgcgcgctaggcggcgcattatgcgccatcgagttctcggttcgcaatgacgtcagccagtgaccggtaccaggagaagagtgagaagaaggaacacaccatgaggaattcgagcacacctcctctgctgcggctggaggacatctgtgtgaagttcggcttcgtcgaggcgttgaaatcggtgaatctgtccatccaacgccaggaggtcgtcgccatcgtgggcgataacggcgcaggaaagtccactctgatcaaggtcatcgcgggatttctgcagccgggattcggccatatctatctcaacggcgaacaggtgaccattccctcgatcagggaggcggaccgcatgggcatcgcatcggtgttccaggggcaggagttctgcgacaacctggacgtggcctcgaacctgttcctcggcaaggagatcaatcagattggcatacgcgatgacgattcgatgaactcgcgtgcccgttccgtgctgaagaccctgagctcggcgattcgggtcggctcccctatcgcatccttatccgtcggccagcgccagaccgtggccatagcacgcacgctgctcaatgacccgcagcttattctgctggacgaaccgaccgccgcactgtcggtgatgcagtcggcggaagtgctcgcatatatcaagagactgcgctccgaaggccggtccgtggtgatggtctgccacgatctgccggatgtgttcgcggtatccgaccgcattgtcgtgatacgtcaggggcacgtcaccggcgtgcatcgaaccgtcgaaacgtcctatgaggagattatcgccgaaatcgccggcgtgaccaccgaacacgagtacgaggaaatcgctgagaacccggaattcgattccatggtcaggcagcggaaactcatcgaccgcactatcagcgcggcagtgagccatggcaccggccatgactcaccattagactaacgtcccgttgccggagcgacatcgtcagcgcagagccaggttggccgcgccgatcagaccggcatcctggcccgcagtggccgcgacgatcttggcatggccgcggtaggcgctgccttccaggaaacgctggtagttgtagcgggccggctccagcaggatgtcgcccacggccaccacgccgccgccgatcacgaacaggtccgggtcaagcacggcggaaacggcggccatggtgcggcccagccattcgccgatcttgccgaacgcatacaggccaagtacgtcaccttcctgagccgcttgggacaccatcggcccctccagtttggtgatgtcgccgccgcacagttccagaagacgcttggcgtcctgaggacgacggcgcacggcggacttggcgaagttctccagcgaggttcccgaagtgtaacgttcggcgcagccgcgcaggccgcagccgcagtggtcgccgtccgggaccatcggcaggtggccgagctcggcggccatgccgaaggagccgcggtagagctggccgttgatcacgatggcaccgccgaggccggtgcccacggtcagcgcgaccatgttggagctaccctggccggcgccgtgcacgaattcgccccatccggcgcagttggcgtcgttttcgacgatgaccggcacggcatggtcgatcagcgcgccgacgtgctcggacagatcgtagttgatccatgccggaatgttggcggagaaggtgagcgtcttgcgatccgcgctcacattgccggcggcggagatgccgacggcctcgatatcggtgtgcccggcggccacagcctcgcggtacacctcggcgatgtgctggttgatggcgtcggcgtccatcggcgtggggacgcgccagcgctggatgatgctgtcattttcatcgcagacggcggcggcgatcttggttcctccgatatcaatggcgagcgtggtcatggcttactccttgaagactttcgtaacatgcgagatagcgaaaatagtagcgagccgccatgacctcccaccgcggtttttccgtggttcgtcatgcgtcgcgaacattccgccgatgcgcttcctcatgcatttcacccgttgcaaacgggcgcccccttaacgccggcatcggtgcggacggcgtgtcgaatcggatgcaatcactttcaccgtccttgcggatggcatcgaagaacggcaggaaacaaaaaactcccgacatgcatcgggagtttggtggcgaccccggccggacttgaaccggtgacctccgccgtgacagggcggcgctctaaccaactgagctacggggccgtgcgtgcctcgctgaggcacaagaggatatgttacagcatcatcggattacgacacgccgtctgatacatcgttccttccaccggcgaaccgaccgcaggtgtggtggacggtatgcggaccatatcgttcgaccgcgcacgaccgcactccccataagacagtagccgtcatgcgtcaacgcacgttgtgcgacaacgcggcacgacgcacggccaccgaggccagcaaaccgatgaacagcatgatgccggcgaccagaagcgtccactggccgccttcgacgaaccctgaagtcatcgcatcggcaatcttcggcgcctcgtcgccgaattgggccgccggtccatcaccgctgcggaacacgccgatcactccacccgccgaaccgctgaccgcttgggccagaccgtcgccgaccttggcgggcagcccgagggattcgagccgcgccggcaatgttccgttgacggcca

SEQ ID NO: 645 - DNA, 25109 bp, Unknown
  R14_15m  MAG No. k141_11208
accgtgctgccgggtaccggtgacgggaaggatggcgtgaagtcgtccggtgtgccggtgtgggtgtggctggccgccggtggcgtgggtatcgccgtggtggctggtggcatcgtgttggcggtggtgttgtcgaagcgcggaaagcagggtcgtcgtccgttgccggatgccgctgccgctggcccgtcgccgtatgcgggtccgcgtcagcctgtgccgggtatggcgtatccgaaccgaccgtattcgccgcagtatggcggtcccgggtcccggcctgtgccgcagtatcaggctccgggcccggctcaggtgccatcgcagtaccggcggaatgtcggtccggtatctcctcggtatgctcagcctcagcagcaggcgaatccggttccgcagaatccggttcagccggcccaaccctatcctcagcctcccgccagtcaggttcccaatgtcgcaggcggctatggtcaggaacagggttattccccacaacagtatccgccacaatccgatggtcggaataagcccggccagggccggcatgcacggtaaaccatagagagtattaggaagggaaaggagacatcgatgtccgacaaggataaagacaagaatgttgtcgagcaattgcttgattcagtgataacaagttctgattccaatataggtcccattgagcagcgtctcaatgagattgccaagagcccgaactgggagttacagggaaatattctgtctgttgataatgctgaacaagcagaacaagcagtgaaacatgtggttgaacgtgtatccgatactgatgttttctctggtcaaactgcgcttagtgcaaaacagcatggagaagatttgcttgccgtaaattatgcggatggcctatccagtcaaattgaagcgatgcagcgcatcattgatcacgccaatgatgctcttgagtatgtgaggaagcaaagggagtcattgccggggaaccagcttgatgctgtttcatctgctgcgatacgtatagcagatgtgggtgcgactgttctcttgccttttccgcttgctgctggtaaagcaactattcagattcttactggttggactgacccggtagggaaaatcaatgagcagttatgctcgaatagagagaataaggcgcaagaactacttcttgatttttataagttattgcgtaacgcttcagatagggcgtattcggtaaaaccagtagtctccacaccagggaagcatcaggatattggctcgacggatgttgatatttgggatcagtctggtgttggtggtcgtgttcctggtcctggtacgtatttgggtgatggtgcgtatgatctcaatggtgatggtttgccggattattacgattacaacatggatggcgtgccggacgtgtgggtggattccgatggggacggcattccggatgtctatgatacgtatgatccgaatgacgtggcccagaaccggaagtatgccgaggctgttgaccagataggccggaaccgccggaccagtccgtacgacaatgatcggggtggcaatggctctggtggccaggacgtcgatgatcgtccggggtatgtggttcctgatgattctcgtcgtcccgcgcctccgagcccggacccgtacaatccgtatgatcccaacgacccttatgatcccaatggtccgtacgatcccaacgacccttatgatcccaatgatccgtacgatccgtcgattccgattccgtcgcgcaagcccaccgataacgacgtcgttgacgtcgattccgatttggatctgtcgccggttccggttgtgccgaggccgacggtgtccgcttccggtttgggtggttcctccgcgggtctgggtgctggtgcgtcccttggtggcgttggcggtgccggtctggctcttggcggtgccggcgtcggcatcggcgcgggtgtgtcgggtggctcgttcttcacgaacgcgccggtccatgcgcaggtggtgccgggtggcatctcgggcgccaccggcatggcggccggtctgaagtccgctggtgccgcttccggggcggcggcttccgctggccgtccgggcatgatgggtgctccgggtgccgccggttcgaaccagtcgaagaacaagcgtcagggtttggggtacatggctcccaagctcgaggatgatgacatcgcgatcaggtccgtgggtgccatggctggccatcgtgccaggccggccggcgactgacgcccggatcggctaggggaaaggagcgttcatgagtgatcagattcaggtgagcaaaagcgcgcttgccagtttggccaagggctacaatgacgcggcctcggggttcaccaaaatggggttcggcttgcaaagcagacaactggaccccagctttggtttggtgctgcagctggtgaaaggcgattacgacagtgccaaggagaacacgctggattatctgtccagtctgggttcgctgatgagcaccatgtcccgggacatcaccgatgccattgccgcctataccgagggcgaccagaagaactccgattccattcaggacctgctcaacaagatcgagaaccttgaacagcagaacaggcagttgagcgacaaggtcggtgaactggaggagaaggtcggtgaactggagcagggccagacatccggcggcaccggaggctattccggtggcggttccggcggtggctccggatattcggccggtggctccggtggtgcggcgagcgctccctcgatgccggactatcagatgccgagtcggccggcctatcagcaggatgcttctgggaattaccggaatgatgctcccgttgatgtggattccgatatggcgggtgacattggcggcagtctcgacccggatacgaatgccaccgatattccggatattcccactccgcccagccatgacggcaccacgattcccaagccggaacgggtggacaccacggaaagcgtggatatcgatatggatggcgatggcgtggtcgattattcggtgaatgccgacctggattccaccggtgtgcgtttcaacgatgacggaaccgtgacgctgagcaagaacggtggttcgttcggtgctgattccgcgcagaccagtggcatctccttcgacaccgacgacgatggcgccgatgatgttcatctggagctcaaggacggtcaggatgccagcgtgcgtgtcgttcccggcgccgagggcagcggcacgcgatacgttcaggtggatacggatggcgacggtgtctatgagagtagctatgccgtgcgcgacggtgccgcagcatcgggtgatgcgggctcgggggtattggacggtgcttccgccgcgactgggacgacggccgaggacagttaccggaccgaggtgagcaagggcgaggaacaggcttggcggacactggccgagaccgacccgttgcaccgatccgttgacgagctcaaggaactgttcaacagacgcgaagagatcgagctgccggaaacgaattcgctttcggatggcgtctggggcggtgcctcggcgaatggctcgatcacgattacgtttggtggtaacaagggggtgacggcatgaacgaatggctgaggcatgcttcggctcgtgtggtgttcattgtcgcggcagcgaatggtggcggcgatgtcgagcacggtaacctgtacgagaaccaggattacaatccggacgtcatcgatattggagacaatgacaacactggtaccggcatacaggccaacgagggggacttaatatcttctggatacaaattggctgaggccggtgagaagttccagtccggcaatattgccgatattcgtgacggggttagcgatcttctgggggccacaaatattcagagtatgaatagctctcttgatcgatggtgggacaacagcacatctcccctgagtatcgcggctggtagaacgcaggatcttcgagatggcatgagccatggtttggtgagtgctagaaatgtcactcgatatttttctagtggtttgtcttgggctcgtatgggtattggtgtgatcgacacggtgtgcaatgtcttgcatatcacgaaccccgtcgatgagattctgcgcaagccgttcggtggcgattgggatgaattgtcccagtccgctcaggattggcgtggcatcgccaccaatctggaaacgatgcatacgggattgcagcaggcccagcggcagatccggacatcgtggaagggcgaggcgttcgaccggtattcgttgtgcaacgaccagatcggtcagatgttcgagggcggtcccgatatctgccgtgagatcgcggatggtcttgatgcgttggtggatgtggccaagaagtgcttcgactatgcgctggatgtcattgaggagctcatcgacctgtgcatggacattgttgaatgggcgtggaccggtgtcggtctagccgtcgtggcggccaagcatgcaggatctgtcatttccctcattcagaatggttacgatattgttcagggcttgtatgatgccgcgcagtcgttcaaggcggttacggcggcggcttccccattggcccagcaggcgaaatcatttgctaccagtcttgaacgcacctgagccacggagcagaggaggatatacacatggcttcacaaggatttgaacaattcatggcgcaggtccggcagctgagcacgttggtggataccaagcagaaggagctggatgagctgcgcaagaagaatgccgaggaacgtgaggagcgtcggaagcagtacgccgaggaccgccgtgcgggcaagcagggccgtgcttggcaggtgctgcagcagcgcatcgatatggggcagacctgcgagcgcgacatcatcatgggcttggatacttctgccgaggcacgtgaggtgcgtgcccaggcggccaaggcattggatgccatgcgcaccgcggtcagcgagcttccggaggacgattccacggcgcagcagctccggcagcttcgcgagcgtcagcaatcacgctgattccattgtcgtcgataaaggtgatggtatggatgttgttgaggtttgggatcggtccatgcgggcttgtgggtgggtgccgattccgtcttggccgtggacgttcgataaggtcctgttgcatgatgccatcggcatgcgtgcgccgaagatgccgcgtactgcgaatacgcagtggttttacgccaaggggccttgggtcacgttccagttgaatgtgatggacaatctcagttggtggacgatgtactccgcttggtcgttgcagacagtggtgttgccggtgcgttctcggatgtcggggtatgcgtggtgcaccactacggatttgaagggcaagccgaggcctcagacggtgggtggcttgtctcctgaggtgttccgtatcctgtcgtcgtctcctgcccgtctcaatttgttggtggcggatgggctggcgtatttgtggacgccgattagcgttcatcgtcttttggaatggcaatatatgaccccggaactggagtcgcagatgctgccggtggcgcaggagttgtgccggtacgtgtgatggcgggctgtccgtgctgctgaccgtatgattccctcacgaaacggtatggcgtattcttaggaggagcagccgtttcgaggggtttcggagatgaggagaacggggagaggggcatggctatggcagcgcaggatgcctatgagcgccaacgggtgaatgttgccgtggcatgggctgtggccgcctcgttatgcgtcgcattcgcggtattcggtttcgatggtgtaatgcgtggtcgtgccgcatccaccgattctgccgtgttccagggtttagtcagtggactcatcggtgtggatgcctccgctaaagatgccgtgaccgtaagcgccgttgtatttaatgcgttcaccgccacagtgttggcattactgtcctactacgccgcacatgtgacggtgaggaccgactggcatcgaagcgtcgattatgccggctccttggccacggtcgttgccgccgcgatagctgcgggcccagcgcttgcccgtattgcgcagattatgtcggttactcgttctgcggcactggcggtcttcctctctgcgacccttgtggccgttatggcggcatatatccaatacgcggcttcgggccgcattacagtagcccttgcccgactgctcatcaccgcagccgttattatcgcgctattcattatcgcagtagtaatattcgccattcccgcaccggtaatcgcagcggcctgctccgtgggcggtgcatggtatgtgcatgcccaagcgaatgtgattttgcgggtgccggaccggtacctcatcgaatggcgtcgatacatgtcccagcgttggacggttcgaggcgcggttccggaaaattcacgtccgctctatacccatgacatcagcgaagacatgactattttttctgccgaatacaccatgggtcttgtggttgggcatctatatattgctgccggatatgttgtgctatgcctcactgtgcctgccgaaccggatctcttcaccactatcggcttcggcgcatattcggtgttattgccctgctatctgttgctccggccgcgcaccgcgggcagtgcgctggaacgtatgcttatgcgttcatgcgcggtattattgcctgcagcagccctgatcacgctgaccaatcatgacgattggcgttggctcgtgacatggttggtattcgggctgatagccgtgggcatagtgatagccgccgccacattggcagtgtcgggcggcttcaagtcgctgatgttgtctcgtgtcggcgactgggtcaccaccggtagtcttgcattgatgggaccagcggcgttcctcgcctcaaacgccatggagatgattcgggggtttatgtcatgaccgcagcgcccatgcccattgcttcccaagctcctgcaccacgtcccggtccgtccgtgacccatcccatggtgggggagggataccgttatgctacggtcgggcgacgtatgctcgcgctgctgattgacgtagcatttgtaacagtggtgggcggcgtcactttggcgctcagccgcaacgccatattggccgtcttgtgcgcaatacaggctgtcgccctgaactgggggtgggaggcttgccgcggtcgtaccatcggcaaggcaatactgggcttatgtgtggtgcgcaacactgcggatatggggcagccgggcgctggtctgctacctgccggtccgtggcgtgcgttggcgcgtgtattgatcacatcattgggctgtttggtggcgattgtcgccgcatttatgctggaatggacctcttcactagaccaggtacgtcatcgcggattgcaggatcggctgtccggcactgccgtaattgatacgcgtgtgcagtatgtgacggcaatgtctgatacgggtaatgccatcaccgataataccggtaccagtaccagcaccagatttgactctacttttgatgatgaggatgaagatttggaggcgatggtcggcggtattcttccgccagccactgcgcccacaccctccggccgttcggattcattcagggctttgcgcgcggtacctgctgccatagagccgtcgtccgtacggcctgcccaggtgcatgccgggacattgcaatcatcgtctaccgccatacaggtgcagtctgtgcaaaccgaatccgttcaaccggtgccttcggcccccaccatctctccagcagtgcccagccctgtaccgtctgttacttccaatacagcaaaacctgtaattcctgcagtgtcccagactgccatgccgcggcacagcagtggtgctgcaacgattgccatccccacgccggcgggcacgacttcagcgcgagtgcatgctgtgccgcctgcattgccaaccgtcggaacaagcccggtcgtgccatcatcttcggcggcaccaatacccactggaccactgcctgttcccaaggccgttcctcaggctgtgccccagcgtcccgtgccggcaaaaccggcagctgccaaacaggtggcggtattgtatttcgaaaacggcaatggtgtgcatctggatattcccagccgtgctctgctgggtcgccgccccaccagtagcgacccaaacgacgtgctggtcagagtaccagacaccaccggcaccatatcccgtacacacgcattgttggagattgcgtccggccggatgtgggtcactgacttggaaagcaccaacggcacggaaattctgaccgaagacggtgccgtgaaacatcttgaggcgggcgcgcgtaccgaaatagcgtttggcacacgtatattcctaggaagcaccgccataagtgtgagcctgctgagaaacagggagaaaaaataatgagtgagataacgccacaggtatcctcccgcatagaccagcccaaagtgcctcacggcaaggtggtgttgcaggccccgcctgaattggagccgagcgacggtgtcaacagtctgttgaccatgctggtaccgctgttgggcagtgtctccgccattgtgatgatggtcatgtccaattccggtctgaccggttttctgaccggcggcatgttcatgctctcctccgtgggcttcgtactggttaacggcgtgcgtcaacgttcgcagcgcaaagcgaatctcacttcgtcccggcgtgaatacttggcatatttggctgaactgagaaaaaccgttcgtaccgcggccaaaaaacaacggcgtgcggaactgtggaattctcccacaccggattccttggtggccatcgcgcaggaacatgtacgccgctgggagcgcatcccatcggatgatgattttcttaatgtgcgcatcggttctaaagacgagccattgtgcattaccttggaggcgccggagctgcctccgctggccgaactggacccggtctccgcttcagcggcgcaccggttcatgatggcccatcaaaatctgcatgatatgccttgcaccatcgacctgcccaagtacaagcgtatcgaaatcctcggtgacgctgatcaggcgcaatctttagcccgcaccttgatatgtcaggcggcggtctggcatgggcctgaatatctgaagatcatcgtgctggcggcccccgaacagcagcacgcgtggcgctggatcggcgagatgccccacgcatggagcgacgagtccaaagatccggcgcttggccatggcgaagtgatgctcgctggcagcgtggaagaagcgaaccgactgattggcgaagacattttgcatcgcagccggtttaccggcaccgggcaatcgaccctgccgtacattctggtggtacgtgatggttcagtgccccagggtgacgcgaacaacagcgatgatgatggcttggtgcgccgcgacggatttgacggcgtcacccttatcgatcttcctgaagagtggggcgatcttgaagaagagcacgtgttgcgcgtcatcttctcccaatcctccatcgaaatgggtctgaacgtggtacgcacttccacggtgaaccagattgagatcatcacatcatcggagcgcgtggacacctgtgccccggacagcctgagtattcaggaagccaaggccgtggcctccagactggaacagttgcccagcgaagaggagaacggcgacaacaaggaacaagcctcccacgccaagaagtcctccgaattggccgatctgctgggcatcgcggatatccatcacatcgacttgaaccgcctgtgggcatacaaaaccggcaaggaacgactgcgtgtgcccatcggcctcaacgcggacacctccatcacgtacctcgacatcaaggaatccgcccagtatggcatgggcccgcacggtgtgcttgtcggcgccaccggttccggtaagtcggaggtgttgcgcacgctggtgttgtcgttggcgttgacgcacagccctgatcagctgaactttgtgctcatcgatttcaagggtggtgccaccttcgccggtatggaaggcatgccgcatatctcctctatcatcaccaaccttggtgaggaagcctcgttggtcgatcgtatgcaagacgctttgaccggtgaaatgacacgcaggcaggaactgctgcgcaaggccggcaacttcgccaacgtatccgattatgagaaggcccgtctcaacgggcgtaccgatttggaaccgttgcctgcactgttcgtggtatgcgacgagttctctgaactgttggccgccaaaccggacattgtcgattccttcgtgaacatcggccgactgggccgttctctggaagtccacctgctcatcgcctcccagcggcttgaggagggcaagctgcgtggcttggattcgcatttgtcataccgtatcggcctgcgcacgttctccgcttcggaatcacgtgtggtgctcggtgtaccggacgcctacaccctgcccagcatccctggtgtcggttacctcaagccagacccaagcaccatgattcgcttccgtgcatcctatgtgtccggagctccgaaaggcgagccggacaccaatccctcgaacttcgacgtggctgtggatcagatgcgtcgtgctggcggtaagcctgcacatcaggtatggttgccgccgctgaatgtgccgaacacgctcgacgagttcttccccgacttgaccgccaccgcgcagtatgggctgatttccccctcccgacgcaaggcggggtacttatccgtgccagtggcgttggaagacaagcccaaggaacagaaacgcgaggtattgagcctcgacctgtctggagcgggcggccatgtggctatcgccggtggcccgttgaccggtaagagcacgttcatgcgcaccatggtggcttcgcttgcgttggcgcatagtcccactgaagtccagtgctatgcgctggatctgggcggtggcacgttcgccggtatggaagacctgcagcatgtggctggtgttgctcttcgtggtgacgatgagcgcgtcaaccgtatgctcgctgaagtggtgagcatcatcaacgcccgtgaacgttacttcaagaaccataagatcgattcgattggcacttaccgccagatgcgagccaagggccaagcggatgacggctatggtgaggtattcctgttcatcgatggatggcagaacttccgcacggaatatgaagacctacaggccaaggtattggatatcgtctctcgcggtctgacgttcggcgtgcatgtggtcatctccacgagccgttggatggatctacgagccaacatcaaggatcttatgggcactcgtctggaactgagactaggtgatccggctgattccgaaatcgaccgcagagtggccatcaccgtgcctaagggcatgcctggccgtggtctggcttccagcaagcggcatattctggtggcattgccgcgcatcgacggcgatcatagagccgactccatggcggacggcatcaaggatctcatcgccaaggtcaatgccgcttggaagggccccaagccaccaaagctgcgtcttctgcccaccatgctgtctcgcaacgccttcctgaccaccgtgccggaacagacgcgtaacagtcgtttcgtactcggcgtggatgaagccgacttgaagcctgtgttgttcaaccccgtgcgagcgccgcatatgtatgcgttcggcgactctcgctccggcaagtcctcgttcctgcgtctgattgctcaggaaatcgagcgcttttacgacgtgaccggcggcaaggccaagatcttcctggtcgactatcgccgcgctctgcttgatgaggtgaatgacaagtaccttggccagtatctgaccaatcatgaggaaaccagtcaggcgatgaacgatcttgccgccttcctggccacacgtattccgggctcggacgtcaccgcggaacagttgcgtcgacgctcgtggtggaccggctccgacgcttacgtgctgattgacgactacgatctggtctccacttcacgaggcaatccgattcaaccaatcgtgcctttgcttgcacaggcttccgatatcggcctgcatgtattcctgacgcgccgcactggtggtgccagtcgatccctgtatgatccggtgctgcaatccttccaggatctggccgtcaccggtttgctgttctcgggcgatccgaatgagggacagcttattggcaaaaccaagccgaagccattggtgcccggtcgtgtgcaggtggtcagtcgagatagcggcacattcctggcacagctcgcctacgcgccctccagcctgccgcccatggcaccaatgaactgattggcctgaatgtttgattaccgtctagggattgtcattcatctgcgctgtgcttcgcgtctttggcgatgcgcaaagcaatcagcgtgatgatcaccagaatcgcggccgcacctactacggccaagacagcacttaccgtgccatccgaatgcatggtggcctcgaccttaagatgttgtgcctgctgggtgcgaggaggcgtgtacggctcatattgtgtgctgcctggaccgcgcatgccgttggccagcgtgatggtgatggctccatacgggttgatttgcccccacccgcgattatcgtcgcgtgcgtcggggtccgggcggttgccggaagcttcgattcgctgcagccattgcaaggcgttttcatcgggatgacgctgcgccaccaaagccgctacaccactggcatatgcggtggcgtagctggaagatgctgattcggcggaaaagacgcaatccacgcctctcggaatcgtggacagcacggattccccgggggcaagaatgtctacctgctcgccactgatggaatcggatgacgcatggaaggacgtgtccgcagccgccacgcccaacacgtccttccatgcggcagggtagcgaagcccatcctgcgtggacgacgaggtgttgcggttgcctgcgctggaaaccacgagggaacctttggcttgtgcgtattgcacggcaagttgcaaggtgccactgggagccacggtgctttgcgagatattgatgatctgcgcaccatgatcggcggcataccgtatgccatcagccagcacgtccgggctgggaccgccttgcgaatgactggaggaattatcgatggagttatacacgcgcaccggcaggattgtggccttgggggcaatgcccatcagagaagagccttctatttttctggcggcgatgatgcccgccacaaccgtgccatgcccataattatcagtgcggccatcctgaacgttgtctcccgccagattgactccaggcagcactgcgtcgccagccagatgcgggttgttggtgtccacgccggaatcgaccacggccacaatgatgccttcgccatccgccagagaccgcaccgtggtcatgccgagcgcatcctcggtccatggtgtgctggtgatgtagttggttttaccgatttcacagctgttctgatcggcccatgccggtgtaggcgagagtgccccggctgcaagcgtgccacatgccagagcagtgcatgcggcagctgcgatgccggtgcgaatacggtgggttcgtgaggtgcgtgttgtcatcgtcatcattgctttcgactggatgccgaagagtcggatgagctgttcgcgtcgggtgtgccctcggtgcctgcgctagtagcagaggattgtcctgacgacgatgttgccgctgcctgatcctgcgctgaaatctgtagtccggcgctattgctgctcaaagccactccggcggagaatacgttgatccaggagcggggtattgcggtgacatcatttttggtaaagcccagtcgcttcaatgtttcttcggtatcgtccggaaccgggtaggccacaccggtgccatcgaccacatacaatgcgccggtggtaccgccggcactgtctaccgtgcgcagcagcgcaccgctgccattgatgatggtggtaccggaatcagtacgttgcgggcggttcttgtcgtcactgatggtcgccaaggtgatgccggcagcggcattatgcgtggtatcggtttggaatttggacggttccaacgcagcgcaagtgccattgccggaattcatcggcgttaactggccatcgggccaatcatcgggaacgatggaatcggtggcattatggaacccggcctgctgctgttcctgtgcggtcatggtaatggtttgcgcaccggcaccgaggctcagctgatacatttccaaggccatgccattcaatggcgagagtgtgccatcggcaagcaccacatatttggtgttgtcgttggaggggtcggcaatcagcgaaccgacggtgtatgatgtaccgcccaccgcgacttccgtgcctttgcccctgacatccaacactccgagatcggaaccgccggcaaacaagtccagccattgcaccggagccttgggagcgttatccaacgtgagttggccgacgccgagaatacgaagcaccgcatcgcgaatcaggccttcctgcggcagacgatgtcgcagaccgttgacaatgaggtatccaatgccatctacgttgaccagcattgcctcattacgactggccggggtggtcacggcatcattggtgatgagattgttggttgaggcgcgctcggtgtcaagacaactcaccaggaatttcgatacgagcctcgaccggttgggcagaatatccggtgcgcccacaatgcctacgctggagccgatgggaataccttcaagttcgttgtcgtctacggtgataactcggtattcgtctgaggggatgagcagacgtgcgctggtggtgttgattaccggatgcagcacaccgttgacgctgatgaatcgagatgcggtgtttttgcccacaatgagtttgttattgctccagtctgaaggtaggccagggctgatgatgccatagaacacactgatcagaaccatgatggcggtcaggccgatactgaccatcaccggcgtcaggcctttcttaggagtcagctccttgccatccggcataccggaagtgaaggcagtaatgagcctggcccgcgaatagttttgtgcgtcctgcaggtccttcttattcgccatggcccctcctcacaatcccaatgccacgtaggcgagcggcagggtggccaccacacagattacgttcgaggcgtcagccagacgggtcatggcgatggaatcgtgcttggacagctgtgtgccgatgacgcacagcaacgctcccagtgagaacaagctcaccaccaccgaagcccacgtggggtgaaacaccgtgcatgcggcacaagacaggcagatgccggcacctgcggtgataacggtgatcagcatttccgattgtgcatagatgcgcctggaatcaagcagcatggctgcgaacagaaccaaggtaagtgccacgcctgctgggcttgcactggaaacagccagaggcgtgccgaacacgatcagtgcgctggtggcagcgcgcaggtcgaacagcagcgtggagccgatacggtacttattacgcacttcgctgatatcgatgttcttgggcagcgcgaaaatctccgattcgctggtggggctgtccacagacaatcgtgcggaagacaggctgagccacggcagcgcattggcagccagaccgagcagagccactgccacgatccatacgcgagtggaccagtgcggcatcgttacacacacaatgccgagaatcaccagtgctgcgccgataatgacaggaatcaacgcgtacagtctgctcactgtaagcagcaaacatgaaatgccgccggccagcagtaaaccagcaccgataccaacggccgggaacccgtagaacgagggattgaacagtgaacccatgagatgatatccggtcacgccggccaaaagcgaggcgactagtgacagtgccagtgcctgccgatgcatatggcgcgaagccagtaccgtggcaatcgccagtaaagcggctgcggtaatgcccgctacgccagcattgatgatggatagtggggccaatgccagacaaatcgctccgacacccagtagcacacaactgaccaccattgtggtcactgtggtattggcactggtccacggtcgatgagaacgctccaccgaatcggccaccgcctcaaccacatcgtcgtagacgatatcctgatcgcccaaggcgttgacctcgagtttgagacgttcaccgtctcggatggcctgatcggccagcgaagcgggattattgatggcggtttcgtcgtcacgggtcagtcggtagccggcatacaccagagtcggatcgaacacacctagtttcttggcgatatcaggcagcagttcagctaccggaagtgtcgacggaacattgagtttcgcggagcgtttgccatacaccacagtgatggccacgcgcggggatgatgcggaaggcgagggctgattggctggcactcccatcgcaatcgaaggtacgggcgttggcgccggaacgtgtggtgctatgcgcggcggtgccggcatcatggacggtccggcgggcgtgtggcgatgcgacgatgccatagggtgcttcctcttctcaataaactcccaaaggtctactgtattcttgtattctctcacacattgcgggtatcgggaatgccattgtctggtcctagagcagattccgtggcgttttttgccgagtcgggtcctagggtggagcacaacgactacgatggtgcgggtaacgcgatacaaggagtggaacttcatatgccgaagatgtttggaaccgatggtgttcgaggactggccaatagggatttgaccgcacgtctggcgttggatttgggcgatgccgccgtgcgtgtgctcggcgacgccggcacccaagacgatcagcctgagggacgccgccgcgcgctcgtgggacgtgacacccgtgtgtccggtgattttctggcttccgccctgtccgcgggcatggccgccggcggcttcgacgtgatcgatgccggcatcatccccactcctggcgtggcctacctgacctccgtgctcaacgtcgaaatgggtgccgtgatctccgcctcccacaacccgatgcccgacaacggcatcaagttcttcgcacgcggcggcttcaagctgcccgaccagaaggaagacgacatcgaggccgtgctcggccaggactgggaccgtccgaccggtgccggcgtgggccgcgtgagccacgaccagaccaccgccaccaacctgtacatcgatcatctggtggccaccatcgctccgctgaacgatgacaaaacccagcccaagccgctcaagggcctgaagatcgtggccgactgcgccaacggcgccacttccgtggtggctcccgaagccctgcgccgtgccggtgcggatgtaatcgtgatcaacgcctcgccggacggctacaacatcaacaagaacgccggttccacccaccccgagcagctgcaggccatggtcaaggccaccgatgccgtgatgggcgtggccttcgacggcgacgccgaccgttgcctcgccgtggacgaagacggcaacatgatcaacggcgaccagatcatgggcattctggcccgtgccaagcagcgcgaaggcaagctcaaccacgacaccctcgtggtcaccgtgatgagcaacctcggtctgaagctcgccctgaaagacatgggcatcaagaccgtggaaaccgccgtgggcgatcgttacgtgcttgaggaaatgctcaagggcgattactcgcttggcggcgagcagtccggccacgtgatcaaccgcgaattcgccaccaccggcgacggcaccctgaccgcactgaccctgtgcaacgaggtcgtcaagtccggcaagagcctgaaggagctcgccgccgacttcccgcagctgccgcagaccctcatcaacgtgccgaacgtggacaagaaagccgccgccaccaacaagcgcatccaggatgccgtggcccgcgaggaggaactgctgggagacaccggccgtgtgttgctgcgcccctccggcaccgaaccgctcgtacgcgtgatggccgaagccgccacccaggcctacgccgacgaagtctgcacccgcctcgccaagatcgtcgccgaagaactcgcgctgtagcacccttccctaaggaaaagcaatgtttggaaagaacgccaaagtcgacctcgaactcaaccgtgatgtcgaacaactcatcaaaaccggcggcaaggagaagctcctgcccatcgtgcaggccggcgaaccggtgttgcgccaacggacggtggcctaccatggccagctttccaagcgtacgctcgccaaactcatcgatacgatgcacaccaccatgctggaggcgcccggcgtggggctcgccgccacccagatcggcttggggctcgcgctcgccgtggtcgaagaccacgtgcgcgacgacgaggatgatccgcgcgaaatcgcggaattccccttccacgtgatcatcaatccgagctacaaacccaccagcgacaaaaccgcctcgttctacgaaggctgcctgagcttcgatggataccaggccgtgcgcaagcgttggctcgacatcaccgccgaatgggatgatgaagacggcaagcaccacagcgagccgttgcacggctggcccgcacgcatcttccagcacgagaccgatcatttgagcggcgaactgtatatcgatcgcgccgaaatccgttcgctgaccaccaccgaaaacctcgaggattattggtgcgacgacccggtacccaccgaggccgccgaagaactcggcttcgcactatgatcgaccgcacatggctggacgccgccaagggagacattccccaatgggcggcgtccatgcccaaagacgccgacggcaccaccattgactgggactgggtgcgttcgctggacctgatgcatggcatcagcgtattgctggcgcttgctgcagatggtgagcaatatggcgaaaccgcagcacagcctcagctcgggttgggccaactggaactgacgccacaagctatccacgacgcattgaagatcgattacgccacacgcgagcatctggaatcaatcatcgcccaatgcaacagcacattcatgaccgattacgatcgattcatcggctcctatcgtctgcctcgcgcgctcgcctacgccaatcgtcggctcaacgacaacatcaacacgctgttgcatctgggcgaacagcaacacctatgggtggtcagtcgcgaacggcgggggaggactaccgttgccgtgctcaggccgtactccggcagccgcccatcgaacgatgaccaaggcatgctgaatctgagcggtgaaaccggtgacgcatctgccggaaacactgctgccgaaaacagcgatgtcaagttccccacaacagtcgccttggacgatatccaagaccgtacggcggcgattcttgacgcacgcgccgaacgacgtaaggcccagcgcttccagaagcgtgcgggcgatgcggcgatggcccgcgccaatctctccggcgcgacttcgccgggtggtgccgcctcgtctggcaacgctaccggccaccatcccaagcccgactggcgcgacgcctatctgcccggccgcgacgtggacgcggtgatgggcatcgacatcgaaaccaccggcatcgatccggcgcgtgactacatcatcgacgtcggcttcgagttcatgaacatggccagtccgcgcccggccggcgaacctgagacatacgcctatgagcagggctattacgccgccggcgacgcctacggccagtcccgtctcgcttttggcgtgccgccggaaaacgcggcgctcggcaacgccctcatcgccaaactcaccggcatcgatgtacgcggccgcagcagcgaggccgggtaccgactcttcgacgaatggccccaagcccaggccggcctgctcgcgcggcttacccagcagccgtacgtggcgcataacgccaccttcgaacatagctggttcatgctgaacgtcgccggatacgcggaaagctaccgtgccgggcgcatcaccatcatcgataccctgccgatgagccggcagtgggaccccggcgcggtacccaccaacgagcatccttacggagacaatacgctcgacgcctacgccaaacgtcagggcgcgcttgattccgcccacaacgaacgccacttgggccttgaggattcgcacatcatgctggtggccatgaaacaccatctggcggcgctgaaagcgcaaaggaaagggccgtgggggcccgccggcagggctggcgtcggcggcaagtcctgcggtcgtaagcggtgagtacactattggtctcgtgagtaactatcaggacggccgacagcagcgtgagaaccgccgccgcaccatcgtgcgtgtggtgtgtgttgtcatagctgtggccatgctcggctccctgatcatcccggcgatttacgcggggctttgacgttgccttcgcatattcgtgcccgcagttgaacacgtctgatgcgagggatttgtgaggtcgcccggccggctatcggcaaggcaggcccggaaccttctggcagcatggattgcaggcggatgcgtgtgtggcgcggcaatgcccgccaacgccagaggaatgtgcgaaggctgtcaacaaggacgtgacttcccaaagaatctcaaagaatcaacagtaaggtaaaccacgatggcagaatttgactttacccaggcgatcggcgaagcccgcgccaaatacgaatccatcgccaaggcgctggacgtcgaccggctcaaggccgatatcaaggatctcgaaacgcaggccgcggccccgggcctgtgggatgatccggaaaacgcccagaagatcaccagccggctgtccgccgcggaatcgcagctgaagcgtctgaactccgcctcccagcgcatcgacgatgtggaaacgctcgttgaactcggccacgaggagggtgaccaggactctctggacgaggcgcaaagcgaaatcggcgagattcagaaggatctcgaccagatggagatccagaccctgctcgatggcgaatacgacgaacgttccgccgtggtgaccatccgctccggtgccggcggcgtcgacgcggccgacttcgcgcagatgctgttgcgcatgtacctgcgctactgcgagcgtaacggcttcaaggccaaggtcatggacacctcctacgccgaagaggcgggcatcaagtccgccaccttccaggtggacgccccctacgcttacggccgtctgtccgtggagggcggcacccaccgtctggtacgtatctccccgttcgacaaccagggccgccgccagaccagcttcgccgccgtggaagtggtgccgctggtcgaggccaccgaccatatcgacattccggatacggacatccgcgtggacacctactgttcctccggccccggcggccagggcgtgaacaccacgtactcggctgtgcgcatcacccaccttcccaccggcatcgtggtgaccatgcaggatgagcgttcgcagattcagaaccgtgcctccgccatggccgtgcttcagtcccgactgctcgtgctgcgccacgaggaggaggccaagaagaagaaggagctcgccggcgacatcaaggccagctggggcgatcagatgcgctcctacgtgctgcacccctaccagatggtcaaggacctgcgcaccggctacgaaaccagccagactcaggccgtgttcgacggcgacatcaacgcgttcatcgaggccggcatccgctggcgccatgaacagcgccgcgccaccgaaaccgaggagtaaacagcattatggcactgatctcactggacaatgtgtccaagatctatcccaaaggcacccgaccggcgcttgacgacatcaacctcgatatcgaacgcggtgatttcgtgttccttgtgggtgcgtccggttccggcaagaccacgctcttgagcctgctgttgcgcgaggaggaggccaccagcggcgagattcgcgtggccggcaacgatctgcggcgcatcaccaaccgtcaagtgccgcagtaccgccgttcgctgggcttcgtgttccaggattacaagctgctcaataacaaaaccgtatgggagaacgtggcgttcgcccttgaggtgatcggcacgcggcggtccaccatcaaatcgttggtgcccaaggtgctgaataccgtgggactcaccggcaaggaaaagaactatccgcatgagctctccggtggcgagcagcagcgtgtggccatcgcccgcgcctacgtgaatcacccgcagattctgctggccgacgagcccaccggcaacctcgacccgaccacttcgctgggcatcatggaagtgctggacgccatcaaccgcaccggcaccaccatcgtcatggccacgcataacgaagagatcgtcaactcgatgcgcaagcgcgtggtcgaactgcacaacggcaagatcgtgcgtgacgaggctcatggctcctacgattccgccctgttcttcccggatgccgaagtcgaagccaagtccgacaccgcccatcatgtgctggcggcggcgaccaaggccatcgagggcagtgacgagccgtctgaaggcatcgcccgtttggccaattccgtgcattccggccgcaccggccgctatggcgagacgtttgcgccgctggaagacacgctgacctggggcaagggcattccgttggatgagcaggccgccgccctggaaagcacccaggcgttcgacccgttcaaggacgagtccgccgcgaccgccgcggttgccgatacgtccgtgtcatccgccgccgagccgccggccccgccggagccgcccgcaccgccggccaacgagcagtccgccgccgagcagcctgctgacgagcagtccgccgcagaccaaacatccgacgatcaacccgctgagggcgcgaaggagtaagggggatcatcatgcgagcacgattcattctgtccgaaacgtgggccaacctcacccgtaacctgtcgatgctgctgtcgctgacgctggtcaccttcatctcattcctgttcatcggcgcttcggtgcttactcaggcgcagatcaccaaagccaagggcgactggtacgacaaggtcgaggtcgtggtgtggctatgtcccgacggcaccagccagtccgcgaactgtgcttccggcaaatcgccctcagccaatgagatcacggcattgcagaaaaccattcgcgatgaactcaacgacgtggtctccaacatcgactatgtcagcaagcaggatttctacgacaacaccttcaccaagcagtacccgaacggtgaattccaaggccgtacgctgaccgcggacgatatgcaggactccctctggctcaagctcaaggaccccaccaaatatcaggtggtctccgaagtgctctctggcaaggagggtgtggaagacgttaccgatcagcgccagatcttcgacccggtgttcgccgtgctcaaccgagccacggcggttacggccgtgctcgccggcgtgatggtggtggtcgccatcctgctgaccggaaccaccattcgtatgtccgccgcatccagacgaaccgaaaccgaaatcatgaggtacgtgggtgcctcgaactggacgattcgtctgccgttcattctggagggcaccatcgcctcgctgatcggctcggtgctctcgtgcctgatgctttcggctatcgtcaacgtgttcgtcaccggctggctggcgaaatccgttacatggattccttatgtgaatcagctcacggtactggtgatatcgccgttcctggttgtgggcgcgatactgctgtccatcatcgcttcaaccatctcgttgcggcgttatttgagggcgtaacgcgaccggcttacccgcgagaaatgtgatgacatcgtgtgcaagcctctcaggttcgcatgttatggtattggcttaagtgagcgaaaggactattcacatatgacgaacgtacgtgtgatcaagcccgcactggcggcactggtggccgccgcagcctgtgtgggaggtctggcgttcagctcggcacagcctgcccaggcagacacctattccgacctgatcaatgcgcagaaccagcacgccgcgtcggtacagcgcgaggccgaactcaagcagcagctggccggtgccagccaggacctggcgaataaggtacttgagctggacgatctgaccaacaacaagattgtcgccgcgcaggccaaggtcacgcaggccaacgaggatgccgccaccgctcaggacgaggccgacgccgcatccaaacgtctttccgccgcgcagaaagacaaggagacgctcgaggagcggatcaagcagaccggcaaggactacgatgacgcgcacgccgccgtggcccagctggcccgtgacgagatgcacggctcgaatgcttccgacgtgatgagcgtggtgacgggtgccaccagcacacaggacttcgtcaactccatgcagtcccgggacgcgttgtcccgcaacgaggcgaatgcggcttcctccgccgcgacctcactgagcacgtcgaagaatcgtggcgagcgcttggcggccatcgaaaagcagatcgctgtgctcaagacccaggccgatgagaaggccgcttccgcacagaccgccgccgaaaccgcgcaaagcgaacgtgacgctttggacaagctacgccaggaaggcgaagcaaggcgtgacgaactgtcttccatgatcgacagtctggattcccaatccgccaagcaggcggcccagaccgtactgatcgcttcccaggtcgattcctacaatcgtcagttccagaaggagcagcaggacgccgccaacagggtggataccggtaaccagggcggcacgccgtccactccggtgacccccgctccggcgcccgctccggctccggctccggctccggcg

SEQ ID NO: 646 - DNA, 4020 bp, Unknown
  R14_15m  MAG No. k141_
ccgagcgcgccaagtatgaaacgctcgtctaccgcacggtgcgcggtgctctgggcccgaagatcaagtatgtggcctgcggcggcgcaccactttcgcttgatctggcgcatttctacaacggcatcggtctgccgatgattcagggttatggcatgaccgaaaccgccgccccgttcgccgccacgcgcgtgaccgacaatgtgatcggcaccgtaggccagcccgcgcccggctcctcgattcgcatttccgacgaaggcgaactgcaggtcaagggcccgaacgtgttccgcggctaccacaatctgccggagaagacggccgaggcgttcaccgccgacggctggctcaggaccggcgacttggccgagatcgatgacgccggccgcatcatcatcaccggtcgaatcaaggacattattattaccgccggcggcaagaacgtctcccccattccgctggaggaggagatcgtcaagtgcccgatcgtggagcactgcgtggtggtgggcgaccagcgcccgttcatcggcgcgctggtgacgctcgacccggagtcgctggccatctggctgcccgcacacggactgtccacggagacgccggtcgaccggctcgccacgaacgccgcggtgcgcgaggagatccagcagtacgtggacaaggcgaatgcgacggtctcgcgtgccgaatccgtgcgcaagttcgccgtgctgggcacgcagttcacgcaggagaacaagtgcctgacgccgtcgctgaaggtagtgcgcccggccgtcaaccgcgtgttcgccgatgtgatcgacaacgagatctacaacggcaagcggtgaaacgcgcggttcgtaatccgacacaaaaaagggccttttgaaccgcacctccgatcatcgaatctgtattactccagtccaacaatcggggtgcggttcaacctcgccgggcacttcatcattcatcactggcatggttccattatcacgcacattatggcgcagagcgaatacggcaccccggcaacgcgagtgggtcgccggggtgccggagcgcgggggtgccagaatgccgaagggccgggctaccggagtgcccggtcgccggggtgccgaaatgccgaagcggtgtatgagtgccgcccggcccaggtgggtcacgcccgggtcagtttcttgctcctgagacgcagcacgacatcggcggagtcggcgacacgcttggaatgcgtcaccacgattacgcatttgccgagctgatgggcggcatgctgcagcagatgaatcacctcgtcggtcatctccgggtcgaggctgcccgtcggctcgtccgcgaggatcgcgcggcccggggcgaccagcgcgcggccgaccgccacccgttgacgctggccgcccgacaggtgcatgatgttgcgcttggattcctcacggctcaaacccagttcctcgaggatcttcatatcggccttggtgctgaccagccgcaggttctcttcgggggtgaggtagtcgatcaggttatggtcctggaacaccagggacacgtgctcccgacggtgcttcgcatagcccgatgcggcgatgtcctccccctcgaagcggaccactccccgggagggggcgtccaggccggccagcagagacagcagcgtgctcttgccggcgccggacgggccggtgatcgcatacatcttcccggattcgaaatccgcgctgacatccgagagaacaaggatcttcgccgcgccgtaggcgtaatcgacatggtccagttgcagacagttagacatgattggtgactcctaacgcatagaggaaagaatggatttcggggatttggacagtacggcggcgcatgacacggcaagggccacggcgatgaccgcgcatccgagcagcaggatgagcaccgtctgctcaggcggcaaggcctccacgtgcaacgattccaacggcgcgacgcccgaatcgcgcaacagtcgggaagacacgtatcccgacagcatggcgccggtgcccagcgaacacagggcggcgaccgccgccatgagtccggtttcgatggcgagttgtgcgacgatccgcatcttgtcgatgccgagggccagaagcgtgcctatctcatggatgcgtgagcgaatccagaagaccagcgccatcgccagcaccagtacgtccgcgaggcagacggacagcagcaccatgcgcaccagatcacgcaccgtctgcacggattgcaggacgccggagagccgggccgaatcgtcggtgacgtcgtacttgccgccggccatggtcttggcccgtccaacagccgcggacaggtcctgcggattatccgacaggcatcggatcatgccgatccggtcgtttccggtcagagcggaggtcactcgcctgcccgaatagatgaggttctcggaagtgtccgagggcagggggctttgggcctgcacgttgccggagaagatcccggccacacgcaccgtggcgttgcgcccctcctgccggagacggaatgtcgagccgaccgataggccgttctgcagcgcgaagtcgcggtggaccagcacatcgtcgccgtcgcccgagatatggcggccctgctccaggcggtacaggccgctctggaattcctctgacaatgaggaatcggtggtgcccagcacgctgacctgcatggccagatcggagtccagccgggggccctgccggggcatgaccgggcgcgcgccatccacctgcgccaaggtcttcgtcgcataggcggtcttcgtcacaccggggatacgcgagaaccggctcgcctcctcggcgctgatgggattctcgccggcgctgacggtaaaccctatgcccatgcccgcgccgatgccgtcggacatggtacgcagggccgtcgagactccgacctgcgccaccaggctcgtgaagaccatcagcatcagcagaccgatgatgccgctgcgtaccggcttgcgtacgatcgccaacgtggcacgcttccacacattcatgctcatcatcgattctccgacaggtctcgcggcgatttgcgcagcatcggcatgcacgccaccgcgacgcacaccagcatcaccgccaacaatccgagcgccacgtacagcatggcggtcccgtcgaccgacaccgtgagcgaatccagggtgcgcaccgacatgctggattcaagatcgccgccgacctgccccatgctgctcagctccttcgccgcggaggcgttcacggaatggagcgccgtggtgccgagccattgggccattccctgcgcgcacagccagccgaggacgagggacggcagaccgatcagcatcatctcggcgaggtattgggcgaccagtgagggcttgccgacgccaagggacaccagtatgcccatctcctgacggcggtcgttcatccacagcagcagcatgagactgagcacgagcacggccgagacggtcacgccgatcagggcgccgcgcatcatcgagcgcacgccgcgggcggcatgcagcatgctcgacgaatactggtcgttgcgcgtgatctgatagttgttccaatccaccgggagtttcttcgcggcatccatggtcttctccacgtcaacgcccttggacagcacgaaggtggcgtcctggtatatttccttgccgtccttgtactggtacaggtcgcgtgtggtatccagatcggtgtagatggtgttggcggtgagttccgctcggctggatacctttctggcgctgtcgcccttgaatatgcccacgatggtggtcttgacggtcgccgtcgaatgtgattcgttgtcggcgtcataggcgttggccttgagcgtgagcgtgtctccgactttgagcccgttggctttggcgagatcctcatggatcatcgacgtgtacttgtcggaggccttcagatgccgtccttcggccatgccgagcgtgcgcgacgtgaacacgttgagtttcgacgaatcattcgtgcctatgacgttggcggcgttgccgaa

SEQ ID NO: 647 - DNA, 5022 bp, Unknown
  R14_15m  MAG No. k141_11850
cctgctcgatgagcgtcatgatgtcgcccatgtcgaggatgcgcgaggccatgcggtccgggtggaagacctcgaaatccttcaggccctcaccgttggaggcgaacaggatcggcttgccggtcacggacgccacggacagcgcggcaccaccgcgggcgtcgccatcgagcttggacagcaccacgccggtgaagtccacgccctcatcgaacgccttggcggtcttgacggcgtcctggccgatcatcgcgtcgatgacgaacaggatttcgttggggtgcacggcatcgcgaatgtcgcgggcctgcttcatcagctcctcgtccacgcccagacgaccggcggtatcgatgatcaccgtgtcgtagagcttctgcctggcgagttcgatggaatcgcgggccaccttcaccgggtcgccggaggtctggcccggagctgcgacggcctcgccgccatcggattggacgcccttttcgggagcatagacgggcacgccggcgcgttcgccgaccacctgcagctgcgtcaccgcgttcggacgctgcaaatcggccgccaccagcagcggcgtgtggccggaatccttgagccagtagccgagcttgccggccagcgtggtcttaccggcaccctgaaggccggcgagcatgatgatcgtcggcgggttcttcgcgaagttcagcggacgatcgaccccttggccgagcacgtcggtgagctcctcgttgacgatcttcaccacctgttgggcggggttgagcgcgtcggacacctcggtgcccagtgcacgctcacgcaccttgccggtgaaggaacgcaccacgtcgagcgccacgtcggcgtcgagcagcgcgcggcggatttcacggatcgtaccgtcgatatccgcctcggaaagcttgcccttgctcttgagatgcttgaacgcattcgagagtctgtctgtcaaagatgaaaaagctgccataatgggcaacagtctagccgccacgcgggaaattgcggtgttggggacgactctttccggggattgcgtcgcgtagtagtcagggatgttgggcattcagacggcaaatgccgtgccgtccgctcgtggcgaagccaatcgagtgcttccgataccatggaaaccgtaaagaatcctgtgttttttggaatgcttacgctgttttgaaaatcgctggacaccgcttatacgcagactgccgtgcgctccgaaccatgacgttcgggccaacgcagacatgccgtgcaataaggaaggcccactgatgcccacccaaaaactactcgaacgcaaagccctgatcgttggtatcgtcatcaacgtgctgcaggtcttagccggcatggccgtgttcttcatgaccggcctcaaggccatgttcctcgacttctccttcaccgcgatttccgtcctgtccggaatggtggcggtgtatctctcgtcgcgcacggtgcgaaccaccgagcgcttccccaatggcatgttcgcactggaacccatctacgcgatctgcaaggccattttcaccatgtcgttgttggtgtattcgctgattgacgtgtgccgagtagcgtacgactacttcgtgttcgggtccggcgaacgcattgaaaccggcccggtggtcatctacgagatcctgaccgtaatcgtgtgcttcagcctatacacgtattaccggcgttccaaccgctccatcggcgattccagcaccatgctcaccgccgagtgcaagagcacgttggtcgacggatcgatgtcgttcggcatcggcgtggttgccatcttcctgatgctgctaccggccggcggtccgcttgacttcctgcactacaccggcgatttcttcatcaccgtggctttggtggcattgaccatcaaggagccgttcagcgtgctcaaagaggcgttcgtggaattggtcggcggcgtgcatgacgacgatgagaccaacgcctacgtggaggccgaggcacagcgccatctgcctgccaacaccgactacgagcagacgctgatcttcaagaccggcatgaactacaccgttgacgtgtatctgagcggcatcggcgaaaccattgatgtagctgacctcatcgaatgcaagcgctcgctggagaaggagctcatcaagcgcctgcacatcgtggacgtggacttcgtgtttgactgattgatgggtttgaagcggctacttcaggctccaagtggaaccctgcgggccgtcttcgatggcgatgccggcctcggtcagggcgtcgcgaatctggtcggccttggcgaagtccttggccttgcgggcctcggcgcgggcgttgagctgctcggcaatcagtgcctccagcgccgcatgttcgggcgactcggtcgtgccatcagcggcaccgccagcagacacccacggctcggccagcgggtcgagacccaaggtgtcgagcatggcacgcacggcgagcagcgcctcacgcacctcggccttggcggtttcggaatcggcgcggtcagccagctgtgaaagcaacgtgttgccggaacggatggcagtgaagattgcggcggtggctccggacacattgacgtcgtcattcatggcggccacgaaatcagcgggcaggtcgtcggcggagacggcagcaacctcctcgcgagaaggctgaccgcccagtgccacaccggcgcgctcgatgaagttcgagacacggtcgtatgcggcctgcgcctcgaccaacgcctgatcggaccattcgagcatcgaccggtactgcacggagcccaaagcgtaacgcaccacccaagcggaatgctcggccagcacgctcggcacggacaggccggtgcccagcgacttcgacatcttctcgcccttggcggtcacccatgccgaatgcatccagcgcgcagcagaggggtagccggccgcgcaagtctgcgccatctcgttctcatggtgggggaagcgcagatccaaaccgccgccgtgaatgtcgaagccatcgcccaggtaacggtgggacatggcggagcattcgatgtgccagccagggcgacccacgccgaacggcgtcgaccaacgggcgtcctcgggatcggtgtccttgggggccttccacagggcgaaatcacgcgggtcgtgcttgtcgggggaggcgtcggccgggtcgaccggattgtacttgtcggcaccggtggcgtccacggacgggcccatgcggtcggccacggcggcggcctcatcgacttcggaggtctgcttctggtgggtgagttcgccgtaatgcggccaggatgccacatcgaagtacacgttgccggtgggcttgccgtccgcatccgtgaccacatagccgtggccgttgtcgagaatgcgctgaatcaggtcgatcatgtccgacatgtggccggtggcgtgaggttccacggtgggcggcagcacgccgagcgtgttgtacgcctcggtgaattcgcgctcgtaataataggcgcgggcccaccaacgctggccggcggccgcggccttatcgaggatcttgtcgtcgatatcggtcacattacgcacaaaagtgactttgtagccgagcttcaaaaaccagcggcgcacgatgtcgaacgccacggcggcacggatatggccgatatgcggtgacgactgcacggtggcgccacacacataaatgccgacttcgcccggcttgagcggcacgaaatggctgacctggtgcgaggcggtgtcatacagattcaggccttctgcggccttggcgacatgcaccggcgtcaggcttgaaggcatgacggaaatgttgaaatcctgcggttcttggctgtttcccataacgctcaagcgtagggtccgaaccagacatgctgaattgttactcgaagagcttggtgaacgcttcacaggcggggcccgaacgaggtgacagacggatgagaagcgggacaacagtctcgcgagaacacgtctttgaccgctgcggaaactgcgagattcatggatttgccctgctcgttacgcaaacggggaacgctcgtgccacaatagaagtcatggccacaccacaagtgctcattttgcaacatgtcccatgggaacgcccgggacgcatattgtcgaacctcgaagacatcggtcttgagacggtgacgatgaatatcgtcgacaaaaagaaaccggacttgcctgatttcggcgaactggctggcgtggtaatcatgggtgggcctatgggcgcgcttgattacgacaagtatccggggctgaaggcggaagccaagttggcgcgtgccgccgtggcttcaggcaagccgattctcggtgtatgcctggggcatcagattatcgccactgcgcttggtgcgcagctgcgtaagggcgatgcgccggagattgggttcgcgccgatcaagcgtgtggacaagcatgacttcttctccatgtgggataagcagctgacggtgctgcactggcataacgacgtggtgggcttgcccgagggaggccagctgctggcacgttcgtcttccaccaaggtgcaggcattccgactgggatccgcgctgggcatgcagttccatcttgaggtgtgcggctcgctgctggacgaatggctggatgagccgagcatggtcaaggatctcaaggccgcgggtgggtccaagtcccaattgcgcgagcagttcgcccaatacgatcagctactgcatccgctcgccgagcaagtgttctccggttttgcggcccgctgcaactcctacgctcagacgctgggcaaataacgtttgtgggccgccgctgggcaagcgtggcgctacattggtgagtcatgccgacttatgacattggactggaacacgtttcgcttgccttcgccaccaaaaccatcttcactgatgtgacgcagggtgttttcgagggcgaccgcatcggcatcgtcggcaagaacggcgacggcaaatccacgttgctgcacctgttccgcggcacccaggagccggattccggccgc

SEQ ID NO: 648 - DNA, 2716 bp, Unknown
  R14_15m  MAG No. k141_11949
acgtgcgtgtgctgctgggcgtgttcgaccggcttgtggcgagcggcgcaacagtcgtggtcatcgaacatgaccttgacgtgatcgccaatgcggactggatcatcgacatgggtccgggcggcggcgaaagcggcggacacatcgtcgccaccggaacgccggaacaaatcgcggccaacccaagcagcattactgggcggtatttagggtaaggctcaacggacatctttaccacggcgctttttaggaatatggcatgagccggtgtgggcgtggcgcgggctgtggctttatcttttctttggctcactcccgagaatgacatgttaacccgtatgacggtcacgcgcattcgcataggaccctgcgcgagtaggatagccgtccatggtgcagattcatggcattagacgcgcaagcgcggacgcgaaatatcggcagatgaccgggcagccggtcaagccgctgattctcaaactgtgcttgccggccgtcatctccaatctggtgaccactgcctacaatctcacggacacgttctttattggccagcttggcaccgcgcagtccggcgccatcggcatcgcgttctccatcatgaccgtgatgcaggcgctcggcttcttctttggcaacggcgcgggcaactcgatgagccgcgaactcggcaaacagaacaatgaacgcgcctcccgactactggccgtgggcttcgcgggtgcggtgctctctggtttggtgattgccacaatcggattgctgaccctgcggccgctggtcgtcatgctgggatcgacctcgacaatcgccccatacgccgtgcaatacctgacgccgttgttggtcgccgcaccctgtgtatgcgggtcgttcgcgctcaacggactgctgcgataccaagggcaatcggcgttcggcatgatcgggctggtttcgggcgcattgctgaatttcctgctcgcgccgttgtttatcttcgtgctgcacctcggaatttttggtgccggcctggccaccgccatctgccagacggtgagcttcacgattctgaccacaatgagccgcaaattcggcgtgatgaaactgtccctgcgcaattgcaggccggatgtgctgctcatgcgcgaagtggccggcggtggcctgccctcgctgatccgccaaggcgccggttcgatttccgtgacctgcgtgaacattgccgccaatccgttcggcgatgcggccatcgccggcatggccattgtgatgcgcattatgctgggcgccaactcggtgatcgtcggcctcggccaaggtttccaaccggtgtgcggctacaactacggtgccggcctgttcgcgcgcgtcaaagaagggtactggttctgcgtgcggctcgccacctgcgtgctcgtggtgttggcggtgttgctgtgggtgttcgcaccgcaactggtcgagatcttccgctccgacccggccgtggtcgcggtgggtgtggccgcgctgcacatccaatgctgcacggtgattctcaacggcttcaacatgatgggcaatatgatgacccagaccatgggccgcactggcatcgcctcattcctggccctgtgccgacaaggtctgtttttggcaccgatcgtactgattctgccgatgatgttcggcgtgctcggcgtggaaatggcccaatcggtgtccgacgtgctgacattcgtggtcaccatcccgttcatgcggcgaatcctgcacgaattgcggtagatgtcatcaagattttcgacttccagaccaggtggaccgagcatatctcgctgaatctctgtagtttttccttaccgttgcgttcattaggtcgattatgcgttcattaggtcggtgccctgcttagcatgagataatgagcattggaatgaagccattcttgaaggcagtgttcatcacaagtgacctaatgaacgcataatcgacctaataaatgaatggcggatggctaatacggagcctgaatgcagaatatgaaacgtatgaaagccaaccaggcacacaagtggcctgtgccggagcgcatcgaattgctgtaccgcaccatggctgacgcactcggcccgaccggatggtggccggcggagaccacgttcgagattatggtgggcgcggtgctgacgcagaatacggcgtggggcaatgtgaatcgttcgcttgcggcgttgaacgcggagggtgtgctcgaaccccataagctggtggccatggagccggagcgtttgcaggaactgattcgaccgtcaggcttttatgtcaacaaatccaagaccgtacagtcgctgagttggtggtatgtggagcgttgcggggccgcgcccgagggtgccgcggctatttccgatgccgaattacgggccgagttgcttggattatttggtattggcggcgagacggccgacgatctgatgctgtacgtgttctcgcgccgcacattcgtggccgatacctacgcgcggcggctgttcgccttccttggattcgacgtgccggccggctatccggcattccacagggcctattcgcccgtggtgctggatacgaacctcagtgtcaaggatttgcaggaattccatgggctcattgacgagttcggcaaggcctaccgcgacgacgcggccaaaagcgagtcctttttgggtggatggagggcttgactgcacggcgaatcgttctcaataagaaa

SEQ ID NO: 649 - DNA, 9299 bp, Unknown
  R14_15m  MAG No. k141_12026
aaacgcaacacatggttcccgtccaacgagaacgaatcctaccggccgtaccggccggagcgtctcaagacggggccgtggaccggccggtgccacatcgccggccccgcgcaccggaaggccggacgccgccgcgccaggcccggcgtcacgcacgacaacggcaccgagttcgcccgccacgcggaactgcgcgaacggctcggcatggccacctacttcaccgccccgtacccgtcgtgccggcgcggcggcaacgagaactgcaacggcgcgatccgccgctacctgcccaagcgcacgcgcgtcgacccgtccatggccgacgagatacaggccatcgtggacgagaccgacaaccgtcccatgcgcgtgctcggctaccgcaccccggccgaggcattcgccgacgaactgctatcattaaccgaacaacaaggatgttgcacttctaaatagacaacgggcttttgtgctgatatagggatttgtgctagtcgaatccgcgaaatgttcagtaaatgttcacgtagcgaaatcggcatagaatgcgagcaaacgcataacggcacggtgctgttcctgcgtacgccaacgccaggcgaaccgccggaaagaaggggtctccatgattgagacagcggacgatatcaagacgattgcgaacgtcggcacgggaacaatgggccatgcgatcacgttgcagttcgcgctggctggatatccggtgcatctggtcagccgcagcgaggcctcgctggagaaggcgatgaaggcgatccgttctgatgccgaggacttcgccgaagccggactgctcaaggccggcgacaccgtggacacggtgctggcccgcatcaccggttacgccgactatgcgagcggcgtggcggacgtggacttcgtcatcgaatccgtggccgagaaccttgacatcaagaagtccgtctgggccgaagtggagcacgccgcccccaaggacgcgattctgtccacgaacacctccggcctgagccccaccgcgctgcagtcggtgatggggcaccccgagcgcttcgtggtggcgcacttctggaaccccgcgcagttgatgccgctggtcgaagtggtgccgggtgaaaagaccgatccgaaggtggtggacatcaccttcgacctcatggccaagatcggcaagaagccggcaaagatcaagaaggaatcgctgggctttgtgggcaaccgcctgcagctggccgtgttgcgcgaggcgttctacatcgtccagcagggcatagcggacgcggccaccgtggacgacgtgatgaagtacagcctcggccgccgctggaacctggtcggcccgatcgccagcatcgacctcggcggactcgacgtgttctacaacatcagcacctacctgttcgacgacatggacaacggcaccggcccgagcccgctgctcgccgaaaaggtcaaggaaggcaacctcggtgccaagaccggtcagggcttcttctcttggcagggcgaggacggcaagcgcatcatcgaaacccgcaacaaggccctgctgcgtgcgctgaaggacgatgccgcggaagcgtaaagcgcgagcgacgaattctcgcgtaacgtgtgctacgatggaaggctcccttcggggagccttcgttgtgcttgcgttgttcttcggtccaacttttcgacatgcgtatacgttgttgatagcgacaattgcggaaaacgcttacagtatgatgtgcacacggacaacaagccgatgattgcaaggagcggtgacgacgatgacatccacagaacacaatacgcgagccgacatgttggcccacatgggcagccttcagcaggccgcctacgtgcgcccgatcgagtaccaggagggccgtgcccacggcctcaaggccatcgaggtgaagaacggcccgctacgcttcgtatccatggccgaccgcgccctcgacgtctgccagttcgaataccgcggcgagaacctcaccttcctgtccaagccgggcctgaacggccgcaaccagttcgacaccaacgggctggaggcgcagcgctccatcatgggcggcctgttcttcacctgcggcttcgagaacatctgcgcgccgtacgtcacgcctgagggcggcaagtacccggccggcagattcccgatgcacggccgcatccgcaccacgccggccgagcatgtgggctccgacgcccactggaccgccgaaggcgactacgtgctcgaggtctccggcgaaatgcgcgaggccgaactgttcggcgagaatctggtgatgcgccgcaagatcaccagcgtgtacggccagccgtcgatcacggtcgaggatgaggtgaccaacgaatccttccgcgacgagccgctgatgtggatgtaccactgcaacttcggctggccgttgctcgccgaaggcgccgaagtcgtgatccccagccgcaaggccaccccgcgtgacgagaccaccgcagccgacaccacgccgtggaacgaaatccaagcacccgaggcgaaccgccccgaaagcgtgtacctgcacgagctcgccgccgacgagaacggccgcagcttcgccgccgtggtcaaccgcaagctcggacttggagtcgtcatcgacttcgacgccagcctcttcccatacttcatggaatggaagtcgatgggtgcgggcgactacgtggtcggcctcgaaccctcgaactccagcgtccacggccgcggctggcacgagcagcgcggcgacctgcacaccatcgccccgcagaccagcgaacgtaagtccctgaccttcaccgtcatcgaaggcgaggccgcgattgacgggctcatcgcccgccgcgacgccctgcttggctgaattgtgagataatatcggccgatatgtgaacggctgattagcgtggggagcatggttacccgggattcggaacagtatctgcgattcaaacgggagcacacgctgccctcgcatgaggcgattatggactggtatcgcggcaccggcatgcgtccgtatctgcaggcgcttgacgacgccggccgcaagaagttcgaggccgaagtgttctcccaagtccgcgaggaataccccacacagtcggacggcagcatcatcttccccttcccgcgtttcttcttcctcgcgactcgggagaagctcgccggattcgtgtactgggcggcgcgacctgtttcccgcgccgccagctgtgggttgacctcgctactgggcttgcggtgatgccgctggctgctgcgctgcttccgattgcgatggcatttgcatatgcggtgcgatgctggggagtgtgccgtcatgcatgcactgcttcaatatgaggtctcgctgggcgatgaggtcgtcttcgatctggtcacgcacgtcgcgcacggacgagaaatacaggtagaacgtggcgtgattgtagccggcgagttcggtgatctgacgcaccgagatcttctcgatcggcttggtttcatacagcttccagaacgcctccttaaggcgattgaccgtctgctgcgtaagttgcgggttcttcttgattgcgattcgcggtatggtgatttcgcataagacgcacaaccccatcgattcgtcggtcaaattcgtgaccttctcgatgcgatgctgtcgctggtggtcacgcaggacgtgctgttggaatcccagggaaccgcgcacgcggcgcaatcctcgggactgttcggcatcgggctcggcgtggtggccgtgatcatcggcctgtggatgttgctgagacgtaagtggacggcaacggaataggaatagtgacagcggaatagcgcgcgtgatattggtacgcgacgtatcgtaaaagcggctacaatacttacggcaaaagtctttgcaacgagaaggaagacatgactgagcggcgtcgagcacggatgaggattcgtcgtcaacgaatttacgttgtacggcgcattgtggttgcggtatgcgcattgttgtgctgcgttcttgccgtcttctcgacgattgacgcccaacgggtgtggccccgcggtgagtcggtcgcacaggggcaggcagaggttcaggggcaggcgcagaaggtgagtcaatccgcgcaacagtcggcatcgcgagtgtctgcatcggcctcatccttggaccgccagcaggtaccggtctttaaccaggcgattcaggagcagcgtgacaaggaagcgcaacgtgcgcgatggacgaatcccaccggcaagcagcctgatttgtcgcaatactccgatctcagcgtgaaagtcagtatcgccaagcaggaagtgtatgtgcaatccggcggtgagatcatctacacgatgatcgccagcaccgggctcaacgatacgaccccgcgcggcaactatgttatcgggatgagaggcgatcacttctacaatcccgcagaaggcatgggtgctgattattgggtgcgattcaacggcccgttcctcttccactcggtgccgaccggggcgaactccggcgagtatatggaagaggaaggcaacaagctcggtcagccggcctcacatggttgcgtgcgactcactgtggccgatgccgaatggttctacaaccaaattccggaaggcacgccggtcaccatcgcctgaggcttggcctgagatcgatactgaggctatcgtgctttaggcgtctgatattggtcgtcggtagtgaagcaggtgcgatagaccatggccatgatcagaccgtcggccagcaaggtcagcgcggcgatggcaccgaagaccacgaactggtatttggcggcgttcagcggatctccgccggctatcacctggcccgccatcatgcccgggatggtcacgatgccgctggaggccagcgaagcggtggtgggcagcagtcccagccgaatcgacgagatgatggatgggcgggcggactcccatgccgtcgcccccaaggccagcatcatatccacctcgtcgcggcgttcctccatgctttcatagaatcggctcagcccgacagcgagcgcggaaacggtgttgcccagcagcatgccggtcaggggcaccaccagctggggcgcataccacgggtgtgggcgcacgatgagttcggtgaccaacgccagcatgagcagcatcgtgatgaccaggctcaggaagatcggtccggcaagacctttggggatgccgcgcgcgcgggatatcacgatctgcaccgccgcgaccagcatgaccgtcatcagagcgaacaccatccacacgctgttcgaacgaatcacgtagctgatgatgaatcccatggcgcacaactgcacgagggcgcggcatgccgaccacatcagggtcctgccgatgcccatgtgcatgagttcgctgacgatggccgccacggccaccatgcccaacgccagaacaagaccccaggtgtcgatgtcgtaggcgccgttcatgggcgcacctccttatcccgcgtcagatcggtgagccgtcccgcatcgagcatcagcgtgcgggtggcgcgtccgtccggcggacggtgtcggatgcggatgatcgccatgccgtgtgcggccgcgtccgccatgatcgcggccactttggacgcgttgtcgtcgtcgagtccggcatccacctcatcggccagcagcaccttcgggtcggtgagcagcgtgcgggccaacgccacgcgcgccgcctgaccgcccgacaggtcgtgcggggcgcgcgccaggtcgatgtcctcgcagcccatcgcgtccaacgtcgtgcggatgcgctcgtcgggcagcagctgctcggccttgccgcccttgccgcgaatcgcgagcgtccagggcaggcggatcgcctcggccacgtccttgccggtcaggatcggtttttgcggcagataggagacgtcccgccgccactgctgcgcgctgaattcgtcgctgcccacgccgtcgaggacgaacgtgccgtgcgcgtgcgggttgagtcgggcgcatgcggtcagcagactcgatttgccggagccggacggacccaccagatcgatgatgtcgccgcgttccatgctgaaggacaggttgtcgaacaccgtgcgttcgtcgtctgccggcgattgcgcggggatgacgcaggacacggatatggcttcgaagaaggatcgcatattcatccagtctagtcgggggccacgtgggaaaccccagcgttcacttcctgtatacccggtgtggcataatagccaaggcattttttgggctttgcctaagctagtttgaatttgaaataggtgaataacgtggcacagactactaacgacatcaagaacggatccgtcctgaacctggacggccagctgtggaccgtcatgaagttccagcacgtcaagccgggcaagggccccgccttcgtacgcaccaccatcaagaacgtgctctccggcaagatcgtcgacaagaccttcaacgcaggcatgaagatggaattcgagaccgtcgacaaccgcaccctccagtactcctacgaggacggcgacaacttcgtgttcatggacatgaccacctacgaccagatcatggttccgaagaccctcgtgggcgacaaggccaagttcatgctcgaaggcaccgactgcctggtctccttccacgacggcaccccgctgagcgttgacctgccgggctccgtggtcctgaccatcacccacaccgagccgggcctgcagggcaaccgctccaacgccggcaccaagccggccaccgttgagaccggagccgagattcaggtcccgctgttcatcaatgagggcgaccgcgtcaagatcaacaccgaggatggttcctacaccggccgcgagaacaactgatctccgcatcctcaacagacgaccgaccgtataaaggactaggacagcagcagtatggcacgttccaccgcgcgcaaaagggctctgaacaccctgtacgaagccgacgaaaaaagtcaggatattctcgccctgcttgacgagcgcatcgcacatcccggtgcccagaccccgcttcccgactatgccattgaaatcgtcaagggcgtggccgagcaccgtcgtcagatcgacatgaccctggacgaacactccacgggttggaaggtccgccgtatgggcgtggtcgatcgcaacattctgcgtatcgccgcttgggagattctgttcaacgatgatgtgccggacaaggtcgccatcgacgaggctctggcattggccaagaccctgtgcgatgacgattcgcccgctttcatccatggcctgctgtctgcagtgtgcaccgccaagaacgcagcaccggcaccggagtccgcggcagaagaggccgatgaggaatcgtccgattccgatgccgccgcatccgagccgaccgatgagggcgatgtttccgattcgcccgattcgtccggtgcatccgacgagcccgctgccccgtccgctgagattcagccgacggtcgattagtcatttgttgttcagcctccccattcgggaggctttttcatgggcggacacttgtgtcgccacacattctcaagtcggcaccttgccgacagccccgccagcggggtgagactttgcgcccaacggcgtgtgagtctgcgctggccgttaaccttggtacgaatacccgaaaaacataagggggttttggtgagccagaacgagtccgggaccatcgcaattccgatgtatgacaaggacgatgcagtcctcgttttggaagacggacaggtatatgtgggggagccgtacggcgccctcggtgagacgaccggtgagatcgtcttcgccaccggtatgaccggataccaggagacgctcaccgatccgagctacgatcgccagatcgtcgtgcagacgttcccgcacatcggcgataccggcgtcaacagcgaagaccctgagtcctcccgcatctgggttgccggatacattgtgcgtgatccctctccgaacgtgagcaactggcgtgccgaaggcagccttgatgacgacctcgccaagaacggcatcgtcggcttgagccacatcgacacccgcaagctggtgcgtcacctgcgttccgcaggcgtgatgcgcgccggcatcttctccggcgacgccctgaccgaccaggccaccggcgcgctcaagaccatcgagcagctgctcgaagacgtcaagaacacaccgcagatgcagggcctgagcctgtacgacgaagtgtccaccaagcaggcctacaccatcgagccatgcggcgagtacgaaggcaaggagccgctgtacaccgtggccgccgtcgacctcggcatcaagggcatgaccccgcaccgcatggccgagcgcggctgccgcgtgcacgtggtgccctccaccatcaccttcgccgaaatcgagaacctgaacccggacggcgtcttcttctccaacggcccgggcgacccggaacaggccggccccgaaatcgagctgctgcgccaggtgctcgacgccggctacccgttcttcggcatctgcttcggcaaccagctgctcggccgcgcgctcggcttcggcacctacaagctcaagttcggccaccgcggcatcaaccagccggtcaaggatctgaccaccggcaaggtcgaggtcaccgcccacaaccacggcttcgcggtcgatgccccgatcggcaagcaggtcgacgcgccgtttgagaacggcaagtacggcaaggtgttcgtctcccacatcgatctgaacgacgacgtggtcgaaggcctgcagtgcgtggacatccccgcattctccgtgcagtaccacccggaggccgcagcaggcccgcatgatgcggcctacctgttcgaccgtttctgcgaacttatgaagaacaactccaaggaaggtaagtgatatgccgaagcgcaccgacatcaaatccgtgatggtcatcggctccggcccgatcgtgatcggtcaggctgcggagttcgattactcgggcacccaggcatgccgcgtccttcgtgaggaaggcatccgcgtcatcctcgtcaactccaacccggccaccatcatgaccgacccggagatggccgacgccacctacatcgagccgatcgccactccgatcctcgagcagatcatcgccaaggaacgccccgacgcgcttctgcccaccctgggcggccagaccgcactcaacgccgccatggcgctgggcgaggccggcgtcctgaagaagtacaacgtcgaactgatcggtgcctccctggaagccatcgaccgtggcgaggaccgtga

SEQ ID NO: 650 - DNA, 39068 bp, Unknown
  R14_15m  MAG No. k141_12047
cgagcatctgaagaaccgctggtccaaaggccagggcgctctgttgctcgtgacccacgatcgctggttcttggacgaggtctgcgaatcgatgtgggaagtccacgatggcgtgatcgagccgttcgagggcgggtattcggcgtatatgctgcagcgcgtggaacgcgaccgccaggcggatgtgcgtgaaacgaagcgccgcaatctggcccgcaaggagctcgcatggctttcgcgcggtgcccgtgcccgttccaccaagcagaaattccatgtcaaggccgcgcgcgagcttattgccgacgtgccgccgatgcgtaacacacttgaactgaagcaaatggccacctcccgtctcggcaaacaggtggtcgatttggtcgacgtgacgcagattttcgaaaaaccgcagggcatggccgatatcgacccggatgtggcggcgctctccgcgtccgcttcccgcgtggatgtggtcaacgccatgtacgccgagccgcagctgcacggttccgttgaggtggcggtcaccgacatgactgacctgcgcctggtggacgccggcgtgccggaagccgtcgaggccgctgaggaagcgcgtaagaaggccgaggctgagagcggcaatccgcagcttgctgacgatcgcgaggttcgtcgcatgaacacgggtggtgaaaccatcggcggtgacactgctgcaacgaattcggatgatggcactgctgcagccggtgtcacctcggctgcacgcaaggtgacggtttccggccgcgagattttggatgatgtgacatggctgattggcccgggcgaccgcttcggcatcgtcggtgcgaacggtgccggcaagtccacattgctgaagttgattgacggttcgattactccgaccgtgggccatgtgaacatcggcaaaaccgtgaagttcgccgtactctcgcagcgtcttgatgagctggagaaactgggccagtacaagatcaaggaagtgctttcccgctataagccgagctacattgtggatggcaaggaagtaacgccgggacagttgatggagcgtctcggctttgaatccgcccagttgatgacgccgattcgcgacctctccggcggacagaagcgccgcatgcagttgctgctcatcctgctcgacgagccgaacgtgctcatcatggacgagcccggcaacgatctggacactgatatgctcgccgtcatggaggatttgctcgatacttggccgggtacgttgatcgtcgtatcccacgaccggtacctgctggagcgcgtcaccgatcagcagttcgcgctgattggcggcaaggtacgccatctgcccggtggtgtgcaggattacctcgatatggttgaggctattaagaacggcaagggattgccggctgacacgcctggcttcgcgggcaccggtagcagctcggcgaagtctggtaggggtaaggcggccgccgtcaatgttgctgcatctctccctcagtccacttcgcggacagctccctcgtcagagggagccaataacggtgaggactccacctcgaagctcaccggcaaggccttccacgaggcatccaagcgcgtgaatgccatcgagcgcaagcttgccaaactggaagagcggaagaccgaacttgaggcacagatggccgcacatgacccgagcgactacgagggtctcaacaagctcaatgaacaactcaccgccgtcaatactgaaagcgataatctcgaagccgaatggctcgaactctccgaacaattggagtagcgggagaaaccgtaacgttcacaaggcctcggtagtttgccggggcctaccgctatgcaaactcccacggattaatcaattccacgtcggtaccttcgaagtccttgatattgcgcgtggctatggccgcatcccaggaacaggcaattgccgcaatcatggcgtcttgaatactggtaggtgtgcccctgcgttcgcgttcgacaaggatatgggcataatccgcagctgcctgggtgtcaaatgcgaacgtcctgtcctctaatgtcataagcgccagcttgacggtcgtatctgtgtactttcgtcgtttgccttcaggcatgcgacatattccgaccaacaactcggcgacggtgatggcggtggttgccagattgcttgtatcttggttcctcagccaattggcaacgtgttcgtctggctgtttcttgatgatttcgctgatgacgttggtgtccagaataatcatggccgattcctattcaaaagatactggcggtcgggaatcgtcggaatttcgctcggatagtgggagttcccccttgtcgagtccctcaaaatccatgttcttcatgaattcgcggatctcgtcgtagaaattggtctttcgtgtgatttcatgcgccaccgtgccggccagccattcttcaagaatggatcgcacctgagattccatggagcggttgtttttctcagccacttctttgagctgttgaatctgctcatcgggtatttttcggatggtcaatgttgccatgatgcacctccttgttgctgtcataatgctagcataaggtgctgtcattttgcttgcagcacgggtgatgaggtatgcacgcatgaaaaaggcggatatgcatcatgcacatccgccctttgagcttggactgggtctccccgcagtcgccgaatcagcgcccggtaacctcggaaccgacgaccttttcgctcagggcgcgcgggccgcgggtcacggctacggcaccggagcgcaccagctcaatcacaccgtaatgctccaaaagccccagcagcgcatcgatcttaccttcggcaccggtggcctcaatggtcagcgattccggattcacgtccaccacacgcacgcggaagaggcgcacgatctccagcacgtcggaacggttggattcgtcggcggccaccttgatgagcaccagttcgcgttccacggtggagttcgggtcgagctccacgatcttcagcacgtgcagcagcttgttgagctgcttgatgatctgctccagtggcacggcctccacgtcggcggtcaccgtgacgcgtgagatgtccggacgctcggtgggggagacggacagtgagttgatgttgaacgcacgacgggcgaacaggccggcgatacgcgccagcacgcctgggcggttctccaccagcacggacagcgtatgacgctgggaaccaggctgggatgcaggatagttagccatgagtgttctcctctcctcagtgctcgctcgcagcggcagcggcggtctcgtgctcgaacacgccggtcgcatgctcgtccggaccggttcccggagccggggtgccgccggtcagcggcttgatgccgggcttgtacgtcacctcgtcgttggaagcgccggcggctaccatcggccacaccatcgcatctttccacacgcggaaatcaatcagtaccgggcggtcgttgatctggttcgccttttcgatggcggcaatcgcctcttcctcggtgaacgcgcggatacccacgcagccgtatgcctcggccaacttgatgaaatcaggcacttcgagcggcgcatcgccgtcgaccagtgccgccgcaccatcggcaccgtgcgcctcgccatcgagcaggttggtctgcgagtagtggtgctcgtagaacagcgtctgccactgacggaccatgccgtacacggagttgttcagaatcgcgatcttcaccggagcgtggtccaggaacgcggcggccagctcctcagaggtcatctggaaggaaccgtcaccatcgatcagccacaccggcttcttgccctcgaactcgcgggccgagcccacggatgcgccgatggcggctggcagaccgtagcccatcgtgccgaggcctccggaggagatccaagcgtgctggttctcgaaatcgatgaactgcgaagcccacatctggtgctgtcccacaccggtcacccagatggtggacggatcggccatctcagagagctttttgatgacccactgcggggccattgatccgtcggtcggctcatcccacgtcatcgggtattcctcgcgccagccgtcgatcgccttccaccagggggccagattcggcttgccctgaatggcctgcgtgcgctggatttcgggaatcaagtcgtcgagcacggtagccgcatcgcccacgatcggcacgtcgggctgacggttcttgccgatttcagccgggtcgatgtcaatatgaatcacgcgggcggtcggtgcgaaggcgtcgagcttgccggtcacgcggtcgtcgaaacgtgcaccgatggccacaagcaggtcagcgcgctgcacggcaccggttgcggcaatcgtaccgtgcatgcccagcatgccgaggttcttcgggtcggagtcgggaatgatgccgcgtgcgggcagggtcgtgaccacgggggcgccggtcaggtcggccagagccttgacctgtgcgccggcgttggagcgggcggcgccgccacccacatacagcaccgggcggtacgactgagagaacagcttcgccgcgtcggacagcacacggccgtgcgccttggtggtggggttgtagccgggcagaatcatgcgctgcggccatgagtagtacatgtcgccggtctgtgcggtcttggtcagatccacgaccaccgggccggggcggccggtgttggcgatgtagtacgcctcggaaagcacgcgaggaatgtcctgcgcgcgggtcacgaggaaggagtgcttggacaccgggtaggtgatgcccacgatatccgcctcctggaaggcgtcagtgccgatggcctgcacgcccacctgaccggtaatcacgaccatgggcacggagtccatattcgcgtccgcaatggccgtgaccacgttcgtggcacccgggccggaagtcacgatgcacacgcccaccttgccagtggccagtgcgtagccttcggcggcgtggccggcggcctgctcgtggcgcataagcacgaagcggaacttcgtgttgtctttgatctcgtggtagacgggcagaatcgcgccgccaggaatgccgaagacgtcctcgacgccgagatcctccagcgaacgcaccagcgcttgggcgccagtcatcttctcgccatcgacgatggtctgcttatcgggggccgcgttgattttcggcacgccgctgaatgcctgcaaaggcgtgggtaaagccatgattcctctcacctcatagattttgccgcgaacctgcccgaccttgggatggggccgggtgcccgcgtgtctgattccagtcgcttctccgagacttgtggccccggcacgactcgtcgctcatgttggtatcagtctattcgcaaatctgacagcgggcttacttagtccgcgtcttgagcgagtccagtgacttccagcccgcttcggcggccgccagctgcgccttacgcttgctggagcccttaccgatgccgatgatgtcgccgttctcgcccaatgagacgcgcgcggtgaagatctgcgcgtactccgggccggagacctccatatggtagaccggctcatccttgccgaggccgtgcgccttgacggtcagcgaggtcttccagtcaagtgccgggccctcggtggccacttcggcgagcgtgtcgtcaataagccggtgaatcaccttgcgtgcctcgtcgatgccgtgttccaggaaggtcgcgccgatgagcgattccacgatgtcgcacagaatggagttcttctccgcgccgccctgctcggtttccccgtgacccagcagaatgtaggggcccaccttgagcttggttttggcgatggcgctcagcgcgtcttcggagacggccttggcgcgcatcttggccagttgcccctcggtcatatccgggtgaatggtgaacagcgtttcagtggagaccagttcgagcaccgcgtctcccaggaattcgaggcgttcgtaattggccacgccggggtgctcatgcgagaaggagcggtgggtgagtgcctgcacgagcagatccgggctgagagtggtgcccaacgcttcaagaagctcgttggccggcgtcggctgctgtggggtttcattgctcatgattgttgtatggtccttcacgcgatggtgatgtgttgtgtgttgtgttgtgttgtttgcaatgcgatggtgtacgtaatggtgcacttatgcgaagaccccgccacccgtcgatggcagggccttcattcaagccgttatcgcaggactcacttggtgtgagccggctggatggcggagcggtaggtgcggccgcggtagttaccgcagctcgggcaagccatgtgcggcagggccggagcgccacagttcgggcagttcacggtcgcagcagcggtggccttccagttcgcgcgacgcgagtgcgtgttggcgcgcgaggtcttgtacttaggcagtgccatttgagtatcctctatttcgttcgaacaattgagcttaagcgtccgttatcttaacgcacggctcgtacaaactccgttcaggcgcgcgtcactcggcctgctcgccgttctgctcggcctcgagctgggctttgagccccgccaatccggcaaaacggatatccgtcacatcgtgatgatggtcgggattctcgttcagatcggcaccgcactgcgagcacaggcccttgcaatccggtcggcacagtggctgcaacggcagcgattcgaccagcgtgtcgcggatcatcgcctcgatgtccgcgaatgcgccgttctccagcagcggatacgtgtcttccgactcgtcctcgccggcgatgatgtcgatctcgtcgtccttcttgttcttgccgcccttgccgttggccttgtcctgacccgactcatacgggaagaacaccgtcacatcaaccggccagtcctcgtcaatcggcttcaggcagcgcgtgcactcgctgacgaatggcgcgaccagacggccggtgaagatcaggccgtccacaatcgaatcgaactgcccgctcacatgtacgggctcaccatccttgatgccgacgatgctgtcgccaatgccggaaggggccgggaaatcggcgtcaatcggcttggattgaccggcgcgcgaagcaatctgcgctaccggaatggcccacggggaatcttcaactcgtgccatggtatgttcttggtgcctttcgtatgttggctggagttattcgttactggcgttattcgcgttactgatgttgccggcgttgctggcgttactgggcttcgggatagtcgttcagcgtcaggtgcggcatctgttcgccggccgcacgctggcgctcttccagcacgttaagaccggcctgcacatcccgactgagtttgccgagctgctgggacagcccttccatcaccgtagtgcagtactggtccgcgccttgggtcagatggtcggctctggtctgtgcctggtcaagaatcgcgcgcgctttctgccgtgcaagctcggtgacgttctcttggccggccaggaactgtgcctgttcgttggcgtccttgatcatgtcggctgcgcggctttgtgcggaggcgacgatggcgttggactgggtctgtgccgattccagacggcgctcggcctcgcgcatgagggcggaggcgcgctccaactgcaccggcagcattttcttcaactcggaaagctggtcggtgaattcgtcgcggtcaaccttcaccatgccgggggcgaatatgctggacttcgcttcgcccagtgccgcctcgagctggtcgatgatgtcatacaccgtggtgaattcctcgcggctcttgaccgtggccgggtcgtcgtccgtggtttctcgcaggtcgggcatttcgttcatgaacgaggggcgagtgccggcggcctgagcggtctgagcttgtgcccgggtctgctgagctgcttgggcctgcgctttggcctgcatctgtgccggagtaggggtaggcgcggcgggcggcgatccggcgagaacatcggcctcttcggtgggtgccggcgcggcttgcgtagacgcgggcggttccggggcggacggctccggagtggacgatgcggcgtccgcattcggtttggtcagatcgacgtatccagtggggtggtcatcgctcatagtcattagtgcatcagtccttccgctgacgttcctcggccagggcatcggccagcatcggcacgacacaatcgggcaccatgccggtcacgtcgcctccatggcgggccacgtccttgacgatggaactggagatgtgttcaagaatcggatcggccggcaaaaacagggtttcgatgccggcgagcttgcgattgaccagcgccatgccgagctcggcttcatagtcgccgttctggcgcagacccttgacgataacggtggcgccgaccttcttgcagtagtcggtgatcaggccgtcggtggaagaaacagtgacgttcttgcaaccggctttgtcaagggcacggcggatcacgtcgactctggtggcttcggaaaacatcggtgttttcgcggcgttgacggccaccaccacatgcacctcgtcgaaaaaccgcgccgagcgctcgattacatccaagtgtccggcggtaacggggtcatacgagccggggcatactgcgatagtcatgccttatagcctaccgcgaatggtgtgcttcgtgctgccgagcgtgcattgttgtcgcgtcggcgtatgaggcagtgtgcgcggtgccgtatgtggcgtcggtgcggcgttgtgtgcggcattgttatgtggcattgtatgtggcggggtggcgtgatgcgcgacatgggtgtgtggaggtgtgcggattacgcgccaatgggtttcgcgggtaacgacgggaatctatgatggagtgcagtcgaatcgttgaatacgaggaaagaagtgcaccatgacttttgccgagatgttcgttgatgatgccgaaccgctgcgcaacccggaccaaggtgccggcacgtcggtgctggaacgcccggaaaccaaggagtctccggttcgtgacgatggcggcgacgcggatcgattcgcacattatgtttctaaggaccgtatcgccgaatcacgcgcgaccggtcgcccggtggtcgccctgtgcggcaaggtctgggtgcccaagcacgatccgtccaagtacccggtttgccccgattgcaagcgcatctacgaagagatgacgcgctgaaggtggtacttggctcccctcagcgaagggagccgaaatggtcaccgagccgaaatctcgtcgatcagcttgagctcttcgacggtgaagtgggtgttcttgagggcgtcgatgttgtcgagaatctgctgcggcttggaggctccggtcagcacggagatcaccttaccatcgtgcagcagccatgccaggctcatctcggccagcgtctggccgcgttcggcggccagattgttcaggtccacgacctgcttgtgtagtttctcggtcagagcggaatcgttgaggaatcgcggatcgtgagccatgcggctgtcggccggaatgccgttcagatagcggttggtcagcaggccctgagccagcgggcagaaggtgataaggcctttgccaagcttgtaagccgtctccttcagaccgttcttttccacggtgcgatcgaggatgttgtacttgttctggttgatgatgaacggcacgtgcaggtcggtgaggatcgcggcggccttctccatcgtcgggccatcgtagttggacagacccacgtacagggccttgccggagttcacggcctgagccagcgcgcccatcgtctcctcaagcggggtttccgggtccgggtggtgatggtagaagatgtccacataatccaggcccaggcgttcgagcgactggtcgaggctggcgagcaggtacttgcggctgccgaggtcgccataggggccggcccacatttcgtagccggccttggtggagatgacgagttcgtcgcggtggtgcctgaagtacttggcgagcagcaggccgcagttcttctcggcctggccgggttcggggccatagttgttggccagatcgaagtgggtgatgccgttgtcgaaggcggtgaagaccagggacttcatctggtcgaatggcgtgatgtcgccgaagttgtgccagaagccgagtgagacggccggcagcttgaggccggaggtgccggcgtggttgtaagtcatcgtgtcgtaacggtgcgggttgggggcatagatggcggttggctcgaacattgagtctccttacaatgtcatttttgttcttacgaatgcttacctgcgatgggcaaaccgacgccgattgagtggcattcgtaagtgttcttggatactatggttccagttcaagtgaacttgaatgcaaacggctgcgacgcttcggcgtgtcgccgcagtaaggagtcatggtgtcctacaccattcgtcaggtggccacgcagttccatatgcagccctctacgccggtgaagactggccggattggcgcgagtacaaaaaccgcgcctattccattgaatgctgaggccatcgagtgccgagctggatgccggctgggcactaagaccgatgtgcgtcgatcgtgggcgcgtctatccgagtaaggccttgctcggcagtgcgcggtcgagcagccagacaacgagcgatatcacgaagaacgctatggccagcttgccgcagctaatgccgaacccttgccagccgagtgcgtcgaggttgatgaagtcgtacggatacggactgccgccggccgccggtccggaccccggccaaatcgtcgcacgggccagcacgaagaccaagtatgcagggaagtacgccagccacgagaacatgtaatgccagcggaaacgccggtgcgggtcgaatagcacgaaatcgataaccgccataatcggggcgattttgtgcagcatcgtattggtcatgatgccaataacctgtggcacgtatgccgggtcgtccggaggcatcaggaagaacgccaccagtgcggtgactatggcgtacacagtcaggcatcccttaggccatgcaggcggctgaatacctttgagcagtgtggccgcgccggcccacagcatcacgatgcccagcacgaaaccggtctggaacgtgaaatacacccagaactgcggtttggaccatgcctcatatgtgcccacgaagcagaaaccggcgatcgcaaagcgccacaacgccacgatgaatctcatgcatcgagtctaccgcttcgccagtgggctgtatggctttgcccggactacacttaggtgcaacttcaccacttatgtaggaaaggccttgcaatggtcgattattcgccggctctgatgaccgacatgtatgaatacacgatgctcgacgccgctctgaaagacggtaccgccgaccgcaaatgcgtgttcgaggtgttcacgcgtcgcctgcccgaaggccgtcgctatggcgtggtggccggcaccggccgcattctggatgcgctggaacatttccacttggacgaagcggacctgaagttcctggccgaccgtcacgtggtaagccccgagaccattaagtggctggagaacttccacttctccggtacgattcgcggttaccgcgaaggtgagatgttcttcccgaactccccgattttgcaggtcgaaggcacgttcggcgaatgcacgctactggagacgttgattctatccgtgctgaactacgattccgcagtggcctccgccgcctcacgtatggcgtcggcagccaaggatcgtccttgcatggatatgggcggacgccgcactaacgagtgggccgccgtggccgccgctcgagccgccgtagtgggcggattcaagggtaccgccaatctgctggccgcccagctgtatggtctgaaggccattggcaccgccgcgcattgcttcacgttggtgcatgattccgagcgtgacgccttcgaatcgcagatcgaggcattgggcaagaacaccacgctgctggtggacacctacaacatcgaggaagccgtgaaaaccgccgtcgaggtggccggtcccgaactgggtggcgtgcgcatcgactccggcgacctagccgccatggcccagcgtgtgcgcaaccagctggacgccctgggcgccacgaacaccaccattaccgtgaccaacgatttggatgagtacgcgctcgccgcattgcagaccgcgccggtcgactcctatggtgtgggcaccatgctggtcaccggctccggcgctcccacttgtgcgatggtgtacaagctcaccgaacgtgaaggcgctgacggcacgatggttccggtcatgaagaaatccaaggacaaggccacagtgcccggtcgcaaactggcattccgctcctacgaatacgcgttagccgaagctgaacacgtgatttccggctcggaggagaagctggccagtttcacgcctgaaccgacgtggaagaacctgctggtcgactttgtggatcatgggcagatcgacgctcagtggcagggccatgacgccatcatggccgcccacgactaccacgccaaggcgttgtccgaactgcccatcaccgcgcagagcctcatgaagggcgagccagtgattcctacggagactcaggttctctgaccgtatctcactggccgcatccctttggttacattggctactcttccctctgtctgtgtccctctgtctgtgtccctctgtctgtgtccctctgtctgtgtccctctgtctgtgtccctctgtctgtgttggccgcactcctgtggtcgccgccgaggcggggagatccaaccccggtcgcacccccgtgtttgcaccccctgtggctgtgtcccggggctgtattggccgcgtcccctcgggctgaactgcgtcccggttcgccggacgtggttccagctgagggtggccccccttgttttttttttggggggggtactgttcaccggggaaatatgtatatgtgcatgctgttgcaatgtacattttgttgtcagttgacaacgtcttgattcagatgaattggcgggaaatggccatttgtcttatccaattgatttgaagaacgttgtcagttgacaacgttttgtacatggtgcggaacgacacatattcctatcctggtcaggatgccgacgaggtggagtgaaaaaccaaaccatttcagaggatattgcaccgagacgttgtgggattgccgtgttgtcggtgatgttacagagatggcgcagtgttgcgtgaggggtgttgcgtgtgatgttgcgtgtgatgttgcgttgggctgattgggaggaatagtgtgccgatagaatgccgtgatgcgtgcagagcaatcgtttgcggagcaatcgttgaagaatcgtgtgaactgatgcgatacgaatcataccgtctctgaattgtgggatatgacgaatcgtatcgtcatgggattgtgggatatgatgattgcggtttgatgaaatgaccgggaaatcggccgaggcaaggtgacttcgatgagtgaaactctcaatgatgagaacgcggcgagcaacgatgacgtatcagagcggcgcgctgtagagcatcgagcgttagaacagtgcgatgtcgtgcatcacggtgtggtatctggttgccctgttaattcgtgtgcggctgtgctgaatgaagtgatgtcgcagactggttggaatgcctatgagcttgcacagcgtactggtttggatcggtctgcaattggtcgcgtattgcgtgggcaaagaggtatgttgtttgatgttttggccgaggggcttgagcgggctggttttggtcttcacctagaagccgtggccccctcgcaaacgattccggaagacgaattgcacatgttgttggcgcaactgcgtaggcctcctgatttcgatgcaatagaaagcggagcgacctggtctacgttgaagatgctctgcgtcaatctgattcatgctcggaatgttcaacatcaacgtatatcgttcgtccgagcggttgcacgggtgaacgatgcgtgctggattgcgtttctcgctggtttataccgttttctgcgttgggatatcaacccaaggaacagacgcttgacattggttcctccgtaccggtatggcttggatggatggtggtccccactgccgagcgcggcaattatgcacgtgcttcatcgatatgaagagccgttgcatgacatggactatacatatttgccgttaatcgattacgaactcaacgctatgcagcgcaagcaattcaaccaagatttcatggaatatggcattcttattccagcggacgatctttcccaatcctcatcaggtacgcaggcattgactctgtaagcgagtggtgcataagaaaatagtggcgtgcagccaagtgtcatggaatggatatgtaagcagggaatgacattgcgctggggtttgatgatggttgacgagttgctatccaggcatagagcggatggcgtatgctggggcgcatggttgaaatcaaagacatgcttggcaatcaccaaataattcgtgccgacggccgcaaggtcgacgagctgcgccccgtgcgcatcacccgccacttcaccgacgcccccgaaggctccgtgctcatcgaatgcggtaacacgcgcgtgatgtgcaccgccacttttacccctggtgtgccgcgttggcgcaaggactccggcctcggctgggtcaccgccgaatactcgatgctgccgcgtgccaccgccgaacgcaccgaccgtgaatccgtacgtggcaaaatcggtggccgtacccacgaaatcagccgactgattggccgctgcctgcgtggcgtcatcgatatgaaggcgctcggcgaaaatcagattcagcttgactgcgatgtgcttcaggccgatggcggcactcgcacggcttccgtaaccggtgcgtacgtggctttggtcgacgcagtcaattgggcggagaagcaccgccatatcaagtccgccagccgcgtgcttaaggactatgtgtccgccgtatcggtgggcgtgatcaacggcaccccgatgcttgacctgccatacattgaagacagtcaggccatgaccgacatgaacgtggccatgaccggttccggcaccttcatcgagattcagggcaccgcagaacaccgtccgttcaaccgtgccgaactcggcaccctgcttgacttggccgaaaagggcaacaaggaactgcaagccgcccagcgtgccgctttgtccctagactaagccagctccccttcctttaggggaggttgtcggctggaagccgtacggtctgcaatgtccagctcccctgacaaggggagccttcttaaaggagaacccatgcaaatcgtcgtcgcaacccataacgaaggcaagcttgtggaaatccgccgcattctcgaagaggatcttggcgtggatgccgaaaacatcgaactggtgtccgctggcagccttcacctgccggacccggtggaaaccggcgtcaccttccaggagaacgcgctgctcaaggcccgcgccgtggccatccgtaccggtctgcccgctgtagcggatgattcaggtctcatcgtcgatgtgatgggtaacgctccgggcattctgtctgctcgctgggcgggtgctcacggccacgacaaggccaataatgcgctgctgctcgcccaaatcgaagatattccggatgacaagcgtaccgcgcgcttccgctgcgccgccgcgctggtggtcccggacaccgaggccagtgccgacgtgaccggtggagtggctgccgacggcatcaccgtttacaccacggctgcagatgggagccctgccccggtgcatgcccggtacgccatcaagtcggagacagtggagctcggcgacatgccaggtcgtatcatccgcgaggctcgtggcgaacacggtttcggttacgatccgctgttcgtcccggacgaccagcctgccggtcgcgtcagcactgagcctgaccatgaaggcgagccgctgaccagcgccgaaatgactccggccgagaagaatgcgatttcccaccgaggcaaggcgctgaaagccttggtccccgctatcgaggcgctgctgcactaagtcgtctaggctgtctaactgcactgagccgcgactaagccacagttgagtcgcggctcagcaactcagcccctcccgaatcgggcaagtgtctagcaagcgcctatgacctagcaagggcgatacgaaagaaggccggcgcttagtgcgtcggccttcttgatgaacaagagccacccgatagaatcgaactaccgaccttcccacgaacgagggggatgctctaccactgagctaaggtggcgtggctccaagagccaagtagagaatatagcactgcgtttgattcaacgcaagccggacgttcagcatcttcgggccattgttctttgagccattgtggaggcaatagtgcgaacgatgtgcacacctcgtctgctcggaccccattcgtcgtgtgcgcgttatgctagcatggtgagcctgattgactcggaggcagagggaagcatgcgtgattttgtgctggtgaagttgacagacgaagagttcgatgatttctccgccaggcatccacaaggcaatttccaacagacctcggcgatgggacgccttcgcgccgcgcaggggatcgacgtcgaatatctggccctcaaggagggcgagaagatcgtcgcggcggcgctgttcgaaactcaccgctctcgattctctacatttgcggccatccatgatggcccgatgtgcgactatcacgacaccgaagcattgaccttcttcatggatgcgctgaaacgccatgccaaggcaaagggtgcttcacagctggaaatcacccctgaatccccgtatcggcttcgcgacaccaatggagcttctttgccggatgaccagaacggcgctcccgacaataagctgatagaacggctcgaggcgatcggcttcactcatggcggtttcaccgtgggctacacggcggttccacgttggcgctacctcaaggatctgaccggcattaccgatgagaaaagtctgctgaagtcctatgacaagcgcacccagtggagcgtgaagcgtgcccaatcgatgggtgtgcatgtgcgtgagctgtcggacgacgagttgggggtattcgcacgaatcgagcagcaaaccgccgaacgtcgtagcttcgaataccgtggcgaagcatatttccaccgtttcaaggaagcgtttggcaacaaggcgcattttatggttgccgagatccacatcgacgaatatgtagcggacatgacggccaagcgtgaagcactttcggccaaggtggcggcattgaccgccaaaaacgccgaacaccccaccaccaaaaccgaacgtcagctgggggaggagacccgcaatctggcggcagtcgaaaaacgcctgaacgaggcggccgagttcgccaaagacggggatgtgctgccggctgcggcatcactattcgtggagcatccgcgcgaggtcatctacctgttctccggtagcgtcgagcagtacaagcccttctacgcctccgcgctgattcagcatgacgcgatgctgcatttctgcgtggaacacgggctgtctcgctacaacttctacggcatcgacggcgtctttgatgatcccgatgacgaggggcgtggtgtactggagttcaagcagggcttcaacggatatgtcgaggaacttccgggcgagttcgtactgccggtcaaaccggtcgcctatgccatgaagcaatttgcgcacaagctgctgtcgcggtaaacggacgcagcacacaggccattccagagcccagagtaacgatcagagtaacgacaagtaagaaggttcgattatgacgcaatccgatgcaggcgtcgcctcgctcacccctaccaagatcactcctgccgagctggatgcattctccgcagctcaagtgcaaggtagtttccagcagacctcgcagatggccgccatgggtgcgttcaacggtccggtggactatgtgggtgtcaagcgcggtgacaagctgattgccgcctgctacgtggtgtacacgcagtcccgtttcggtttggaaggctcggtctggtgcggaccgctgtgcgattatgacaatccacaggtggttgaggcgatgaccgaagccctgcgtcgttcggccaaggcccatcacgccatcagcgtatcctgctggccggccgcagtctaccgtctgcatgatctggacggcaagccgaccagcgacccggacaccacgatgatggacaacatggcccgcttcggttggaaacatggcggcttcaccgtgggctacgaatccgtggtgaaccgctggaacttcgtcaaggggcttgacggcattcataatgagaaggaactgctggcctcgttctccaagtaccgccgtaagaacatccgcatcgcccaggattccggtctgcgcgtgcgccggctggaacgcggcgaactgagcactttcgtcaagctgtgcgatatgagcgccgcacgtcaaggcttcaagagccgcgatctggcctactatgagcgtctgttcgataccttcggcgacctgatcgagttcaaggtggtcgaaacccatttcgacgaatatctggacaccctgcaatccaagctgaatgcggcctccaaagacaagcgcaacctcgaacgcctgctccagcgcgcgcaacagcggccggaaggcacggccaagaagggtgcctccgacccggcaacgctggaaaagcgcatcgccaccgcagacaagaagatcacggcgctggaaaagaccatcggcgaagtcaatggcatcatcgcctcggacggcccggtcattccggtggaagccggtgtctacttctggcatccgaacgaggtcgtctgcctgtccagcggcgaggacgatcgtttcatggattactacccgtcttccctaatccacttcgaggcgatgcttgactgcatcgcccgtggcgtggagcgcttcaacttctacggcatttccggcattttcgacgccaacgatccttcctacggcgtctggcagttcaagactcgcttcggcggattcgtggaagagcttccgggcaagttcacgctgccggtggacggactgcgcttcggtgtatccgaagccgcacacaagctgctgcatcgctgacaaacagtggcgagcacggacacagaaataaggcacaggtgacgacgagatgagcgcgactgcgaatcgaacagatacgacgtatacgtttggcgtgattacgcccgaagagttcgaccggctttccgaagccacaagccagggcagctttcagcaatggtccgggcaggtccgtcttgccaagattcgtgggcatgaagccgaatgcgttggcgtgtgcgacgcatccggcaatctggtagccggctgcgtgattctgtacctcaatggtcgtttcggtgcagatggctccgtatatttcggccccatcggcattagcgatgatccggctctgctgcgggccataaccgaggcgattcgtgaatcggcccgtcgccaccatgctgtttccgtggcatgctggcctaacgtcgcctaccgtctgtattcctcggacgggcagcccgacggcgagccgaacgatgcactgctgaccggattcaccgatgccggctggacgcatggcggattccataccggttatgacgtggtctgccagtggatgtacgtcaaggatctcaccggcatcaccaacggcaaggaactgctggcatcattcggcaaacgcgctcaatggagcgtcaagcgggcgcagtcgatgggcgtgcacgttcgcgaaatcggccccgacgagttcgacgtgttcgccgatatcgaacggcggaccggtgaacgccgcgggttcgcgacgcgcggcgcggactatttccgccagttcaagcaggcgtatggcgcggatgcgcatttcatgctcgcggaaatccacatcgccgaatatgtggcggatatgaccgccaagcgcgaggccttgcagaccaaggtcgcacagctgcagacgaaatacgatgaacgtccgaccacgcgcatcgaacgtcagctgggggaggaatcgcgcaatctcgcggccgccgacaagcgtctggctgaggtggagggatatgccaagaagggcgatgtgctgccggcagcggcttcaatgttcgtcagtcaccccaatgaggtggtctatcagtattccggttcgttggaggagtacaagccgttctacgcctcggcgctgattcagtacgaagcgatgctgcacctgtgtgtggaacagggtgtgagccgctacaacttctacggcatttccggcgtgttcgacgatccgaacgacgagggccgcggcgtgctggaattcaagcagggcttcaacggctacgtcgagcagatggtaggcaaattcacgttgccggtggacaagttccgcttcggcgtgagcaatctggcgcacaagctgctgcaccggtagcagctggcggccgggggacgaacctatgtgggctgcgtctcgcctgaccgtgtgcccgccgtgtgcccgtcgtgtgcctactcgcgcatttgctcacacgcccatcagcgcgtgagcaaatgccatcatcaccagtgaaatcatcgcggtgattgccagcgagaagccggccagtttggcgttgccgagtactttgtcggtgaacagcgtggagaaaatggcgattggagccaacgcgcagatcaccatcacggcgcgaatcgaagccgagaacggcagcaggaaccacgagatcaacgcgaaggcgacactgaacggtatacgccaagcgatgacggccatgacttccttcacatcatgcttggactggggcaaatccatgagcatgcccaccatcagcatcgacaccagcgcgttggcaccgctcaacggctgggttatagaggcgatccaatcgggaatcttcacgttggcgacggtcaacgcgatcatgagcagatacgtgtcgaacggcaccgagccgaagaagctcttgccgatggtgcgcagcaatgcgcggcgggcaagccgtttggcgtcgcgatccttgggcttttcgtacggcaaggtgggaaccgaaccggcgtgttgttcggcaagtgttttgccgggctgaatatgcagcagttgctgggtgagcacattggtgccggcggccaccatcacgcagttgccgatatcgaacatcgcagccggcaccaccgcgcccgcaccccagaatgactggacgaccgggaaagagaaacaaccgagattgaagccggcgccattgagcatcaggaaggcgcggtcggtcacattgcgcttgcgggtggccagaaagatgaacacgatcgggataaaagcaaacaggaatgcgaataccgaaataagcagcagcgagatgtcatgcggattggtggcgaacgagtatacgatggcaccgggtagcacgatgttgaattccgcggtttgcaacacgcgataatccttctgcccgaacaggccgaaccgcttgaacagatagccggcgagaatgatcagcaataggccaaccggcgtaagaatggcggacatacacttctctccttgactcacacaggctcatggcgcacaggctcagacccacaatgctgtgaccattatatttgccgccttggcattgccatatgtagaggcgtccgcaagggcttgcaattgcctcacgcatatacgaagagcctcccggaatcgttggcgatccaatgtttccaggaggctcaagccggtgcgcgagatgggacttgaacccacacgtcaaagacacaggaacctaaatcctgcgcgtctaccaattccgccactcgcgcgtgcatatccgcgtttccacaggtgtggaagatatacaaaaccctaggccggacagccattacagaccagccagcctagggcatccgagccacttgtcagaatcgaactgacgacctgctcattacgagtgagccgctctaccgactgagctaaagtggcttggttcgcggaaggcatttcgccagccgcgcacaagaaattaagtataagacatctccgcgaaaagtccaatcggcggcttggcggttgtgtcgtgaccgctcggttgaagatgacggttgtgccgcgccacgaactgttcgataatgcaaacgatggcaatccgacatcgctgactgatttttgttctgttcatgtccgaatttgtgagtattctgtttggtgatacggagcgcatccgagccgtgagcgaaggcgctccagtcactgatgaaaggaatggaatcctatggccatcaatccgcccgttgacgccacccagacccctgagtgggcttccctgcagaagcactatgacgagcttcaggccgaaggcgtgagcctcaagaagtggttcgccgaggacgccgagcgtgtcgacaagctgtccttcgacgccggcgacctgcacttcgatctgtccaagaacctgatcaagccggaaaccctccagctgttcgccaaccttgccaaggccgtcaagctcgatgagcgcaccaaggctatgtacaccggcgtgcacatcaacaacaccgaagaccgcgccgtgctgcacaccgcgctgcgccgcccggtcgaagacgagggcaagtacatcgtcgacggccaggacaccgtcaaggacgtgcgcgaggtgctcgaccgcatctacgccttcgccgacaaggtccgttccggcgagtggaccggtgtgaccggcaagaagatcgaaaccgtggtcaacatcggcatcggcggctccgacctgggtcccgtcatggtgtacgaggccctcaagccgtacgccgacgcgggcatctccgcccgctacatctccaacatcgacccgaacgacctggccgagaagaccaagggcctcgacccggagaccaccctgttcatcatcgtctccaagaccttcaccaccctggagaccctgaccaacgcccgtgaagcccgcacctggctgctcgaagagctcaaggccaagggcgccatcgacggctccgacgagaagaacgccgaagccatcaagaagcacttcgtcgccgtctccaccaacctggagaaggtcgccgaattcggcatcgacccgaacaacgcgttcggcttctggaactgggtcggcggccgttactccgtcgactccgccgtcggcacctctctggccgttgtcttcggcccggcccgcttcgaggagttcctgcacggcttccacgagatcgacgaatacttcgccaacaccccgttcgagaagaacgtcgtggtgctgctcggtatgctgaacgtctggtaccgcaacttcttcaaggtcgcctcccacgccgtgctgccgtacgaccagtacctgcaccgcttcccggcctacctgcagcagctgaccatggaatccaacggcaagtccgtgcgttgggacggcacccccgtcacctccgagaccggcgagatcttctggggcgagccgggcaccaacggccagcacgccttctaccagctgattcaccagggcacccagctcatcccggccgacttcatcgcgttcgtcaacaccccgaacccgaccaaggacggcgaccaggacgtgcacgagctgttcctgggcaactacttcgcccagaccaaggccctggcgttcggcaagaccgccgacgaagtgcgcgccgaaggcaccccggaggagatcgtcccggcccgcgtgttcaccggcaaccgtccgaccacctccatcttcggtgtggccctgaccccgttcgcggtcggcgagctcatcgccctgtacgagcacatcaccttcgtcgaaggcaccgtgtggggcctcgactcctacgatcagtggggcgtcgagctcggcaagcagctggccaagcagatcaccccggccatctcccaggacgacgacgccctcgccgcccaggacgcctccacccagagcctgatcaagttctaccgcgcaaatcgcgaattctgattcgctttgctcggtcagaattcgtgattcgcgcgaccgcggctgtgctgtctggtgggcagtctggcgactgcccacgtcgcgagttctgattcgctttgctcggtcagaattcgtgattcgcgcgaccgcggctgtgctgtctggtgggcagtctggcgactgcccacgtcgcgagttctgattcgttcctctggtgccccctcgggtgagaggagctgtcagtgtagctgactgagggagtctctctcacgactagtgcccgacatcttcggatgccgggcactttgcatatacggattgctgtcagtcagatgagtcgaacatggtcatattccgcttcggcatctgtttgcaggcataaaggcactatctagccaactcacgtggctgattcgcttattcgcccttattcgcctcatccaagctcagcagatcgtcatcggcatcgtaatcgaagagctcgccgtaacggccccactccacggcgatggcgaactgctgatgcgcctcgtcgttggcgtaacgggcgcgcagcaggtccagcatgagctcgccgcggagcttgccttccgcagacttccgcagtgcatgctcaatgttgtgcaccagcggcgcgtgttccatcgccagtgaggcgaacacctgcttggcgcgcagaatgtccgccttatgccaggagtcgcccgcctcggtgatctgcacatggccgtcgcgtaccacgatgacgcgcagcatcgtaccggcatccaccagcgggaacaggtcgtccacctcgaacgaaagagccgaggccaaatctgccaagtcgatgccgtgaggatgctcggcaaccacatccagcagaccggcaagcccgcccggcgtggcgttgggcagcggatgctccttgattttctcgatggtcttggcgggctgaaggtctgatgcgtccgtgacagatgcgtccgtgacgggtgcgttcgtgagcgatgccgatggcgatagagcctcggcttgttgcgtaggctgcgaggcctgtccggtcaaaatcgcgtacagtcggtccaccatcgcctcgaattcgacactgtgacggtcgcgcgggcgctgcagatcaacccgcacatcggcaatcagatgccccgggtgcgagcccaacaccaccactcggtcggccatctccacggcttcctcgatgttatgcgtgaccataagcaccgacttgatgctgcgctgttcgctcgaccacagcttgagcacttcctgacgcaggttttcggcggtcagcacgtccagggcggagaacggctcatccatgaacagcgcgtccggccgcagcaccaaggcgcgtgcaatgcccacgcgctgcctcatgccgccggacagttccttcggatacgccgattcgaagccgtccaggccgatcatgtcgatggcatccagagccagtttggtgcgttccgcacgtggtacgccgcgcgccttcagaccgagttccacattgtcttgcacggtgagccacggcatcagcgcgaaggtctggaacacgagtgcgatgccgggattcgggccggtcagggcctcgccgcgatacttgaccgtgccgctggtcggcttgaccagtccggccagcgcacgcaggaatgtggacttgccggcacccgaacggcccagaatggccacgatctcgccctcgtacaggttgaacgagatgttgtcgaacacggtgagttcggtgccgttgtcggccgtgaagcgctggccgacgtgctgggcttcgatgatggtgttctgcggggtcaccgcccgcagcgaacgaatggtttccattgcaacagtcatattattctccttaagtctttagttcagtgcgaaacggcgctcggccatgcgctgcagcgggttccagaacaagcggttgacggccaccacgaacacgctcatcacggtcacgccgatgatggtcctcacggtgttgccgctttcggtggcctcggcgatatacgcgcccaagccggaggcggtcagcgtatgccgtccataacttacgatttccgagacaatcgaggcattccacgccccaccggccgccgtaatgccgcccgtgacccacgagccgaataccgccggcaaaatcaaatcgcgccaccgctgccagcgccccagctggaagctgcgcgtcatctcacgcagatcgtcgggaatctggctggccccggcgatcacattgaacaggatgtaccactgtgtgcccaacgccatcagcagaatactgccccagttgatatccacgctgcatgccacgaaccagagcgtgacgaacgggaacgtgaagttcgaggggaagctggccagcacctgcacaatcggctgcataaaccgcgaaacgcgcggattcatgccgatcatcgcgccaatcggcacccaaatcaccgagcagacgagcgtaagcagcgccacgcgcaggaacgtcaccatgcccaacacgaacgcctgcccgagctcgccgaatcccgcatcgcgatggatcaccagcataagctgcaccagtccgaacgcacacgctgccaacaccagcactgtgaataccacgtcaagcgcgcggctgcgtgcggacttcacgtccgccgcccaacgtccaccggtccgacccaacgggcgggccagcgtgtcgaacaggtcgccgacaggcctgaacagccaggccaccatctcatcgatatgtgactgacgaatgatggtcagcaccacactggtcttgcgcaccgccgactcgctttgcgtaatgcggaacttctccgcccacgcggtcagcggcttccacagcagtacgtcgataagcagcaccaccagcaccatcgtcacgatggcccagcagatggccgcgagattctcctcggccgccgcctgtgccacgaagctgccgatgccgggcaacgcataggtgcgattgttcaccgagatcatctcggaggcggtcaggaagaaccatccgccgcccacgctcatcatgcagttccacagcagcggaatcatcgcgttcggcacgtctagtgtccagaatcgttgccagcgtgtgagctgtagtgagcgggccgcctcgtcgagttcagttggttcgctggtcagggaccgggtgaacgagaacgccatgttccaggcctgactggtgaagattgcgaaaatcgacgcggcctccacgcccagcatcgagccggggaacagcaccatccagatggtgatggtggccgaaagaaagcccagaatcggtaccgactgcagaatatccaacagaggaatcagcacgcggctcagccggcggcagcgcgcggccgccgtgccgtagatgaacgtgaacaccagtgagaagaacagtgccacgagcatgcggaacaccgagcgcagcgcgtaatacggcaggtcggcgagattcgtactgacttgtgatggcactcctttcgggccgatcggttcgccgatcgccggcagaatccaagcgatcagaccgaacagcgccagaataccggccgcgaccagtacgtcggaggccaggcgcacggcgaatggctggcggtcggacgcggcggtggaagggttgcgggccgacgcatttggacgcgcaccgacgcgattgaatgaaaacatggtcatgaaaagacctccctatgcataggaaagacgaattatgcaagggttatccggggagccaaggaacactacaggcgagagcccgacttccggataacggaatataagaaaacatggtcatcaccaccgcaactatgactgttgccggcggcggaactactggaataatcaccgtccatcggactctcacctccttcaagccgtgcgctgaaacgccagatcaataccatcgtcggtatccatgcgaccagcaggaggggcggaaagtattcgaatccgccgattcgagccatcgttcaagcttcagcatcgcagggcggtggaattgcgttagttcatgccttgatccgacaagaactgctgacctgcgtgcagtgtctccactgttagcggcagcaacccatatccctgcggtagcctcgcctaccgacgctcccaagataaagcccgcctgcaggtctgtcaactacgtcgcagtgccttggtgttggaatgccatcaggcagccattctgtccgcaataatccgtacaattgacgattgctgtgtcgagaagtgggccgccgcataagcccacgtctccatgggtccagtccgaacggccgcaaggcctgactttcggcggatcggcaggcttcccaagggcaaacccgagggataacgagaacaggccaacgcacgtgatgcgcaatcgcgtggatggccccagatctgtggctgatatgcggcagcactgaaggaaaacaatggttaacgctgttgaggcttttgacgccaagcacatgaagccggctgaggaaatcccggccttccgtcccggcgacaccgtcgacgtgaacgtgaagatccaggaaggcaacaactcccgtatccagaccttcaccggcgtggtgatcgctcgtaagggcgctggcgtgcgtgagaccttcgtggtccgcaagatcagcttcggcactggtgtggagcgtcgcttcccggtgcactccccgtccatcgactccatcaagctcgtgcgtaagggccgtgtgcgccgcgccaagctgtactacctgcgcgctctgcgcggtaaggccgctcgtattgccgagcgccgcgacaactccgctaagtgagtcgattcgcgggtgcaatcgtgggcctgatgatgcaggtgcgcgaataaaccgtgaaattcagcccggaaccgtttcggtttcgggctgttttcgtattttccacgtatgatggacgggcgccggcacccctcatatccggcagcatgaatcgcgaggagatggtatgcaggacgatcaggataacggcgaattcccggtttccgacaatccggagagcaaccagacctcgtatgatgacgaggccgatgcccgcgattcccgcacgttccaagtcgccgaccacggcatcgccccgtccccggttcccccggcaccggcgcgcccggcgcacgccgcttcttccgctggcacgaatgccgcggcagcatcatcgatggatgatgaccacttcaccctacgcgactttttcctgtggtgcggcgttcccgtgcttatcgtgctgctgattcgcattttcgccgtcggcttttacgagattccttcgcgctcgatgatggacaccatggtgcccggcgatcgcgtggtgaccagcaagctcacccccaagatcttcgatctgcagcgcggcgacgtcgtggtattcaaagatcccaacaactggttgaacgaggagcagagcagcgctcccggtggcgggtacctcatcaagcgactgatcggcctgcccggtgacgtggtcgaatgcaagggcgcgggccagccggtgaccatcaacggcgtggccatcaatgagacctcctacattcgccccggcgtggacccgagcgctttcccgttctcggtgaccgtgaccgagggccacgtgttcgtcatgggcgacaatcgcgccaattccgccgactcccgctatcatcaggatgacggcgatcgcggcttggttcccatctccgatgtggtcggagtcggaatcgcgagatactggccgcttgaccggcttggtgcgattgatgaccaccacgaagtcttcaaggacgtgtctgacgcttccggctcgaattcctgagtcttttttgaaccgtgtgagtctttgaactgattgagttccgggccgtctgaatcctgaaccatttgaacctggaccgtctgaatcctaaccattgtgagacgatgggagccgcgcatgattaccccgacacttgacttggaacgcagccttgcggcccagggctatgaccttattactggattcgatgaagtcggccgcggcgcgctcgccggtccggtaatggtcgggtgcgccgccatctgggcctgtgatttggcgccgcttgacggcgatgattccgccgaactgtccgggcggacctacctcggcgtaccggacggcgtggccgactccaaaatgctcaccgaacataggcgcgaggcgattttcgacgaactgcgcgactggtgcgcggcctacgccgtaggccaggccagcaacacagagatcgacgaatggggcatcacctatgcgctcggcgtggccgccctgcgcgcgctcagccaagtcgaacgcgaacttggcttacggcttggagggggattgacggcaaaaaaggctgcgggggagattgtggaaggtcgtccgggagactccgtaggggaatccattggaaattgtggggaaagcgttcgcgccctgcccaaagtcgccggaattctcgacgggccgagcgattacatcaccaaggcgctcaacacgttcgacgcgccggacgtgccgattccagccgatataacgaccaaagtcaaaggcgaccagcattgcgccaccgtcgccaccgcggcggtcatcgccaaagtgacccgagaccggctgatggtcgacctcgcgcaaagcaacccacgttacgccgcctacgaatgggctcataacaagggctatggttccgccgcacaccgtgccgccatcgccgaacacgggccgactccgctccatcgtgtctcatggcacctgacctgagccgcgtgcgacacgacagtgtgagcgctaacgcaaaactgttgtggacgcgctaaagtcagtattgattaaggtacaagcctggccgcgcatgggtgccggccgccagcggggaggttaggtagcatggtgaccagccgcaagccaagcaaacgtccgtccatgttcgaagtggccaagctcgccggagtcagccaccaaaccgtctcccgtgtgatcaatgactcgccggacgtttccgacgccacccgtgcgcgagtccaggccgccattgaccaactcggctaccgcccctccaactccgcgcgcgcactggcttcccgccgttcgcgcaccatagggctgatcgccggaggcctcaaattcttcggcccgatttcctccatctcatccatcgaatccatggcccgcgaacacggtctgttcatgagcgtgatgatggtccacgaggccttgtgcatgcagtccgaattcgacaacctgtgcgacaccttcaacgagcagaacgtcgacgccttcatcttcctgaccccgaccgacgtgatgttcgccgccgcctgccgtgcgcgagtcactcagccacgcgtcatcgtcaccgccacccacggccaaatgaccgtgcgtgagggattgggccttatctccaccgaaaacaagcgtcgcactgcactggtcggtatcgaccagtggggtgcaatggccaaagtggtggccttgctgggcgaatacgggcacaaatcggctctgtattttgccggtcccaacgaatggcgcgacgcccacacccgactggatgcgtggcgcaagctcgccgcctcccgatccatcgattcacagatcgtgcgctgccatacgtgggatgcctctgaggcatatgcgcacatgaatcatctcattgatgagtatgggcgtcggggcatggcgttgcccaccgcggtcgtcgccgcgaacgacaatcaggccgtcggcgtcatgcgcgcgttgcatgagcatgggcttcggattccgcaagacgtcagcgtggtcggattcgacgacatgtctggcgtggataacatgtacccaccgctgaccaccgtgcatcccgatttcgaggggcttggcgtggccgccatgcgcgagacgctgcgcttgctgggggagggcggcgagccgaccttcctgaccacccagcacggcatggggctgattcccgccgaagtgcgtgctcggcggtccttgggaccggctccccggcggtaaattggcgctgttatcaaaccgttatgatgcgtgacacggtataagttgtgtcgaatgcaggttatcggtacaatgtttttttgaaattgtgagcgctaacatcctccccaaggaaggggataacaacgccggcgctccaaggcaaaggaaagatatggcagcaaccgacaacgcggccgagcaggccgcccacatcgccgagaagattcgcgctggcaagaccacgctgggcatcgaattcggctccacccgcatcaaggccgtcctcatcgacgacaacttccagaccatcgcctccggcgactacagctgggcctcccacttggaggatggtctgtggagctacgccaccgaggagatctggggcggtttgcagtccgcttacgcctccatggccaacgacgtcgagaccgcctatggcgagaagctcacgcacgtcggccacatcggcttctccgccatgatgcacggttacctcgcattcgacgaggccggcgaactgctggtgccgttccgcacctggcagaacaccaacacctccgaagctcacaagaagctctccgagctgttccagtacaacatccccgagcgttggtccatcgctcacctgtaccaggccgtgctcaacaaggaagagcacgtctccgaggtggcttacttcaccacactcgccggttacgtgcactggaagctcaccggtgagaaggtcctcggtgtgggcgatgcctccggcatgttcccgattgacccgaccactcacacttacgaaaccgcattcatcgagaagttcgacgctctgcctgaggtcgcagcccagccgtggaagctggagaacctgcttcctgagccgctcgtggccggcactccggctggcgagctgaccgaggaaggcgccaagctgctcgatccgtccggtgccctgaatcccggcatcgtgctcgccccgcctgagggcgacgccggtactggcatggtagccaccaactccgtgcgcgtacgcactggtaacgtctccgccggcacctccatcttcgccatggtggttctggagcacaagctcaaggccctccaccctgaggttgacttggtcaccaccccggccggcgatctggccggtatgagccacgccaacaacttcacctccgacctcaacgcttgggtcggcctgttcggccagttcgccaaggccatcggccagtcggttgatgccggtatgctgtacggcaccttgttccgcgcggccatcgccgacgacgtggacgccaactgcggcggcctgctgaactatccgttccgttccggcgaattcctggccggtctgcctgaaggccgcccgctgttcgcccgcagccccgaagccaacatgaccctcggcaacttcatgcgcgcccagctgttctccgcgttctccccggtcaagatcggcatggacgtgatgaccaagcaggagcacgtgcaggtcgactctctcgtgggccacggcggcatcttcaccactccgaaggtggctcagaagattctcgccgctgccttcaacaccccgatcaaggtcatgtccaccgccgccgaaggtggtgcctggggtatggccgtgctcgccaactacctgtggaacaccaacgaggatcacagcaacctcgctgacttccttgatggtttcgtgttcaaggacgcccagtccaccactgagaagccggtggcttccgatgtggttggtttcgaggacttcttcgcccgcttcaccaagggcctgcccatcgagcacgctgccatcgaaaccatcaacctcgaagataagtaagcctttctgacctccctctattgagagaggtccttgagattttgaaaaaacgtccatccatcacagtggaaaggaaaaccaataatggcaactttggctgattacggccccgaggttcgcgccgaggtcaagcaggttcgtgaggtcgtctccaacctgcaccagcagctgatcaagtggaacctggtcgtgtggaccgcgggcaacgtttcccagcgtctgcacaccgccgacctgttcgtcatcaagccctccggcctgcgctacgagtacctgaccccgtcctccatggtcgtgtgcgaccttgacggcaacgtggtcgacggtgccgaagccccgtcctcggacaccgcttcccacgcctacatctaccgcaacatgcccgacgtctacggtgtcgtgcacacccattccacctacgccaccgcttgggctgccactggtcagaacatcccgtgcggcctgacgatgatgggcgacgagttcggcggcccggtgccggtcggcccgttccgtctgatcggctcggaggcgatcggcaagggtgtcgtcgagaccctcaagaagtacccgaagtccccggccgtcctcatgcagaaccatggccccttcaccatcggcaaggatgctgaaggcgccgtcaaggccgctgccatgaccgaggaagtcgctcacaccatgtgggccgcccgtcagctcggtgacatcatcgagatcgaccaggccgacatcgataagctcaacgaccgctaccagaacgtctacggccagcactgatttgatggagtgtccgccgcgttgcggaaggctcgacgtaccttcgtacgccttcgccttccgcgtcttgcgggcacacacatcaaatcagcgctgactccgccagcacggtggtgtcttggctcccctctctgaggggagcctcggtcggcgaatgaaacttaaacaaacccccataaacaaagaagtaaaggaagtaaccctatggttatggaaaaccccttcgagggcaaggaaatctggttcggcgttggttcgcaggacctgtacggcgaggaagccctgcgccaggtcgccattcactccgctgaaatggtcgactacctgaacaacaccggcaagattccggccaagatcgtcctcaagcccaccctgaagtcctccgacggtgtcaaggagttcatggtcgaggcttccgccaacccgaacgtcatcggcgtcatcacctggtgccacaccttctccccggccaagatgtggattcgcggcctcgaagtgctgaccaagccgctgctgcagctggccacccagcaccacaaggaaatcccgtgggagaccatcgacatggacttcatgaacctgaaccaggccgcccacggcgaccgtgagttcggttacatcgtctcccgcctcggcatcaagcgcaaggttgtcgtcggccactacaccgatcctgaggtcgtcgagaaggtcggcacctgggcccgcgcctgcgccggctgggatgcctccaacaacatgaaggtcatgcgctggggcgacaacatgcgtaacgtcgccgtcaccgagggcgacaagaccgaggccgagcgcgtgttcggcgcctccatcaacacttgggccgtcaacgagctcgtcgctgcgtacgacgccgtcaaggacgaccaggtcaaggagatcatcgaggactacaaggccaagtacgacgtcgacccggctctgctggacgccaagtacgactccctgttcatcgccgccaaggaagaggccgcgatggtcaacatgatgcgcgccaacggctgcaccgccggcgtcgacaatttcgaggacctcggcgctctgccacagctgccgggcgttggcccacagcgcttcccgtccgagtacggctggggcttttccgctgaaggcgactggaagaccgccgtcctcgtgcgcatcggcgccgtcatgggctacggccttgagggtggcgcctccctcatggaggactactcctacaacttcaccgagggcgacgagctcgacatgggctcccacatgctcgaggtttccccgtccatcggcaccatcgccaagccgaagctggagatccacccgctgggcatcggcggcaaggccgacccggtccgcctggtcttctccggcaagcccaccaaggacgccgtcgtggtctccatgtccgacgttcgcgaacgcttccgcctgctcatggacgtcgtcgacgtcgttgagccgcagggctccctcaaggagcttccgtgcgcccgcgccgtctgggagccgaagccgagcctgaagaccgctgttgagtgctggatcaccgccggtggttctcaccacacctgcatgaccacctccgtcggtcgtgaggcttgggaagacttcgcccgcatcgccggtgttgagctcgccgtcatcgacgagaacaccaccgctcgccagttcgagaaggaactggagctgtccgagatgtaccaccgtctcaacaaccagcactgattggcggagcgtataccgcctttcctcaggttcgacgtaccttcgtacgcccctcgccttcggacggcggtctccgcacgcgccaatcagcgctggcaagccagcaccgatgactaaatcagtctgctgactgctaccgctaaaaggggctgttccgggaaaccggagcagccccttttgctgttatcggcaactccccacaaacgcatcaaaaatcgcctgcgagcatggatctaccttgtagagaaactcgggatgccactgcacggcccacaggaagtggcttgccggccggtacagggcctcgatcacgccgtcgggcgcaacggccatgacttcgagaccgggggccacatcacgaaccgcctgatggtgatagctattcaccgcaatctcagtctgccccgagaacaatgaagccaggggagtgccgggcaccaaggaaacgttatgtccgaacgcatcgtacggcggattcatatggtgttcgatatcgctcggatgctggcttggcaaatcctgccacaacgtgccgcccagtgccgcgttgatgaactgaatgccgcggcagatgcccagaatcggcttgtcccaagccattgcggccggcagcagaatcgactccatgcggtcgcgctcaggagagagcacctcgctacggccggtggcggaggccactgcaccaaccatcggtcccacatccggcccacccgtaaacagaaacgcgtcaaaccgttcggcgcattgcgcaagaatgtcggcgtcatcggtcagcggcaacatgacgggcgtaccgccggcccgcattatcgcctccatgtatccgggcagcatccacagactatcgcgcccgtaatccatcagcggagtcaccgcaatgagcggtcgattcgtggtcatgcctgcctcttttcgcccaagtgtcgctttcgtcgttctgccgcaaatcgcttgatccagtggccaataatgccgtcactgtaccgaaccaatgtaaccggtcggccagcattatttcgtcagccagccgcgacgagatcgcacaatgtgccaatgatggggggctcggtgcggccttgtcaatgttcgggccattgcacgttcggcggggaaagcatgcccccgtccgcgcatcgtgatgaacgagtaaggttgacggggagggagaatcacatgaaccaggcatgcgtacgcaacgacaccatcgacgcgggcaaccatcatggccgaccgcaataccggtcgttcctgcgatttctgacatcgcaggaacgcaacgtcatttggctgttgctggccgtcgcttttcttccggtggacggcaccacgcttggcctgtacgcgccgttctggtcgccaatcagtccggcgctgttcgccgtgtactgcctatgcaattggcggcaactgcgcatcgcagccaaccggtacctgccaatgttcctcctaccggtggtctgtataatcctgtccatcccgggatggctgaagttcggcatccacctcaacgccgcgttcatgagcatcaccggattgctgggcgtgctcgccactttgggtgcgatcgcccttgcgttcgacatcaaacgcattccgtggcgtacgccattgcggattctcatcgcatcatactgggtttccttcggagtgggcgtcgtgcaatggctgtccatccgtctgcgcgccaaaccgttgaccgactatttctcgcacctcatgtaccggcaatacatcagcgacaactcggtgtggggcggcggccgtccgcagttcctgttcgccgagcccagctatatcggcatgcacctgttcggcatactgcttccgctcatgtggctcatgcgcgggcgcgaccgcatctacgccaaacggctgcgtgacctcatcgtcacgtatgccgtcggcgcggtgctcatgcaagccggcaccagaatcgtcatcgattccgtcgtggcgttgctgatcgcccttgtggcgcgcaccgattggcatgacggcgcacgccgcgtccggggcatgctgcagattctcggcgcatgcgcactgggcctgctgggtgtgctggcggattccagactctccgccatcgcggagaacggggccgagggagacggctcgttcttcgcgcggatctaccaaagcctcgatccgatatgcggattgctcacccatccgtggacgctgctcaccggttatggcgcgggcaacatcatcaatgcggtgtgggccggcgcggccaaagccggacggctgctggacggtcttggtatgaacggcggcgcggccacgggattcgcggccggcgtgaacgcggacacggtgtggacgatgtgcgcgtataccagcgtcatcgccgaatacgggctgatcgggctggccatgctggtcggagcctcgatggtctgcatgacgcgcgggaggacggtatgccgtggcggtgcggatggcgcatcgtccgacgggctggcgcacggtgtttgtgtcaccgacgttgccgacgttgctgatgttgccgggggcaatagtggtgatggcgttgccggcgcgggtccgggcgaatccggcgtctggcacaagaccgtcatctgctggctcgtcctggtcgcatacctgtacatccaatgcgagaactatgcgttcgccgctctgccgctcctcgtgttcgccgcctcgaaggtgaggcgcgagcgctgattcctc

SEQ ID NO: 651 - DNA, 3126 bp, Unknown
  R14_15m  MAG No. k141_12097
aacgacccggtttccatccggtcgttgaccttgtcttgtacatgctggtcgcgcattttctccagcatgttgtctgattgtgctttacgtgccatacgtcagtacccttgtcagcctcggaagatgaagcgtctgatcgcggacacgttggagaagatgcggatgccgagtacgacgatgacggctgtctgcagctgcgaaccgacgccgagctggttgccgaggaacacgagcagtgttgccgtcaccacgttggcgaggaaggagatcacaaacacgcggtcggagaagctgcgctcgaaataggctcgcgcggcacccagcagggcgtcaagggcagcgaccaccataatcggcagatatggctgcacgatgatcggaatgtccggcttgacgaacacgccgatgacgacgccgatgatcagtcccagaacggctgccattattcattcctttccgcgtacttcacttcgccagtgactgctgcctcaagtgtaatcgaattggatttgctcacctgcgggtagataccggcttccttgaaggaatcgtaaagacttgcaagtctcttctcccccatcgcttcggccaaggcgctcttatcgcctatggcttcaatggtataggggctttgtatcgcggtcatgccgatgagaatatgcccgccggccttgcgtatcgaggtttgcgcgccgagcctattaccgttgatggcaatggcttcggctccgttttgaaacatcagggagaccagttgttgcagatccagatcggtgatgactcggatgttcgtggaggtgccgactctcgtcgaggaggattgatccgactggcttgccgcgattggatcggccagcgtcatggtgattccttcgccttcgaccaccgtggcaccattgaccatttcgtcttggataagcgtgtcgcttttcacgctgccggagattttcttggactgttcgtcaacttgggatcgcaaattattgacgtccgtggtgagttcgtctatctgcgagttgcgattctccaattgcgtggccaaagtctgccgtacctgcttacgcggatcggattgcaactgttgcacgaataggctgcaggcaaagccaacgccgacgcagatgatgaatacgacgatgcgattaaaccagatggagaaggtcgaacgatgctcatggaccagtcgtgagtcggagaacatcggatccatcggacgattgacaagatcatcgatgagctgaagcgaatcgtcgttggttttacggcgacgtctggtgcggatggcggcggcgtcatccggggaaagcgcatgatgcgattccgcgcctcggactgagtgggagaacacggcgcggcgtcgtaccggctcattctccttgggtatggggaacgagaccggggccgtggcctcaagcgccatacttctcccccagttccttgcgtaacaatccgacgccctgcttggtatagatatatccggcgagccaatacatggcgatgccccagatgccggcggccagcgcggcgatgtagagcaagtggaagaacgtactggtgcccaaatcggcgaaaataagaccgacgatggaaatcatcagcagcgcggtaccagccttgcccacgaaatgcacgggcagcggaccataaccgtactgggcaagccatagcacctgaatcgccatccacagatccctcagtcccacgataatcagcatccaccatgggatgatgccggcgacgctgagagccagaatcgagcagaaaatgagcagtcggtcggcgatcggatcaagaatctgaccgatcttgctcacttggttgaatctgcgcgcgatgatgccgtcaagtccgtctgaagccgaggaaatggcgatcagggctagcgccgcaatcatctcgtgcttggagatcagcacgctgatgaaaggaatcgagatgattcgcagcgcgctgatcaaattgggcacagtgaaatagatgtcacgtgcttccggactgtatctggcgttgactttctggttggtcatatcgactaacagtctacatgcgggaggcttgcagagcggtaacgatgatgccgcgtgcgccgacttcgtacaaatcatccatcagctggttgaccttggccttgggaaccatgactcgcacggcgttccactgtttgtcgtgcagcggggagatcgtcgggctttcaaagccgggggtcacggccacggcggcggcgaccttgctgatcggaatgtcatagtccatcagcacatactgatgcgcagtgagcacgccttgcagacggcgggtcagcacggccagacgtgggtcctgctcgttcagacgcggcgaacgaatcaggcaagcttcggagtgcatgagcggttcggcaaacacgcgcaggccggcgttgcgcagggtggtaccggtggagaccacgtcggcgatgaggtcggccacgcccagctgcacggaggattcgaccgcaccgtccagatggatggtctcggcctggatgccgtgctcgaccagatagtcgtgtacgagcttatcgaatgtggtggccacgcgcttgccctgaacatcctccagggtggtgatcggggattcgttcggtgcggcgaaacggaaggtcgaggcaccaaagccgagcggcatgtgctcgagcgcggcggtaccggagttcttgagtagatcctgaccggtgatgccgacgtcgatggcgccgcggcccacgtatacggcgatatcgagcggacgcaggtagaacaactcgatgccattgtcgggatcttgcacgaccagctggcgagggttggtgcgcagacggtagccggcctcggccagcatgttccacgcgggttcggatagcatgcccttgttgggcactgcgattctcagcatttgcgttcctctcacaggtgcttatagacgtcctcaagcgtcaggccgtgcttgatcatcatgacctggacgtggtagagcagctggctcatctcctcggcggtgcggtccgcaccctcgtattcggcggccatccaggtctcgccggcctcttcgatgatcttcttgccgatgaagtgggtgcccttgtcgagctcgtcgacggtcagggagccttcggggcgggtctgggcc

SEQ ID NO: 652 - DNA, 16108 bp, Unknown
  R14_15m  MAG No. k141_12241
gattagaaagggaggactatgagcgttctcgaccgttttgaaaaaagcgtggagggtgcagtcaacggagtattcgccaagtttggctccaaagacctgcagcctgtcgatctttccagcgccttggagcgcgagattgacgccgaggccatgcccgtgggccgtgaccgcacggtggccccgaatgaataccgtttcaagctcagtactcctgacttcgaccgtatcgaggcatggggtagcgagaccctggccaacgaactggccgataacctcaccgagtacgcgaagagccagcattacgccttcgtgggcccggtgatcgtgatcttcgaggaagaccttgacctgtccaagggcaacttcaacctcacctccgaatccgtgcagggcaatgccgtgccggtcaccaccgatgcgcagaccgaggatagcccggtgctcgaggtgaacggcaaccagtacctgctcaccaaagacaagacggtaatcggccgcggttccggttgcgatatcgtcatcgacgatccgggcatctcccgcaagcacctggaaatcgacatcacggataacggcgtgatcgcccgcgacctgggttcgaccaacggcacgtacgtggagggccaccaagtgcccgccgccacgctgctcgacggcaacaccatcaccatcggccgtacccgcatcctgtactgggcctccgcccaagcccaggagtagtcgagcacacgcccgaaagtcgtccacttatgaccgaactgacattcgccctgctcaagtatggattcctgatcctgctgtggatattcatctggctggccgtacgttcgctgcgcaaggacatcgagacgttcagtccgcgaccttcgcgcgcgcgtcgtcgccgtgagcgtgaagtgcataaggccaaggccgaaacgccgcaggcagctgcgccgcgcccgcatcgccagcccagcgcttccgcgtcgtccgccgcctcggcgcagcctaccctgttggtcatcatcgatggtccgcttgccggcagctccgtgccgctggccgaagccgacatcacgcttggccgcgccgcctcgaacaccgtggtgctcgatgacgaattcgtgtcttcccaccatgcccgtgtctaccgtgacacgcgctccgggcagtgggccattgaagacctgaactccaccaatggcaccgtggtcaaccagcagcgcatcaaccgccccaccattctgcccgctcgtattcctgtgcgcatcggcgccaccaccttcgaactgaggtagccgcatgccaaaatccgccgcttcacaaccgctgttcctgtattccaccacggtgtccgatgtgggcaccgtgcgcgcgaacaatcaggattcctccttcgccggcgagcatctcatcgccatgtgcgacggcatgggcggtcacgccggcggcgatacggcatcctccatcgccatccggtcgctggcccacatcgagcaggatgacaccggtggcaacgtcgagacgatctcccgcatgatggaaacctccgttatggccgcgcatgacgccatcgtcggcaaggccaagcgcgaacgcaagcttgccggcatgggcaccaccgttaccgcagtggcattggtggccggctactgggtcatcgcccatatcggcgattcgcgcgcctacctgctgcgcgacggacgcctgagccgcatcacgtgcgaccacagctacgtgcagcacctcatcaacaccggtcgtatcaccccgtccgaagccaagaaccacccgcagcgcaacgtcgtgatgcgcgtgcttggcgactttgacattgacccgcgcccggatatttcggttcgccgagcccaccccgccgaccgttggctactgtgctcggacggcctgtgcggtgtgctggaagattccaccatcgaagagacgatgaccacgctgtccgatcagggcgaatgcgcgcagcgtctggtgcagatggcactgcgggcgggcagcaccgataatgtcacggccgttattgcggatgccacgttggcgttggatgccgatgcgttcgacctgccgcaccaaacgccgttggtcggcggtgccgccagccgtaatcttgagccgattgccgacatcgtcaacgagccggtggctaccgcgcccgcactgcgtgaggatgattcccccgcccagcgcgccgcagcattgattcagcccgccagcgcgcacgaggcggagaccgcgcaaaccacggccaaaccgtcgtccacacgcgtggtgcagccgtccaccgtccgcgaggagaccggtgaacgagccaatcccgataccggtgagattccggtggtgcaaaagccggatgggcgcctgtccgccgaccccaacgacccggatgtggccaaagccatccgcgatgagcaggtcgagcagaagaaggccacgcgcaccaagaagcgccgcaataagcttgcggtgattattacctgcattcttgccgtgctggcattggccggcgctggctggggcgcgtacacgtggagccagacgcactactacgtgggagatagcaacggcaccgtggccatttatcgtggcgtgccgaccaatctctttggacttgagctttcgcacgaagtgcagaccaccaatatcgccaccgcggacctgcctcagacatggcgtgaccagctgagccaaggcatcacagtcggttcgttggacgaagcgcagtcgcatgtgggtattatccgcaccgaaatgcgcaaactggccaagcagcaggaagccgacgccgccaagaaggccgaggcgtccaattccccggacagttccaaagacagctcccagagcgattccaaggacagcaccgaggattcgtccagccagtccggctcctcgtcagacaagtccggttcgtcaagctcatccgattcctcggataaatccggtatcggagcggccgacaacgcggccacgggagattctcaatgatcgttacccgtctacgtcagatttctttgttgctgattgccatggcaatcagtgcgttggcgttcatccagatgttccagcgcaccgccggcgaattccctatgcaatacgccggcatgctggcattggccgtagtgctgtttctggtgctgtgggggctgattgtgcgcttccagccgtacgccagccagtcgattctgccttgcgtgctactgctgaccgccaccggcgtgaccatgatcgctcgcattgaccagagcgaaggttgggcggttgcccaacgtcagctgatctggctgtgcatcgccatcgtgctttccgcgctgctcatcatcttcctgaaggactaccgcgtgctgcggcgcttctcctacgtgtcgatggtggtgggcttggtgctgctgctcgccccgatgctgccgtttgtcggtcaggaagtgaacggcgcgcgcatttggatcaggattccgggactgggccagttccagccgggcgagttcgccaagctgttccttgcgttcttcttcgccgcctacctgttcgaccatcgcgaccagctggccgtgggcggtaagaagatgctcggtctgcagctgccgcgtatcaaggatctcggcccgatcatcgtggtgtggatcgcctcgatgggcgtgctcatcatgcagcatgatctgggcacctcgcttatgttcttcgccatgttcgtggccatgctgtacacggccaccggccgtaaaagctggatcatcatcggtctgatcgcgttcgccgcgggtgccgtgctggccgcaggcatgttcagccacgtgggtcagcgagtcgatgcctggctgcacccgttcagcaacgagcaatacaacaagacccccggcggctcctggcagctggtcaccggcattttcggcctggcatcaggcggcatgctcggcaccggtctcggccaaggccatccttcgctcgttacgtttgcgaactccgatttcatctacgcctctctgggcgaggaactcggtctgatgggcgtcctggccattttgatgctctacctgctcatcattgcctccggctttatcaccgccatgaaaatcaaggatggcttcggcaagctgctcgcttccggactggtgttcaccatggccttccaggtgttcaccgtggtcggcggcatcacgctggtgattcctctgaccggtctgaccctgccctatatggcggccggcggctccagtctgatcgccaactatattctcgcgaccctgctcatcatcatctcgaactcggccaatgcgcccgagccggagctgacctcggatacgttccagtacgaggctttggccgtgctgcgcaacaaggaacttgaggcccgagcccgcgccactgagccgatcgttcagcctcgcagcgcgtcggctacggcgtcgcagtccgaggcggaatcgtttgacgaccccattgtggatgccaccactccggcgtatgccggcgccgatgaaccgtacacgcctaccggtacgattcccccgcttcctcccgttaacggaggcactcgcgtatgaacaaatatcttcgtcagcttttcaccgccgtggtcgcgctgttcgtgattctcggcctgtcgtccaccatcatcatggcggtacgggccaacgcgctgaacaacgatccgcgcaacgcccgttcgctgtaccaccagctcggtgcctaccgcggtgccattctggcctcggacggcacggtcatggccaaatccgaaccggtcaacgacgcgttcaaatacctgcgcacctattccaacggtccgctgtatgctccggtcaccggcttcttctccatcaaccagaccgccgatcgcggcctggaagcctcccgcagcatgctgctcaacggtgaggccgattcattgatctggcagcgggccaaggccatgctcaccggcactacgaatcagggcgcgtccatcgaaacctccatcgaccccaagctgcagcaggttgcctacgatcagctcggtacgcgcgatggtgcggcggtggccatcgaagtcaacaccggccgtatcctcgccatggtgagcacgcccagctacgatccgaacaaactggcgacccatgacgccaaagccgcgtctcagtcctacaacgaactctctgcgggccaaaatagcccgctaatcaaccgcgccacctcgcagctgtacccgccagggtccacgttcaagaccatcgtcgcctcggctgcgctggaaaccggcgattatcagacggacacgaagattcctgcaggctccagctataccttgccgggaaccgccacacagctgccgaacgacgaggcaccgggcgatggcgtcaacggacagatctccctgcaagaggccgtcgcatggtcgtccaacaccgctttcgcccagcttggcgtgaaactcggcgcgagcaaggtttcggacatggccaccaagctcgggttcggcagcaccatcaccattgacggcaccgaatccacgggcaccccgatgacggccaccgcgtccacattcccctctgatccgaccgacgacaagcttgcgctggcatccatcggccaaggcgacaccacggccacgccgttgcagatggcgatggtcgcgcaggcaatcgccaacaatggcaaactgatgcagcccacactggtcgatcgtgtgcgcgccgccgatctcaccgtactttcgcagaccaaaccgcaaaccatggccaacgcgttcagcaaggattccgccgacaagctcaccacgatgatggagagcgtggtgaccgaggccaatccgcagctggccatcgacggcatcaaggtggcggccaaaaccggtaccgcacaaatcggtaccgacaactctgccatcgacggctgggtgatcggtttcgcgccggcggacaatccgcaaatcgccgtcgcggtgttggtgcataacacagatgtatacggttcgctcgccgctggcccgatcatgcgcgcgatgatgcaggaggctttgcagcagtgaaacttatcgaaggacagcttattcaccgccgatatcgtcttgattcgcgtcttgcgcaaggcggtatgggcgaggtctggaaaggctacgatattcagctcggccgtgaagtggccatcaaggcgctgcgctcggacgtgaccaacgccgaggccaagctgcgccgcctgcgtgccgaagcccataattccgccaatctggcgcacccgaacatcgctgcgttgttcgaatactacgagcatgacggcatcggctttctgattatggaatacgtcccctcgaaatcgttggcggatctgttccatagcaagggcgcgatggatcccatcgaactgctgcccattctgattcagaccgcgcgaggcctattcgtggcccactcgcacggcgtgattcatcgtgacgtcaagccggccaacatcatggtttccgacaccggcgaagtgaagatcaccgatttcggcgtgagctactccaccggccaaggccagatcacccaggacggcatggtggtgggcaccgcacaatacatctcccccgagcaggcgcagggccagcaggccacgccgcaatcggacatctattcactgggcgtagtggcgtacgagggccttgccgggcatcgtccgttcaccggcaccactccggtcgatatcgccgcagcgcacgtgaacaatcccgtgcctccgctgccgaactcggtggacgtccagttacgcgaatttgtcatgtcgatgctggccaaggacccgttggatcgcccgaaagacgcgctggtggtgtcccgtacgctggcacgcatcgaacgccgtctgctggatcagcagaccgaaatggccgacaccaccatggccacgtccggcaatcgactgccgcgccgagtgaccagcacgccacgcattgttttggaggccccggcctcaagattgggagggaataagcaatgagcaccagtatgcccaccgcattggccggcggacgctaccagcttggccagctcatcggtcgtggcggcatggccgaggtccacgtggctcttgacacccgtctgggccgtaccgtggccgtgaaaatcatgcgcgccgatctggccaacgacgacatcttcctggcccgtttccgccgcgaagcacacgccgtggcccagatgaacaacccgaacatcgtgaacatctacgattcgggcgaagaactggtttcttccgaaagcggcgataccgagcgtttgccgtacatcgtcatggaatacgtcaagggccagaccctgcgcgacatcatcaaggtcaacggcgcactcagccagcgcgactgcgaacaggtgatgttgggcgtgcttaacgcgctcgactattcgcatcgcatgggcattatccaccgcgatatcaagcccggcaacatcatgatttccgagcagggcgcggtcaaggtcatggacttcggcatcgcccgcgctctggacgattccgcaaccaccatgacccagtcgcagggcgtggtgggcaccgcacagtacctttctcccgagcaggcgcgcggcgagaccgtcgacatgcgttccgacctgtattccgccggctgcgtgctctacgagatgcttaccgggcgcccgccgtttaccggcgattccgctgtggccatcgcctaccagcatgtctccgaagtcgccacgccgccatccgccgtggtgccggggctgccgaagatgtgggattcaatctgcgccaaggccatggccaaggaccgccagaaccgctacgccacggcctccgaattcaagaccgacatcctgacctacatgaacggcggcgtgccggtggcggccgcgttcaacccattgacggacctgtcgaatatgaaggcccgcaaggaagccgaacgtgatttgcccaccacgccggtggaaccgcagcagcagcccacccaggcattcaacccggtgaccggtcagttcgagcagattccaccggccaatggtgccaactcagcggcgttgcagtcccgtgcgcagcagcgtgcggcggcggccaaggccaagaagcgcaagaagatcatcatcggttcggcgatcgcggcgattgtcgcggtgctcgtcattgtgggcatcatgttcgccatgaacggctccggcaacaagtcctctgaagacaccgtcaccatccctgaagtgtgcaacgcttccacgtccaaggacaacatcaagctcaagcttgagagattgggcttgaagatgaccgaaaagcaagacaccgactccaccgagccggaaggcacctgcaccaagatgagcccggacgccggctccaaggtggccaggggatctgccgtgaaggtgtggttctccgcaggcccgcagtccactcaggttccggatgtcaaggagcgcagccaggaagaggcgcgcagcattctggaaagcgccgggttcaaggtgaacgccaccgtcaaaaccgaagacagcgccgacatcgccaaggatatggtgacgagaaccgatcctgccgccggtcagtcggttcccaagggcaccaccatcaccatatatgtttcttccggcatgaccaccgtaccgagcaatttggtcggtcagtcgaaggacagcgtgctacagcagtatgagggcaagttcagcttcaccgtggagcaggaaagctccgatacggtggaggccggtctgattacccgcgtaagccccgattcgggctcttccatcgcgcagggcgggtccatcaccatctgggtgtccacgggcaaggaaaaggtcgctgtgccgaatatcaccgctggcactgactacgccaccgccgaactcatgctcaaggccgtgggcctcaaggctcaggccagtggcccaaccgacagcaccgctgtggtagtcagcatcaatcctggcgctggcagccaagtagatgcgggatcgaccgtcaccattaccacgaaggccgccgccacaggcgacaacaacggcaacggcaacacaggaggcaacgctggcggcagcggtagcaccggcccaggcggcgacaagtagacggctgctacttcgtaaccttgggctgaaggccggcggacttggccacggcgttgtcttggccgcagaccttaagccagttggccagcagacggtagccgtcctgggtcatcacggattcgggatggaattgcacggcgtacatcggcttgcccttgacacgcacgccctgaataatgtggtcgccttgcgtccacgcggtaaccaccagcgtatccggcaccgaatcgggctcgacggccaacgaatggtagcgggtggcggtcatggggttggccacgccctcgaaaatctcgtcatcgatatgttccaccaagctggtcttgccatgcatgatggtgggcgcatggtccacagtgcagccgtacacctcagcgagcgcctgcaagcccaggcacacaccaaacatcggcacgccgctggccgcgcacaggcgaatcatatcctcactggcaccggattcggccggagcaccagggccgggagaaatcagcacgccatcgtaaccgtccagtacacccggcgcggctgggtcgatagcgtcgttacgcaccacatcaacagtggcgccaagggtttgcagatagcctacgatcgtgtagacgaaggaatcgtagttatccaccaccaaaatatgcgcggaatcggtcatagggctctccttgagggacgtgtactgcaagccatagtactaggatgccgtcagctcgctgccacgaagttcgacatctgctgtaggaatgggatattggcggcggcccaagggaatccccactggaacagcgccgcggcggctgcgaacagcagcagagccagcagcaaccatcgaatcggtgccacgccgggctgcagacgcaacagtccgccatagatgctggcatccggacggcgacgctcacccgcgcgaatctcgcgcagcaccggccagcgccatgccaccgcagcggcaatgaacagaaccagccacactaccagcgcgccgaataccaccttgtccagcgagccaatgcgggaagcgatcgagggggtttcggtggtggagaacatcactgcaccggacgaatcagtagtagccagctctttgggcacaccgtcggacactttggcccagtacgccaactcaccatagctgatccatcgatgggtgggggtggagtatttcggctcacaggtggtcagtgtgatcatgcgtttggtgggattggcagtggagtcttccggattgggggcgatcacatgcacgtccgtgggcagcacaatctcgtaccgggtgtagtggtagacgtaccagtaatccttggtacgaacgatgatgggatcgccttcctgcaacttgtccacatcgcccaacggctgcccgtagccgttgcggtggccggcgacggcgaagttgccgacctgccccggcatctgggtggtgtcgtaatggcccagaccgtggcgattgagctgctcgagcgtggtgccttccacgatgttgcgatgccattgggagccgaagcgcggaatgtagatctgcgcaatcaagtcgccatatttcgcgtctttcggctgtactggagcatcgccctcctgggctttggcgatggtgaccgttcccccgttgttgctggggtcgctccagtcgacggactgggtggtttcgttctgggctcgctccgcctcgacaccggtccaccacatctgccagacgatgtacagggcgcaaatcacggcagcggtaatcagcagttcggcgcagatgccgagtgcctgccagaccgggctccgctggggcgaagacgcgccgcgtactgcggcacgacgggaccttgccctactggcgttggccgggtctgccgccattcgtgcggcatcgtcctcggggaagggctgtacgtccgacacggacgcgagatcaatgggcgccggtacgccgctgttgtgcctgccgtgtctcattgctgagtctgctcctcatctgtggtctttgacgtatcgaccgtggcatatttcaactgctgcagcaaggcggcggtagcggggaactgaaggtcctcggcattctccaccttgtagccaatgccaaacgcggtcacatattgcttaagaatggtaatggcttcggagtcgttcaacgctgcgcgaagtctttgcgggtcaccaatcgcggaaatggtgaatggcggcgagtatttcttaccgtgcaacgacagcacgttgccggaacagatgaccgccgaattgaacagcacccgctgatccataatcatcagcgcatcggcaccgccggcccacaaggcattcaccaccgattcgacgtcctgctgatgaatcacgtaatcgttgatattggcggtcgtgccgttgttgttgactgcgttctcccacaacggagaatcatccagcgttaccgttacgccgctgccgctgagcgcgggcagcatcaggctggaatccacattgctggagtccttgccttggttctgcgtgctgtcggtgccatcggtgccatcggccttgagcgcgtccgtaagattggcgacctgtttggtcagatcgctgacgtcctgctgcagctggttggcctcgtccacgccttgctccaccagatcggccgtatcgttggtggcggcaaccgtacgattgaccctcacgttggtgctcagcagaaaaccggtcaaggcaatgacgacgaataccgcgacaccaccccatagggagtgccgtgcgccgtgcttacctacatgtctggccatgaatttcctgtcttcttgccgactctggtcgccgctttcgagtgtagccactattatgacttttagcctattgaatggagactatgctgatggctgacgaagagctgcacgaaaccgactcgaacaaccagaaggactggcagagcgagacctcatccagcaccgctgctgacgagaccgccaacaaagacaccgagcagaacgcagagaacgcttctgccgaggaagacgcggcttacggcgtgaatatggagcaggtgcaggccgtgctcaacgccactgccgataaggccacgctgaccccgcagatgcagcgcatgatgaaccgtcaggcggagaacaccaagcgtgttgaagaaaccattaagggcaccaagtcgaacccgcgttggttcgtgccgctgttctgcgcgtttatgatcatcggcctgatttggtgcgtggtgtactacctctccccgtccggctcctggccgattccgaacatcggcgcgtggaacctgggcatcggcttcgccctgatcatgatcggattcctgatgacgatgggatggcgctgagttccgactcgttgcgcttatctatcggtagatcgttttttctatcgttaggttgttcttagttcttatgcgaaaggccgacctcccgtatgcggaggccggcctttttcgtgccttcacctgttcatccacagctatccaccacttatccacgacttatccacgacttatccactacgttatccacagcctgtggatgaatcacacccatgtagttttccaccgaatgtggaaaaccatgtggataagtggtggataagcggcgtttctcggtgtatatctcgtgcataactttggcttggcatacatcgccacagcgagggaacagttatacacccgagttatccactgcaacaaacccagtaataccgcggcattcctaacttatccacataagttatccacagtcttatgcacttttctacacacttgtgcacaagtcaccattgtggataactcgttatcgtggataactcgtcattgcgcgcatctcattactgtggatatcttcatacggcacacacccactcaccgaacgacgatatccacatcgctaatatccacatcgccgctttccgcacatacactgatgccgggcactgcatgttccgcaatacccggcatcaatcgttttttacagccatatcaagccatatcagtgcagggagccgaaactcatccacccgtaaggattggccatattgcacaacagaatcaacgcaatgaccagcaccaccatgacccagccgtacacttgcatgcgccatttcaggcttttaccgcgccacgccggcacaccacccaccagcagccatgtgagtatcccacccactacaaagccgccgacatgcgcctgccacgccacgccaccgaccacaaacggcaaggcgaagttcaccgccatccagatcaacatggagcggatatcggcgccgatacggcgatataccaccagcaatgatgcaaacaggccaaataaggctccagaagccccataggctgccatctgccagccgatgcctcccggagccaccgcagcccacaccataagtcccagagagccgccaaggccggaaatcacatacagtcccaagaaccgccagtggccgatcattcgttccagcactgggcccacggaatacagggcgatcatgttgaacaggatatgcaatagcgagttcggcgcatgcaggaacatcgaggtgatgagcgtccacggctcagccaccagtctgaccggagccgccatgccgaggtacatcaaccaagccctcaggcccggggcaataaatcccagcaatacctccagtagccacactgccacgcacgcaccaatcagcgcccaggtcatcaccggaccaccgcgctcccactggtatcgaatctcccgttgtgtaggaatatgcatgcaatccactgtatcgaaggtctcggatgcgtttcacgcgccgcgaagatgctgagccggtcgagggcagacgggcgtggatgaatcgcccacgaatgtcattccacccaatcgtcacaaacagcggcctagaatagggagcagagtcggtctgaatgggcataccgaccagacgatccctagggaaaggagccgtcatggagaacaagtcttctaacggttggaagttcttcgcgctgctgttcggcggattgctcgccgcgcttgttggcttgtacatctacaagcagcagaacccagattacgatccgtgggaggagccgtgggagaacagctcctcgccggtcgacctgggtctgaacaaggccgaagatgaggccgatggcgaggcggaagccgccccggccgaagcctgatagggcggtctttcaacgcaagaagccccgcaaccgatggatgtcggttgcggggcttcttatgttctggttcccctctccgaggggagccgccccaccgactcagtcagccagaggagcagtgtgccagatgtgcggagccgttaagcgggaagcccggcgggcttcccgtaggcgacgccgagcggcgacagccgcgaggtagaaaccagcacgtagccggcgcgctgctccggcggccgtcaggccagaggagcagtgtgccagatatgcggagccgttaagtgggaagcccggcgggcttcccgtaggcgacgccgagcggcgacagccgcgaggcagaaaccagcacgtagccggcgcgctgctccggcggccgtcaggccagaggagcagtgtgccagatacgttccaaatagtcttccatggagcggtcggagctgaagtagccggagttggccacgttgagcagggccttgcggttccattcgagctcatcggcgtagagggcctcgatctcggactggatgtccatgtaggcggagaagtcggccagggtcatgaaccagtccttggtcagccagtcggccacgagcggggagtaggcgttgcggtcgccgttggagaaggtgccgtcggccaccagatcgatggcctgcttcaggcgcggatcggcctcgtagtaggaggcgggattgtagccctcggcgtacttcttctcgacctcgtcgacggtcatgccgaacaggaagaagttctcggcgccgacgcgctcacggatctcgacgttcgcgccgtccagcgtacccacggtcagggcgccgttcagagcgaacttcatgttgccggtaccggaagcttccttgccggcctgggagatctgctcgtcaagctcggtggccgggatgaggttctgagccatctcgacgttgtagttcggcagcatgtggacggcgagcttgcccttgacggccggatcgctgctgatcacgcgggaaacgttgttgatcagctcgatggtcatcttggccaggtagtagcccggagcggccttggcaccgaagaacacggtgcgcggagtgatgtcctcggccttgaccttgccggacttgatgtcggcgtagttggagatcacggcgagaatcttcagagactggcgcttgtactcgtgcagacgcttgaccatggtgttgaacagggtgttctcgtcgatatcgatgccgtagtggtccttggcgaagcccacgaatgcgtgcttgttggccttcttgacggcggcgaacttcttgacgaactcatcgtccttggccagcggctcgaggcccttgagcagttccagatcggcgacccacttgtcggtgcccaggccctcggtgatgaggtcggacaggcgcgggttggcgagcttgacgaagcgacgcggggtcacgccgttggtcacgttggtgaacttgtccgggtagacgtcggagaagttcttcagggtaacgtccttgagcagctgggagtgcagctcggccacgccgttgacgtgggagccaccgtaggtggccaggtaagccatgcgcacggcgtcgccggtgtagatggccatgtccttgatggtgtcggcggcaacgcccttggccttgagctcggcctcgaactgcgcgttgatcttctcgatgatctcaaggtgacgcggcagcagctcgccgatcaggctggccggccagacctcaagggcctccggcagcagggtgtggcaggtgtagttgaaggtcttggtggtgatggaccacgcggtatcccagtcgtagccgtactcatcgatgaggatgcgcatgagctcggggatgccgatcaccggatgggtgtcgttgagctggaagacgatcttgtccgggaaggtcgtcaggtccggtttgtcctggcccgggtagaagacgcggatggcgtcgtgcagggatgcggagacgaa

SEQ ID NO: 653 - DNA, 49499 bp, Unknown
  R14_15m  MAG No. k141_12296
cgacaccgaacagtgaaccaatgtctcccaatcgggcggcggcaagcaacgcgtcaatcagggcgtgcgcggccacatcgccatcggaatcgccttcgataccctcgtatttggcggcatcggcctcgctgcatgaatcaggcaccggccagtagagcccggcaatccacagttcacggcctgaaccggcaggcgcaaaacggtgagcgtcaaaaccttgccctatcagcactcctgcagaccccatgcagttcccttcgatggcattgcccagatgaacggcagcaaacgattatgaatcacgaagccccggcgcatcgcataaggacacgaccggggcctcaaaacaatcaaatcacttcttcttggacttcttctcggcttcgacacgagccaaagtatcggccgcggcctcttcgggctcggcggtgtgatgcttgtcgtcaccgggttgagcgggctcgtagcccaggttcacgtcgagcagacgctgggcttccgcctcgtcgatcttctcggacaaggcgatctcagaagtcagaatggcgcgggccttggtgagcatacgcttctcgcctgcggacaggccgtgctcgtcgacatcgcgctgggcgagatcgcgaaccacttcggcgatcttgttgacgtcaccggtggcgatcttttcgacgttcagcttgtaacggcgagaccagttcatctctttctcgatgatcggggtccgcaggatgccgaacaccttggccacttcggatgcggagacgatgtcacgcacgccgaccttcctggcattgtccacgggaacgttgatgaccaaaccatcggaagagagtacggacagctgcagatattcgcgcgtcactcccttgaccgtccgctcggtaatggcctccaccttcgctgcaccatgacgcggatagacgaccatatcgccgactttgtaagacatgtaccctccgagaactgacggcttacacacaaaaactcgaataattatgccatgcggcctggaccgcccctatgagagcgctcacaaccacgaagacacaccgaaaagggcaagaattcgccattttcgacgcgccaatgtagcgttttcgactccaacgcacgtagactttgggtcatggctaaagaaacgaagatcaaggaagataccgtcaccgtgcctgtcgcccaaggcgacctcgatgcggtgagcaatgctgaattctacaacccccacggagttctcggcgggcatctcggcatcggcaagcatgccgacaccgccacaatccgtgtgctgcgtccgcttgccaagtccgtgaccatcctcacccaggatggcgaatacccgatgacccacgaatacaacggcgtgttcgtgactaccgtgccggcttccggcaccaagaagcagcccacgattcccgactaccgcgtcaggaccgagtgggaaagcggcgcagtgctcattgaggacgacccataccgttatatgcccacagtcggcgacatggacacctatctgttcggcgagggccgtcacgagaagctctgggaggcgcttggcgcgcatgtgctgcgctatgacgatccgatgggcggcgtggacggcacgcccggcgagcaggtggtaggcaccgcgttctccgtgtgggccccgaacgcccatgccgtgcgcgtggtcggtaacttcaacgcctgggatggccgtcgtcatgccatgcgcgagctcggctcctccggcgtgtgggagatcttcatccccggcatcggcgcgggcgagacctacaagttccagatcctgaacgccaattacacgtgggagatgaaggctgacccgatggagcgtcagcacgaggttccgccgaacaccgcctccatcgtcaccgaatccacctacgagtggaacgatgacgcctggatgcagcaccgccgcaccaccaacccgcatgatggcccggtctccatctatgaggtgcacgccggcagctggaagcagggactgacctaccgcgacctggccaagcagctcgtggactatgtcaagcaggaaggcttcacccacgtggagttcatgccactggcacagcacccgttctccggctcctggggctatcaggtcaccggctactatgcggtggattcccgcctcggctcccccgacgacttccgttacctggtcgatcagttccatcaggccggcatcggcgtgatcatggactgggtgcccgcccacttcccgaaggatgccttcgcactcggccgcttcgacggcaccccgctgtacgaggacccggacccgctgcgcggcgaacaccccgaatggggcacctatgtgttcaacttcggacgccgcgaagtacgcaacttcctggtggccaacgccctgttctggctcgaggacctgcatgtcgatgcgctgcgcgtggatgccgtcagctccatgctctacctcgactacagccgcgaacccggccattggcgtccgaacatctacggcggacgcgaaaacctggaggccatcgacttcctcaaggaagccaccgccaccgcgtacaagaacaaccccggcgtcatgatgatcgccgaggagtccaccgcatggccgggcatcaccgcccccacctccgccggcggcatcggcttcggtatgaagtggaacatgggatggatgcacgacaccctcgagtatctgcacgaggagcccatcaaccgcaagtggcaccacaacgaaatcaccttctccatggtgtacgcctactccgaacactacgtattgcccatcagccacgacgaagtcgtgtacggcaagggctccctgtacggcaagatgccgggcgatggctggcagaagctagccggcgtgcgttcgatgttcgcctatcagtgggctcacccgggcaagaagctctccttcatgggcaacgagctggcccagtggggcgagtgggatcacgacgcctccatcgattgggattgcctgaactggcaggagcaccgtcaggtccagaccatggtcgccgacctcaacgccttctacaaggcgcatccggcactatggagccaggacttcgatccggccggcttccagtggctgaccagcgacgatgccgaccacaacacgctgagcttcctgcgcatcggcaccaagggcgagaccttggccgtggtggtcaacttctccggtgaagcctggcccgattaccaggtggcgctgcccaccggcggcaagtggaccgaagtgttcaccaccgatgacgccaagtacggcggctccgacatccacaacggcaccttcgaagcggtcgagggcgaatatcattcgcgtccgttctcggcgaagatcaccgttccggctctgggagttgtattcttgaagccggaagactgaactggtcaacaggctgaaaggtaaccggtttatttatgctcaataccacagcgcgtcagaatacgacaccgcgcacggtgctggtggtcgaggacgagcccacactcgctacggccatcgcccagcgcatcaccgctgaaggatggaccgctcgcgtggccggggacggcgcttccgccgtccaggccgcgtcccagctacgccccgatctggtaatcatggacatcatgctgccggtcatggatggtcttgaggccaccaaacgcatcgtcgccgaacgtccggtgccggtgctgatcctcaccgcacgtgatgacgaggccgacaaggtcatcggtctgggagcgggcgccgatgattacatgaccaaaccgttctccatgcgcgagctcatcgcccgctgcaaggcgctgctgcgccgcgtggagcgtgcgaaggtcatcgccaagaattcggagaacgagaagctgctcgacttcggttcgatggtcatagacccggcccagcgcatcgtcaccgtgaacggcgagcaggtgcatctgacccccaccgagttcgatctgctggccacgctggcccgccgcccgaagtcggtgctcacccgcgaaaagctgctcgaagaggtctgggactgggtcgacgcatccggcacccgcaccgtcgacagccacgtcaaggcgctacgccataagctcggcgccgataccatccgcaccgtgcacggcgtaggctacgctttcgagccgccgaccgcgtgatggcatccaaaaaacaacagcaatcccggcttgatgcgatgaaacctcgcgtcaagccggttgatttgttctcctctctgaagctggaactcagcgtactgatcgttatcgccactgccatcgcgtttgccatgtgctggttcctcctgaaattcggctggtccggttggatcgccatgccgctgactttggtggtggccttgggcatcacctatttcttctcccgcggcatcaccgctcccttacgccagatgcgcgatgtggccgaagccatggcggatggcgattacacggtccgtgtggatatcgatcaggatcgtcatgacgaggtcggccagctggctcgctcgttcaacgagatggccggcgaactcgaacatgccgataaaatgcgccgcgatatgatcgccaatgtgagccatgagctacgtacgcccgtttccgctttgcaagcgatggtcgagaacatggccgacggcgtcaccgagcccactcccgccaatctggagagcatcctcacccaaacgcagcgtctctccgacctcatcgccttcctgttggatttgagccgtatggaggccggtgcggcgagtctgaatatcgagaagttcaacttcgccgactttcttgacgagaccatcgagccgttggaaatcgccgatggcggccacgcccacgacatccatgtcaccgtgccggccgacatctcgatggaaggtgatcaggaccgcctgcgccagctgttcaccaacatcatcgccaacgcgctgaagcattcggccgacggcaccaccgtgctggtcgatgcccatgaggatgacagccaaggcaccatcgtgaccaatgtggtgaatttcggctcccagattgcaccgtccgaccgttcggatatcttccggcgctttgtcaaaggcaagacgggtcccggcaccgagtcgggcggcaccggccttggcctgtccatcgcacgttgggcggcccaattgcacggcggcaccgtcaaagtggtcgatgacacgcgaggcgccgatttcgaaatcatcctgcctaaatatcacgtcgccgaacgctgatattgtccgccgtcctaccgtatactgtattcgaacagatgttcgaatacagggtgggaggcaccgcatgacacagcaatccgagtcacgaaccatgccgcgcgacaccacgctgtttgtcatgcagatggccggcgattccatgatcaatgcgggtattcataacggcgatctgctgattgtcgatcgttcgttggcaccagtccccggagatgtggttgcggctgtcatggacgatgaaatcgccatcaaacggctggtttcacgggccggcatcaccatattgcacgccgagaatcctcgatatcccgattacatgccgagcaacggcgcttcgcctgctatctggggcatcgtcaccgatgtcattcacccgttgatatcgtcatcggaccgtcgcgccacggcatccgccaataccagcacgcccaccactttagtaccggcctgctgaaatgtctgaacgcattgccgcacggtggcacctgtggtgacgatgtcatcaatgagaagcaccgcgtcgccatggcctatgagatcacgcttcaccctgacatgaccggtgatacggcgggcacgctgtgccgaagaggtctgctgcacggagcgtgccttggtggaggagctcagggcattgcatggtcgcgcatcgacgccgtacccacgcaatgcccctgccaccgatttggccaacggtgccgtatgggcacgccctcttcggcgcattgatgcccgcgatgacggcactggaaccaccaatacgcgatgacccaagcatgatgatggtattggcgtcttgttcagcagcgacaccatgatgcggccgaacgggccgtcaagctcggtatcgtcgtggtccttccagtcgagaatggcacgacgcgccgctccctggtaaatcgatgcggaccatatacgggctccgccaccaccgtctgtatcccgctcccggcattgtgcgaacaaggcccgacatgccgcacacaatacctcatccggcgcgtcacacccagcgcagccgcgtggaaacagcagattgcaggcctgtgcccacatcgcatgccaccacttgtatacgctcggcccgtccataacgcgtcaccatcaagctggagtatcgaatcgcgcaagcagtgcatccagcagttgtaccgtgtcttgcggattctccacacgaacaccgatcgcaccggcctcaaccgcaggatagtcattacccgtaggcgtcatgcgatcgcccacgaacaccatttcatcggcccgtatgccaagtgtctgcgtcagcttgcgcacggcataggccttatcgatgccgcattcgctgacatccacactggtgtagccgccggccctgacccgcatgtgcggcagatcggccttgaccgcttcgaccagcgcctgtttcttcgtgttatcgcgatcccatgcctgtttggccgctacgggtgcgaactgtcccagagcggagaaggtgatctggctgcccctgttctcgattcgaggcccccatacctgctgttcccacaatcccagttcccgggcatgtcgctcaagactttccgagacagcggccacggtggcttcggacagatcatgcgcatacaccaaggcccattgcgtgccatcccaccggtaataccgggagccggaggcaggcatgacatgcagattgccgcgcctggcattcggggtgagtacatccagcacctgtgaggtgaccaccgccatgccgccccctgagatcagggccaccaccgtatggtcgagcagcgcacagaaccgttcgatcatcgcgggcctcatcggctgttttgagctggccagcgtgttgtccaaatcgaaaccgaacaccttggcgttggagcagacattatcgaaatcaagttcggaccacgaacataccaccatttgtcgcgcctccctcgttgacgaatgttcacagccaatgaaccaatcctaacgcatgttgcctccgccatgtcctatggtgggaaccatgcttcagccaccttggaacgcacgaatctaccgcaaccgccacggtcgcggcacacgaaccccgatgttcggcacccgtctgccccgttaccgcactcgcaccggcatgttcgacgatatggtggcggcccaggttcgcaggctcggccaagcgtggccggaactgatacgtccgctccagttcgcggtggaggatgtgccaccttcggatccgacgccttggcagaccgagccgaatatgacgtcccagtgcttccccgccagccacggcattcccgcacgagtcgtgctctaccgtatgccgttgcagaccgaggcacctaccaagctcgaattgcagttggccgtcagggatgagctggtggcccgcatagcggaattgtatgggcgcaggcccgaggaaatcgaccccgattggggcctgtgacagtattgcgggggccgtgccacttcaagtaagacagtggcacggcccccgcagctatatcggcgccgaaacatcatcagaccgatgcttcggcgagcgcgctctacttgacgatggaggaatcgttccgagcccagacatggaccgtggcgggcatcagcgttgaagcgtcgatggcggacaatccggcgatgtccttgtcttgcaacgaatcgtgactgaaacgcgctccccagctcactttcttggatgagtcctccaacatcagcacgaccgcggtgccatgatcgccggaaagtttgccggtctcaatcgtttgcgccgcgttcgcatccagcgtgatttcctcggaggtcaccgaagcaccggcatcatcgtaggcgtgcaaggtgaccgtcctgcgcgcattggacgtattggccagcgtgatggaggcctttactccgtcgggaagggccaaccccgagaattcggatggctcgccggcattgaccaatgcgaaatcggcttggccggagtcaccggagcgtgtggccttgacggagaacgacacggcatcctctgcggtggacatcacgcccaacgccccatcaggagcctctcccaagtcgatcgccgtcaccttatcggcagtgacggtggcatctttggcgggaaccaatcctttgtcggtaatccatgacagcccggtgctggtgtctgccttggcgaacagataagcggtgaccgcatcgccggcagtgatggacggcgccaccgacgcattggaggcggtcggcagcggcagcgcgaaatcagaacccttcggtgtcagaccatccatggtcaccgtacgtaccacggacgcgataggagtctccttgctggaaacggtcacgaacagaccatgctgcccatcgaccgcggcggacagttccatcgaggactccccctcagctggcacagacagcgtggattgtgtggacaatgccattttcccggctgtctcggaaccccagacggcaatgtcgacggtggtcggcttggtggagggattcgagacgatgagctgctgtgtggtaccggtcgtgccgccggagagcaggaacgactggctgagcgaggtcgatacgcaggatgccgccgatacgcctctcacatcgccgtcatcggcccatgatgcgatggtgccgacggtgccggtgccggatgcggcctgcagcatacgggtattgatcaggcgagctccctgatcaatcttctgagcaccggttttcaccgaggaatcgtcggtcggatcggcgtctttcaaagtcacgtcatctgaactggacttttgcccgatcgccgagacagtggcgctgtagacggagccgaacgccgcatagcgcgcctgcgtactcagattgccgacagtggcctggaaggcgctgtcgccgtacgtgccggtatcggccaatcctacaggtgccgggcagtaggtttcggactgggtcggactaactgtctggtcgatggcattatcggaagcggccaccttgtccacccagatattggggatgggggccatgacgagaacgacgaacagcgcaatcaacaccagcatggtgatcacaccgagcacgatgccgatcgcacgtttgaaaccagaagttgtgttgctcatgcctgctcctccaatccgtaggacggtcgtctgcgaggcatggcgaccaagcagtacaacgccgtgatcacacctaggcatatcagccaggcgtgcctccagacactatgctgtgcacgttgctgccatgaggtatccacctgctgtgaggtgctgctacgcagcgtcagacgatagtagctgccgctatccgtggagaccagggactgggtgccgttcgatgcggcgatattcgcgctcaactgttcatacggcatgtcgttcgaggaatcgccggtctcgggaaccacgtagatgccgccgaatccaagcgcgctgatggccgcgatggcctcttcgtcgggattggacagcagcgaggcacaggcctgggccagttgttcgtcaaccgcatcatgcttgccggacaacaggcgcgcccgctggaccggggaactgtcgatcagatcgccgcgcggggtgcgcatcaccgcatagttgacgatgttgcgggtctccgcgctcacggcaagcacacgatgatcggcactggcctccagataatcggtggtgaccatgggcaggccgttttcggacacgcccagtcccgcatccttatgacgttcgatgccatacatgcattggatgccaatgcagcacaccagtatcagagcaagcaccacacggccagacacgatgagcacatgcagacggtcccttttcggtgcgggatcgctgccggacgcatgcaacggttggaatcgcttcaccgccccaccggcgacgagacacacgcaggcaaggaagcccaatatcatcatcgcgatgccaggctgcgcggaaccggccacgacaccatcggcatccacggctatggccacacggctggaaatcagggcgagcgcgcctccacaaacgattaccacccacatcagccgcgaggtccgcaacgcgaacggcagcaccagcgaagcaagagcgagcagcgtgatgacgccgaacagcacagtgaccgccaaatcggcataatcggtcgatcccattcgccatcccagcgcacgctgtacggcctcaagcaggctcagcgacgccggcgacccgttggcggatgacgttggcactgtgatgtcgccgaacagttgacgccacatgcccaaatcggcgtaacgcaccgcattgacgagcgtaggggccaccgcaaaggcggcaggaaccggaataagcaacagcatggcgcgcttgcggcgcacgaacagcaggaacatcaggaacacgacgatcagcgcgaacagcagctgcggttcggcggccaccacagggatgaagcacagtgcggcgatggccgcggcctgaacggatgtgcgcggcttgagcgggtcttcggtatggtacatgcccacggcacggaacacgaatgcgaacgcggccggcaggaacaccattacggtgagcatcggcatattggcctgcgcataccagccgaacataatgccggtggatgcccacaacagtcctcccagcacacgaaccacgtccgagcgggtgaatacgcccgccagcgcccagaacgacaatgcgctcagcggcgcggccacaaacagtatcatcgccagagcggcggtcacatggccgagcgtgaccagcgaggccagcatcagcaccagcagccacggcgtgggcggcgcaggaatgccggtgccgctgccaaacacccatggcgtggtggtggactgcaccagttgagtgaagctggcaccggtggaaagcaacacatcggaatacaacgatccaccggagaatatcgaacggaacaccggccaatacatcaccacgatggccgcaaagcacaccagcgccatcaccacggctgcgctccagcgatatatggtgcgtgtccgcagatgggcacgttccagcggactgagcagcactctgccctgctgggattggaatgcatcccgacgatcatggaactgcttgatctgccgactgtcggcgaacaaaacctgcagggacgatgcggcgaccttcgactgtctggccaccagcctgcgcgatttcatgtttcccgcgatatcggccaaagccaaccatggcaggcacaattgcacccatgcttcatacggcttcttgccgaacatcatggctatggccatgccaaaactgcgaatcagcctccacagccagacgataatccaggacgacatggccaggtcagtgtacagatagcgctgttgggagcgatgcaccgtcatcgcatgattgaccgtgtgatcttccttaagcggctccccgcctcgcgtacgaatgccctcataccgtgcgcgacgatgtgatatctccgcttgcgggactaccaccacgcgtccgccgctcaggcagacacggcggcagaaatcgaccgattcgctgtaggtggtcagccaggcattgatgccccgcagtcgcgtgaattgcgacatggacaccagcgcgcccgccagcgacaccgcgaacacatcctgtcgcccgtcatactgctcctgatcgggttctccatcgaccaccagggaatgcacggcgtgtcggcctgcatacataccgacatcatgcaggtgggatccttcccaatcacactgtttgcacccgagcacgctggcccccggcgtattgcgccacgcctcaagcaatcgttcaaggcatgaggcatccgaggggcgggaatcatcatggagcaaccacaatgcgcggggagcgtcatccaaatcggcccgatccaacgcccggctgaccgcatcgccgaaggaacgcgcgcccttggccgaaacgatgtgaatggtcacatgcttggactgcggcacctccactaccggccccgatggcgagggaatgacctcgaacgaagtggttatcctcgaaccggcgcgcccggtcgcgtcggcgatgatgacgactcccggaagaacattctgcgtcaataccgaacgcaatgtagaccggaggaaacgcatatcttcctcaacggtgatcacagccgtaatgccggtatccacatcctgcctatgcgtatacggtcgagaagacatggcgtcggccaacgcctcatgaatatcgctattacctgtcggactcataaactcccagtgtacgcaccagacttgaagggggtgtgtgtggaactacgcctgctcccggtgctctcgcttatatcgacggcgttcgcgctcgctcatgccgccccaaataccgaatcgctcatcatggtcgatggcccatttcaggcattgttcacgcacttcgcatttggcgcacacacgcttggcatcacgggtcgagcctcccttttccgggaagaacgcctccggatcggtttgcgcgcacaacgccttgtgctgccaagatacatcgccatcaggtcggaatagtccccacaattcatgccatggctcttcggctgaatcgtcgaccacaccccacatgcgattctccttgcctattgagcttttcatacggactaaattacacacatgcaatttcgtttttgtcaaattctttctcgtgtcattacatcatttttatggaactgtgtgctatggcgcggacacgatgccctgatgccgttgcacatgatattgtgccgttcctgcgcaggaacaccatagcgcaggaacacccggcggatgctgtgtcaaagtgtcattcagacaatcgacagtttcaggaggggttatgacgcaggaatcaggtggggcggatccgcatatcaacccgccaagcttcattcctgcgggaaatcgacgcacccgaccttccgggcaggtgccacgctccttcgcccctgcccgcgcctcacgtcagtcaggtcaggctccatcggcccgtccgtccgtcacgggaaatgacatcgaagagcctcaaccgaacgccaacgccacggcaagcgccaacgtcacggacaacggcaggcggactccgcccagtttttctccgaaaaccggacgtgccacccgcagcacggctccggatgccgccgcaccgcgcagcattccgccgtcgcgagcgcggatgtcttccggctcatcccgcaacgccgtgcgcaatccgtcggatatgtcggtttcccggccctcatcgccagcagcaaacgtgtccacgaagttcagccatcttggccggccggcggcggcaacggcgaaaacggtaacggcacaccggccgcgcgccttgcgcatcatcttatgcgcgattgcggtactggtggcggcgttgattctttctgttttcggtgcctggcaatgggtggacagcaaactgaaccggagcgactggctgaccgacacccccaacacgccggcctcgacctggctgattcttggctccgacgagcgagacggttccaccgattacggcggcgtggacaatatctcaggcttcagaaccgatacgattctggtgctgatcaagcctaaaagcgggccgagttcgctgatttccattccccgcgattcgcttatgaacgtcgatgaccagtacatgaaaatcaatgcggtggcgcagattgccggcaagaaagccttggtaagcaacgtcgagcagattaccggccagaaaatcgaccatgtggcgcagatcaagttcggcggtctgcagaacgtggtgaacgccttgggcggtatcgaactgtgctatgacgaggatgttcaggattcctattccggactgaactggaaggcgggatgccatacgacggatggttccactgcattgtccttctctcgtatgcgatacgccgacgcgcgaggagacttcggacgcaacgaacgccagcggcaggtcatctcggccatcgtcaaaaaggcttccagcagtgggaccctgaccaatccgtccaaagtcgtggcagtgtccaatgccgcgatgagcgcactcaccgtggatgaaaaaaccaacccttacacgttgctcaccatggcgttggcgttcaaaagcgccaccggctcgaatggcatctccggcagcgtgtactggtccgaccctgattattacgttgatggcgttggctcctcggtgctgcttgacgacgccaagaacaccgaactgttcaatcaacttgccgacggcacgcataaggccggcaccgtgggcaatctggcggaaggctgaccgacgctttcccggagcccatcggcttcatcgtcggcgcatgatcgccaccattgcctacaccgccaatcatgcacgggcaaaatgtcatgtggataactcggcaagctagaaccacataccttgattcgacttgcgctttcggcatgcgttcccccacgctggaagcatggcatcacagcagaacgattcgaagcgacattccgcccatacggcatccgccgtatcccgggcgaagcaccgtttgggcgcgccgccattgcgcgcccgcctgaccatgcttgccgcggcgtgcccgatgatcgcgcaggcactgatgatggtcatactgctgttgcacgggcaatggctgttcgccgccatgatcgcaccgggcatattcgcctgtctcgtgtccctgctgctggcgctccccccacctccgggcccggagaagacccccgccccgcaacaggcaacgatcgatatcggtatcacggacgatgccgatgcccgcgccgcagacctccgtcatgcgccgtcgcagccgatagaatcgctgctgcacttcgcacgcctgccatggcgcaccattgtgggccattggcttgaaccccttgaccttgcggtgccgatcggcatgaccggaagcgagccgctgaggctcgatctgaaccgtcaggggccgcatgctctggtggccggcaccactggttccggcaaatccgtgttgctgcaaagctggtgtctggcgctcgcttcgatgaacgggcctgagcatctgaatttcgtgtttttggatttcaaaggcggttccgcgttccgcaaactcgaacggttgccgcataccgtgggcagcgtatgcgatctggatctggcgcatgccgtacgcgcgttgcgtgcgctggaagccgaactgacacgccgtgaacagctgtccgccgctgtccatgcttccgatatccgtgatatggtcaatccgccaccgcgcctgatcgtggtcattgacgaattccatgccctgaaggaccagctcccggattatgtgaatcgtctggtgcgtattgcctcgctcggcaggtcactgggcatgtatctgatcgcctgtacgcagaatccgatgggtcaggtcagtgccgatatgaaggcgaatatgtccgtcagcatttgtttacgggttcgggaccgtctgcaatcatgcgagctgcttggtgatggtcgtgccgccgacctcagtccggcaatgcccggtgcggcgttctgcaacgattccgaacaggtgacggcattccgctgtgcaacggcgcgcgatatcgatgcggtatgccgccagatcgcgttcgcatcgcggttcgtcgggagcccgccgcagccgtccctgtttaccgcgccacttccccggcacgtaaaagaccggactgtggccaatcacgcaccgcaacgcattcgatttggacttgccgacgatggcatcaacctgcgagaagcgacggtatccctcaccggtggcaatatcggtgtcatcggcccgcaggggcgcggcaaaaccacgttgctgaaaacattggctcgacacgccagcatggctgatggcttggcggtacgtgtcagttccccgcatcgccgggtatgggaatcgcaatggcttcgcaacggccgctgcacgccgtatgccagctcggatgcaccaccgcctccgcatatcgtgtggttcgtcgacgacgccgatgagttgttcgacccattccgcaccgacgagcaggcgctgtctttcacacatgcgttggccgatgagtccgtcagcgtggtattcgccgtcagcacgattcgcccgatacgtataccagagcattgcaataccagaatcgtgttcccgtgcggggaacgaacgtctgaccttatggccggagtccccgctcgcctattggatacgatgagtcatatcgatgccgacaacgcgggccgggccgtgctcatcgagggcacatcggcatgtctggtgcagtgcgcttcgtgaaaacttcggttttttctcggcgaaacctcttgaaaatcaccacggttcgtggttaccttggtactggacttaaggaacaacaccagccacggggcttttaagggaggcaagcaatgagcagcgcttttgattggcgagccaaggccgcatgtcgtgacaaggatccggaactcttcttcccggtgggcaacaccggtgcagcctatcagcagattgaggaggccaaggccgtgtgccgcacctgcaaggtgattgatgcatgcctgaagtgcgctctggacaccaatcaggattacggcgtgtggggcggcttgagcgaagatgagcgtcgtgcgctgaagcgccgcgccatgcgcgcccgccgttctcaggccatgcagatgcaaatctgatgttttgattatcgcttcgtcatactaggaaaccctcccacttgggagggtttccttatttttgggcttcgcatcactcatcctgagcggccctgagcttcatatcaagcaccacgcgggtgccgccttcgcggcgcggctcccaatgcacggaaccaccgaaatcattggtcacaaaggtgttgatgatctgcgtgcccaaaccagaaccggaagaacgagccaatcctccctgttcttcggagccgagaccggaaccgtcatcctcgaccaccacattgaggttcgggccggagcggcccacggaaatcgtgatatggccatccttgcggccttcgaacccatgctccaccgaattggtgatgagctcggtcagcacgagggacagcggcgtggcatcctgagcgggcatcatgccgaacttgcccatgtagttgatatcgatgtgctggtctttcatcgtggctaggtccacggccatgcgcagcaggttggcaatcaccttgtcgaagtcgacgacctcgtcggcggtctggctcaatccctcatgcaccatggcaatggtctgcacgcggcgttgcgcctcctgcaattccttcttgacctcatccgacttggtcttacgagcctgaagcctcagcaatgcggagacggcctgcaggttgttcttgacacgatggtgaatctcggaaatcgtagcgtccttggtctgcagctcctgctcacgacggcgcagctcggtgacgtcacggcatagcagaatcgctccgatacgaccgttgttgtcatataagggcagcgagcgtatcgagacggcggaacggttggcgttgagttcggagtcgaccgcggctttgcccgccagcaccaacggcagggtttccggaacggggtcgttctccttcaacagctgtgtgccgagttcgctgaggtaatggccaggcatggtggtcagcaggccgagacgcctaaagcagctgatggcgttcggggctgcgtatcgaaccacgccgtccatggtcaggatgatgaagccgtccgccacgcgagcgatatggcgctggctcatcaccgaatccttgtaggggaactggcctcgcggaatcatctcgtacagctgtttgcccgcgttaatgctttccgactcatatcgaccgttggattctcgtgtggccatattggtctcacgcacgaccaagcccaaggtcttgccattgtgccgaaccggcgcgtacacgttgcagacggtcgccttgcccacggttctcaataccgtggagcggaacaccacgctggagagcatggcggcgtccaattcgccgaccatgtcatccggcatgacgtttcccaccacgtcttccgcccgtagcgtcatcacggtggatgggcggcattgttcggccaccacgtatttgccgtcaccgtcctgtaccagcagcagcaggtcggcaaagctcagatcggcgatcacctgccaatcggcaacgagatgatgcagccactcgcggtcctcgtcgtcgaagtcggggcgcgttgcaaggatgtgtgaaaaatcagccatgcccctatcatacgcagacacgtcgccgccattgcggcaagccacacgggcaagtatgacgactattacgacatcgcatcttcaataccgcaccaatcgcgttgcacggctgcccgccgttcaggcggtcatcgcctcatacacctgagaggacaatgcggcgatctgctgctgcgcggttcccgagaccactcccgaggtcataaccaccatcacataatcccgttctgttccgtccgcggccttgccccacaccacggcggcatcattttccacgccggccagttcaccggttttattggccacctgaatgccagacggtactccggcgggtattttggcgcgtcgcgtctgcccgagcaatacgtcaagcatggagcggctggcttcggcggaaaccagtttgcctcggtacaatgcagcgaggaatctgccgcaatcggaagccgacgtccagttctcggtgccggtcccgtctgtgccggcatcggacaacacccgcaactgcttggatgagctgaagccgtatcgggcggccgtaccagtcacccgttgcatgcctgtggccatgtcgccatcgccgaccatcaataccagctgattggtggcagcgttcgagctgacggtgatcatctggttgatcagcgaggtggtatcttgcccgcccgcggccaaggtgccggcatgttgcttatcgtacacggcaagcatcacgtacagtttgatatccgaagccgccaccatgggctggccgccgacgctcacggttttgcccgtggccagatcctcgacatacaccgaccaggtgcctccattgccggccacagctgccgtgaccgccgaggacacatctgacatccgcttctcttccgccaccgtggtcaggtcgggagcaggtgccgccttgcgctccaaggtgtcatgcacagggcgttgttcgtgtttcgatgacgccgttgacgacgatgccgacgctgttgccggtgagtccgatgccgaggcgacgggcgatgttttggcgtgcgatgcgccgagaccgttatgcgcgtacatccatccaccgacgccgattaccaaagcggcgatcagggcggcgatcaggatcaatcccacgacgctgcctgttgcacgcgtgtcgctactatgcttggtatgccgagccaccgtcactgccccaatgtcttgtcaacactggccagcacccggctcatcaggtccgcggccaccgactgcccctgatattgggtgacaacggccacggcggccttatgaccattggcttcgacgatggcgaagtaattccaggtgtcctggatgccttggcctcggtgggcatgcacgatcatgtcggacggaatggttacgccttcggaagcaatgtccacgttcatcaatgacgcgcctcccttggcgtccactgcggcgagcatgcgggccgcatcgcgggaggaaccgtaattctcataaccggcattgctggccgccacatcgccgaaatcgcggttgaacgaggtgcccttatacccatgcgaagatgcccacgaattgacgccgctccagccacctaccgccgcggccgccatattgccggcattgttgtccatggaacccatcatcgcgtttgcctgcgctttggcgttgtcatcgccattgtcctgggccgcaagatagaccggcagatagagaccggcagccacgaattgcttgccggactgcgacgtggtcgcgatggtggcgtcctctgaggaatcggcgtatgttccatcgatgaccatggcggagacggccacatcggaggacgagtatgaatccgcgatgtcagacaactggctggatgtgatcaccggagtggaaggcttcgacttctccgtcgagcttttcttggacgaatcgtcgctgttcttgtctttggcgctatcagacgtgttcttcttggccttggacttggcgtcagaggaatccgtcgtgccatcatcggcggaatccgacgcatcggacccggtcgactgtaccgatgtttgcgcctgcggctgagctccccacaatcccatgctatgggtgacgaacaagccgatgaccaacgccacgacgcaaatcagcgcgatgagcacaatcaccaccgctttggtgtgatcgccgccaggacgcccggcgggaggttcaggagaagcaggtgccgcagggccagcggtcatgggtcccggtgccataggccccggcaccgcggaacccggcgccgttggcgtcgcgacggcgggcaacggcgccgccggctgcttcaccagcgtcagcgcgttatcgtcataggcaggggccgccggattggcctcgggctgctccaatgggcttccgcactgcgaacagaaggcatttccttgctcgttggcaaacccacactccgtgcaatacaccatcaccgaaccccttattgctgtgacgttctcatcttcggattccatagtatcgccaccattgggtgatagtgttcgtgtgagtcggtattgacaagcataaaagttacgctaacgtaggttacggcagcgtaagaagcgtatcgtcaactcgtgaaacgggggcatcaccatggcatcaacaaccgacgacgcggaaaagacgatgcatcacgacgctcataacagcgcgacgattgcagaggatgccaccatcgcatccaagcgtcaggcggctatcgaggcgcgcgaacaggcgttgcaggccaaggctgatgccgtacgggccaaggcccagttcaaggccgaggccattcgagccaaagccgaggagaaggcccggcacaagctcgccaaagcggagcaccgtgcgctgaaaatcgagggcattgcccctgcggaagtggaacgcaagattcgtctcgacgtgcacggacgaccaaagccgttgatgcgcggctggattcacgcgattgccgctcccctgtcattggcggcaggcatcgtgcttatatgcctggcacatggcgcgagtctgaagtgggcgtgtgccgtgttcatgacagcgtcgctgattctgttcaccaattcggcctgctaccatctgggcgattggagcccgcgcgtcaccgatgtgctgcggcgtatcgatcatgtcaacatcttcctgctcattgctggcacgtataccccggtttcgtttgcgctggaaccgttctggcgcaatgtgatcatcatatcgatgtgggcgtgcacggccatcgccatcgtgattcatgtgatctggatcaatgcaccacgctggctgtatacggtggtgtacatcatcttcggcatctacggcctggcttatatggtgatgttctggaattcgccgtatgcggggccagccgtggtggtgctgctgtgcgccggcggtgcctgctacatcctcggcgccatcgtctacgccttgcgcaagcccgacccttggcctcgcgtcttcggcttccatgagattttccactgcggaacggtggccggatatgcctgccatatggtggccatctacatggtgatcgtctcgctgtggcaataaacgctacgacatataagtatgcccccgcctacgggggcatactagtcacttataactcaggccagcggcttggcggccttgaccgtcacggacagctcgcggccgttcggtgcggtgtaggaaacgacgtcgcccaccttggcaccttcgatggccttgccaatcggggaatccggggtcatgatgtcgtagtcggtgccggccacgatgtcacggctgccgagcacgtaggtcatctcgttgccgttgagctcgatggtcaccacagagccctcgcccacggtgccttccggggcattctcgatgatcttggaatcgcgcagcttgacggtgagctcggtgatgcggccctcgttcttgctctgcgcctcacgggcggcctggtagccgccgttctcggacaagtcgccctcggcacgcgccacggcgatcttgtgcgcgatttcctcacgcagctcgccttcacgatgggcgagctcttccttcatcttgttgtatgcttcctgcgtcagcaggtagaccttgtcctcagccatatcgtcctcctgaaccgttgtcgatgctgaaacaattttcgttatttatgacaaaacgccggctatgaccccggcgttcgtcatgtgctgacctatggtcagcgggtggaaatgatgtcgatgacgaacaccagcgtgtcctcgccgccgatgccggcctgcgggatgccgcgggaaccgtagccgtattccggcggaatggaaaccaccaaacgcgagcccacgttatggcccggcacggtctggtcccagcccttgatgacctgtcccacgccgatgccgaagctggcgggctgatgacggtcgaagctggagtcgaatggggtatccttaccccacaccacgccgtggtagttcacggtgacggtgtcgccgcgacgcacgatcgggccgtcgccctcggtcagctccacaaccttgaggcccttcggggcttcgggcgccgggaactcgataacgggcgtggtgccgaattcggcgttcacctgaggcatctgatctgccattagtcctccttcaaagacacaatgcgccctaccttagcaccatcggcgaatcggcggtagtccttcatccctgtgcgatacgacacgctggccgtatacgtcgattccggtcatcatgctggtgaataccagacatgtcaatcagcattcgacgacattgacggcaagcccgcccttggaggtctccttgtatttggccatcatgtcttcaccggtctgcttcatggtttcgatggcctgatcgagggtcacgatgtgtgagccgtcgccgagcatggccatacgcacggcgttgatggcggtgttggcggccatggcgttgcgttcgatgcatggaatctgcaccagtccgcccaccggatcgcaagtcaggcccaagttgtgttcgatgccgatctcagcagcattctccacctgttctggcgtgccgcccatgactgcggcaagtccggccgccgccatcgaacaggccgagccgacttcgccctggcaaccgacttccgcaccggaaattgaggcgttgcgtttgaacaggtatccgatggcaccggcggtcagcagaaacgtgaccacgccctgttcattggcgttgtccacgaaatgccagtaatagtgaagcacggcgggaatgatgccggcggaaccgttggtcggagcggttacgatgcgcccgcctccggcattctcctcagagacggccaaggcgaagagatccacccatgcggcgtcggaagactcgagcacggcgtctttgcgccggctgtcgcggcgcagcacatcggaattcgaagcgagacgccgatacatcttcggcgcgcggcggggtacgtcaaggccaccgggcaatgtgggctccgccgaggtgcatccgtggtccacgcaggcgcgcataacacgccagatggcatcaatatcggatcggacctggatgcctgagcgtgaagcggtttcgttggcccatacaagttcggcgatgctgagatgatgttcccggcacaacgacaccagttcggcgcatgatgagaacgggtagggtgcctcgacgccgaaatcagtggatgatgattcgtccgcgtcggcaaaggaggtgccttccggaggacgttcatgaatgccgatcatcgggtcttcgggagcgcctttgcgcacgaatccgccgccgatggaataccagacctgttcgtcgaccaagcttgcggcggcgtcgaaagcctggaatcgcatgccattggggtgcgcggccatgcgcttccattgttcgaacaccacgtcgcggtcgtagtcgaaatggatgcgtttgaggccggcgaggttcagagtatcgtccaacgcgcaggtctcgcggatgcgcatcatgtggtcggtatccacggtggccggcagattgccttcgagcccggccatcgcagcacgatcggtgccgtggccgagaccggtcagcgccagagaaccgtaaagcgtgattttgacacgtgcggtgcgatcgaccaaatggtcggccagcaacgaggaggcaaaggcatgtgccgcgaccatcgggcctacggtgtgcgaggatgaaggtccgacgccgatggtgaacatgtcaagcacactgaacatttggctccttctcccctgctggttcggcatgccggtgtcaccaggcgtcatgccatcacgatatcgtattccagcctagcgcccggaatctttcgctttgcgcgatgatggccgcgcgcgtcgtgccggcgagcgataagtcagtcagtgagatagtgcggagaacatcataaccagtacgatgataccgatgatggccaatacgatctgcaccaccatcagcccgatggtcagtcccttcttggtggcgattttgggcgcgtacgcctgtgccaacaggaaggcgatgaagccgaacaccgcgtagttgacggtcagggccatcacatcgctgttcgacaacaccacgccgttcagcggctggttcagcgtgttcatcatcgtgctcatcacgaacatgccccacacgccgtagccgattaatccgacgacgccgtacagccatggcttgagtttgtcgttggcacgcagggtcagggcttcggcacaccacaacagggcgaagccgacgatgtaggtgaacgccacggcgatcagtatcacgatagtcgcccacggcaggagtgcggccacattgccgatcatggacagatagaatcccgagcaggcgatggcaccaacggtgagtgcagtgcccgcaatgacggcttgggcaagcatggtgggcagggcgccttgttcgactcgttcgacatcggtccagcgtgaagccatgtggattcctcgtttcatcaggtacatcgtcacaacgccacatagcctaacggccttttgtttcggccttataagctctccacatagtaagctgcgagcccctctgacgaggggagctgtcggcgaagccgactgggggagagaccgcggcacagccgcaaaaaacggcatcgaccacaggccgatttcaaggtgcctccggtgggactcgaacccacaagccgaagcgatcgattttaagtcgactgcgtataccatttcgccacggaggccaacttttctattataagctatctcctgccctgagcattgcttgcgggttgctgcgcttcgtgcagccgtcgcggcatagccgctcccttcgcctacaaacagcccagtgggctgtttgtagcagccggtagcgatagcgtcgccggcgtcgcatataacgcaaacagcccaccgggctgtttgcttaacggctcagcccgctggaggcacttaccacttatgctattgagccagcaaccggcgaccataatcgagcacaatgccgtccagcagcccgtgttcgctggcgacgaacgaatcgatggcttcaccatgatcggccttggcggcttcgctgacacgcgccagcacacggctccagaccacagcgccgccgccgaccacatcgatacggccggggtggatggtcttgtattcgcggcgctcggcgcgcgtcatcctaaggaacttgtcgtccacggcataggcgtcttcaaggctcaaccgatgcccgtcgaccacggtgtgatcgtattctttcaatcccatagccaaggcggtcatcgtggtcaccgtgccggacacaccgatgatggtacgggccttgcctgcgtccacggtgcggaaggcctcatcgatatgctcgtcgatgtccgcaacggcctcatcgatctgcgcctgggtcggcggatcgttggtcagatgacgttcggtcatgcgcacggaaccgatgttcatggagaatgcgccctgaacctgggtggtgggcgcactgacgccgtcgccaccgatgaccaactcggtggacccgccgccgagatcaaccaccagatagggggcgggcaggtcatcgcgattgaccacggaagtggcgccgaggaagctcaggtcggcttcttcagtgccgggaatgacttcggggcgcacgccgaggatacgttcgatctcatcctcgaactcctcacggttttccgagtcacgagtggcggaggtggcaacgaaacgcaggccgtcgatgggatgctcggcaatcacaccggcgaattcccgagcagccgcataggcgcgttccaacgcttcgtcggcaaaacgatgggtcttgtccacatcctgaccaaggcggatcacacgcaggatgcgcggcaccacctcatgcatgccatcggcatcgacacgtgcgattttcagtcgaatggagttcgtgccgcaatcaatgccggcgacggttacggattccttgctcattgccttctcctcgtatcccttagtgcgtatgaatggactgttcgcggtggctcatctgttgatcaatcatccagcgtgcagcggcagacggtcggatcgaactcgtctttgacgcgttccagcaccaaatcgccaatggggttgacgcccggccccataaccaaggactgggccagcagggcatgcaggcacttgacgcgcaccggcatgccaccggccgaagtgccttcaatatgctcctcactgtcgccaagacggcctgccagttcgtgacggaatgccagatacagattatgggcctgctcatatgcggccttgagctcctcatcagcggccagcatatcgttgtattgctgcatcacgccggcggcctcgacatgggaggcggccttgacggcttccggaccggtcagatagcacgtggtggggaaagggattccgccgggcaacaccggacgggtgattacggcaagtggcctaccgcagacgcatcgcgcccccacggcgaccatgccgcgcgggtatcggccgagctgacgctgcacctggtcgatgtcatggtcgttggcgggctcggcaagcatggtgtcgacaagggccttggccttggcggcgatatcgatggtcactgttgggttccctcccctgtgttttgctgggtgttctgatcggattgggtgttctggtctgacttatcggactgcttggatgagtcgttggatgacgagtcagaggaaccggaagtatcggatttgccggactcgctatcggtcacaggctcatcggcctttttgagcgagtaagacagttcgctgtaccatggcaggacttttttgttgctggtattggaatcttccgttttctgggattcgcgatcggagccggtcacggcttcgggatgcagcacacgcacggcctgttcgccggggaatacgaagccgaggcgttcacgggcctgggcggtgatgtaggccttgtcatcccaacgcttgatatcgttctccaactcctgcttttgggcgatcagcgaggcttcctcacgcttgaggccattgagctcggccaggttcagggtataagtgtggaaggtggagaccagctggatggtgccgagtgcgatgatgaacagggagacgaagaacgctatgggccccgccgacccttttttcctgacttgtgctttgccggttttgccaggtttgccggtacgggacgacttgctcatgtcacatgaaaatacccgccgcattcgacttgacgaacacgacgggtatcgagcttcagtggaaactcacgcctttacgggcgtttcagctcacttggccaagtacttcttgcaggccttgaaggcgctgtagccggcgtactgagcggtggagccgagctcctcctcgatctcgagcaggcggttgtacttggcaacgcgctcgccacgggccggggcaccggtcttgatctggcgggtgttcttagcaacagccaggtcggagatggtggtgtccggggtctcgccggagcggtgggaaaccatggaggtgtagccgttggcggtggccagctcgatggcgtcgagggtctcggtgacggaaccgatctggttcagcttgaccagcagggagttggcggcgccgaggtcgatggccttctgcagacgagccgggttggtgaccagcaggtcgtcgccgacgaactgcagacgatcgccgaggcgagcggtgatggcagcccagtcttcccagccttcctcattgaacgggtcctcgatggagacgatcgggtactcgttgatgaggttctcgtagtagtcgagcatgtaggcggagtcgcgctcttcaccgtcgaagcggtacttgccggtctccttgttgtagaactcggaggaggcgacatccaggcagatgccgatctgcttgccaggctcgtagccggcggcggagatggcgtccatgatgtacttgagggagtcctcgttggacttcatcttcggggcgaagccaccctcgtcgccgaggccggtgttcaggccttccttcttcagaacgttcttcagggtgtggtaaacctcaacgccagcgcgcagagcctcggagtaggtgtcgaagccgtacggggagatcatgtactcctgaatgtcggtggcgaagtcagcgtgagcgccaccgttcatgatgttcatgttcgggaccggcaggatgtggccgttggtgccgccgatgtagcggtacagcggcaggccggcggactcggcggaagcgtacagagcagccagggagacacccaggatggcgttggcgcccagcttgcccttgttcggggtgccgtcgagctcgatcatcaggtcgtccagagcgcgctggtcagcagcgtccatgccgatgaccttcggagcgatgacctcgttcacggccttgaccgcgttaagaacgcccttgccgccgtagacggacttgtcgccatcgcgacgctcccaagcctcagcttcaccggtggaggcgccggacggaaccagacccttgccctgagcgccgtcttcggtctccaggtagacctcaacggtcgggttgccacgggaatccagaatctgacgcgcgtacacgctttcaattactgccacaactactccttaaaacggttgtgtatcttgaatgacattcttaagagtagtgcgatttgtggacgttgtgaacaacacgcccaaaatttagtgttagcgctcacaatgccgatgcgccgcctgattgcaaggcagtacggacgaaatcgctcagtcgacgtccttgccattgaggtagtcgatttcactgtcggacaatttcagttcgctggctttgaacgagtcctgaatctcctgcgggtttctggccgagggaatcgtgaacagatattggtattgcgcaagttcccacgcgagcgtgacgcgctggtaggagcagtcgtgggacttcgcgacttcgcggaaccggtcgaacagatgctcgttgaacgggtcaaggaatccaccgagcggcgaccagcagacgaaagccaaaccgagtttttcgcaggtctccaacgtgtgttcggggtcgcggtgaaccggggagaactggttctggacggccacgagacgatcgcccaaaatgttgtgggcggcttcgatgtccgcgttgtcgattctggagataccgaccgctttggccacaccttcgtccacgagctgcttgagtgcgcccatctggtcttcgtacgacacctgcggatcattgcagtgcgagtagagcagatcgagcgtatcgacaccgaggcggcgggctgattccttggcattggcgatcatggtttcgggtcgggcgtcggcctgccagccgtagttgccgttgccgtcaagcgtgcgcagccagccggttttggtggctacgagcacctgatctttggggccatgccacgagtgcagagcatcgcggaccagatattcgccatagcccatatcctccggttcgccggtgccgggtgcgctgggcagataataggaccaagccgtgtccaaataacggactccggcatcgagcgcggcatggatggtctcgatcgcctgatcacggttggaggggcgcccctcgatggcgagcgccattgtgcccatgccgaggcggggaatctcatagccggcaagtgttgccgcgtgttggtttttcatcgttgtggcctccatgccaagtcatcgaggagttggttagtccagaggactacctggtcggagctcatggggccttggcccagggaaccggtgaacggggtgggtacgatgagctggtgggtgaccgggcggtattgggcgcctttgtaaatacggcccatacgcatctggatggattcgggcgggtcgatacggccgatgcgcacgcggttggattgcgcgagaatctccgaaatgccgagcttgcgggccttgaacttcagacgggccacgtcgaacagggtctcgaattcgaccggcggcttgccgtaacggtcggtaagctcctcttccagatccttcaaatcggcctcgttgcgagcggaggcgagcttgcggtacgcttccagacgcagcttgtccgaatcgatgtactcgatcggaatcgacgcttcgatgggcaggtcgatggacacggccaccggctcgacgttctcttcgggctccttgtacttctccacggcttcggacaccatgcgtacgtacaggtcgaagcccacgccctcgatatggccggactgctcgtcgcccagaaggttaccggtgccgcgcaattccaagtccttcatggccacatcgaaaccggagccgagcgccgtgttctgcgcgatggtggcgagccggtcatgggactgctcggtcatcggcttggacgggtcgtacaggaagtaagcgtacgcgcgctcgcggccgcgaccgacgcggccacgcagctgatggagctggctcaagccgaaacggtcggcatggtcgacgatcagcgtgttcgcattggagatatcgagaccggtctcgatgatcgtggtgcacacgagcacgtcgatgtcgcgatgccagaagtcgcggatgatctggtcgagctgcttctcccccatcttgccgtgggcgatgccgacgtgcgcctcgggcaccagcgtgtggatcttgtcggcgatggacgcgatgtcctgcacacgattgtggacatagaacacctggcctcctcgcagcagttcgcggcgtaccgccgcggtgacctgcgcatcctcgtaggcgcccacataggtcagcaccggcaaccggtcttcgggcggggtggccagcgtggacatctcgcgaatgccggtcacggccatctccagcgtacgcgggataggcgtggcagacagggacagcacgtccacgttggtgcgcagggctttcagcgtctccttgtgttccacgccgaaacgctgctcctcatcgatgatgacgagtcccagatccttgaacttgattttcgggttcagcagcttgtgcgtgccgatgaccacgtccaccgtgccggtttccagaccctcgatggtctcgttgatctctttggtggtctggaatcggctcatggccgccacattgaccgggaaaccctcgaatcgttcgctgaacgtctcgtaatgctgctggacaagcagcgtggtgggcacgagcacggccacctgcttgccgtcctgcacggccttgaaggcggcacgcagtgcgatttcggttttgccgaagcccacgtcgccgcagatgaggcggtccatcggcacgggcttctccatgtcggatttgacctcgtcgatggtggtgagctggtcggcggtttcctgataggggaaggcatcttccagttccttctgccatggggtgtccgggctgaaggcgaagcccctggcgcgctggcgggcggagtacagcttgatcaggtcgtcggcgatctcgtggacgtgtttgcgggccttggccttggtggccgcccagtcggagccgccgagcttgttgagcttgggggcttcggcaccgatgtatttgctgacctggtcgagctggtcggtggggatgaacagtttgtccgccggggcgccgcgcttggaaggcgcatattcgatgaccaggtattcgcgagtggttttgttggcgccggtgccgatggtgcgctggcgcatttcgatgaaccggccaatgccgtgctgctcgtgcaccacgtaatcgccttttttgagttccaccaagtcgatggccttgcgccggcgtttcggcgttttggccacggccacggccgaagtgcggccggtcaggtcgcgttcggtgagcagggcgattttggcggctttgtccacgaagccgtcgatggcctgagagcggatgacgtcgaaattggcgatgccggtagtgttgatcgcgcgcctgagcctggccaaggtgccggccgcagcggcggtgatggtgacgtggaagccggcgtcgagcaggccttcgatgccttgggaggccttggcctcatcccctcggaattcggccgggttctgggcgtcgagctgcacatggccggtcagcgtggtgtccacgccgaaactggtgaggcgaatcaccggatgttcggagtattcgagggagctgatggtttccgcatagtcgaggaagctggctttgtcgaagctgatgggcgcgccggcgccgtggccggaagcggccacatgccagctggcggccaggaactcgttcgcggtttttgccaagtcttcggcggaacggcgcagtttctccgggtcgctcaggaggatcacggcgtgcttgggcagcatggagcccaccggttccagatggtccacgagcgcgggcatcagggattccatgccttcgaccggaatggcgttggcgatggattcgagcatgtcctcagcattgggaatcgaaccgaccaaggctttggcgcgggcgcgcacggcgtcggtcagctgcagttcacggcatgcggtggcccagatggtcttgaggccgtcgccgtaggtacgctggtcggaggcgtggaattccttgatggtgtcaatttcgtcgccgaagaattcgatacgcaccgggtgcggtgcggtgggcgggaacacgtcgaggatgcctccgcgcaccgcgaactcgccacggtccatgaccaggtccacgcgcgtgtaggcgttttcgatcagacgtttggcggcttcgtcgaggggcaggtcctcccccacggtgaacacgagcggctcgacgtcgcccagtccttggacgaccggctggatgagcgagcggatcggcatgacgagaatgcgaatcgggccgaacatcggatcggtatcgctcggatgcttgagtctgcggaacacggccatgcggctggccacggtgtccgcgcgcgggctcagacgctcgtgcggcagggtttcccaggcttcgagctgggcgatgtcgtccgggtcgccgtcataccaggagcgcagcgagcccacggtctcttcggcttcgcggccggaggccacgaccagcacgaccggcttgccgggtttgccggtcacaccctgcccgatggcggcggccaaagccgggcgcaagccttcggaaacaccggccagaacggaattgtcgatgtcgtccgaaacctcgatgtcaccagtggcgagtctaaggaaggtcttgtcctgttccagctcagacaggatgcctaccagtgagccgttgatcaggtccgggtgcgtcgcctcaccggccattgaacttctcctgggtcttggcaagaccgcggaagatgatgtcctcggcggcgtcggcgccgtcagccaggaattcgggcagctgcttgcgctggtccggaccgaatccgcccagcacccagttcaccgtgttgtcatgcgcgttcgcaccgcgcttggagtgaccgacgcccatgcgcacacgcgcgtatttcggcgtgccgagggaacggtcaatcgacttgatgccgttgtggccccctgcggagccgcctgccttgaccttgatacgaccgaattccaagtccatgtcatcgtgaatcaccacgatatggtcgggctcgatctggtaataggcgctaatggaagccaccgcattgccggaatcattcatataagtcagcggcttggccagaaagaacttgacggtgcggccgtccaggttcatcacgcttttaccgagcatggccagacctttgtggtcggcgaagttcaccgtccaacgttcggcgagcacgtcggcggtcatgaagcccatgttgtgccgcgtgtcctcatattttttgccggggttgcccagtcccgcaatcagccagaaatccgatgccataatccactcctcgtccgtcttcctatattcccgtatgcacgttctgtacgttccgtacgtcatgcgcgcgttcgcctcgcgcactggcccatgcccggccggattcaaccgtcaagattgtactcaacgccgccgtcaagccttggaatcggcaagcagcagggcacggcattgctcggcatccatcgatcggaccgatgaatggtgaaacgcttcgacgtcacgagtcacgatgacgtcggcgtcattgtcctcggcaacggcacggatgagcccgtcctcgaagtcgggctcatcggaccggtacgacatacacgcatggcgttccataagtggacggatgtcgaacaattccatcagtccaccgatatcgtctcgcgccgcccgctcctcgccataatgcttgcgcaacacgcaatacacgtcattcaatgacgataccggcgccatgatctcaatgtttggctgtgcaacggcttccatgagcaaatcaacacattgtttatggaaaggcgctcgtttgtcattgcacaaatcgagcagaatattcgtgtcaaacagcagtttcatcccgtcccccaaatcgttccatacgtgcctgcgcgagaatctcctcatccgaaagatcgccttccgcctccggcaaattccggtcggcgaaacgttgaatcaactcctgctttttcctacgctcccgctcctgaatcagggagagcgtcagacgctcgaattccggcagtttccccgtatccgcaaggtagtcggtcagatcacgaatcaggtccgaataggtgcgcccattacgcttaagcactttctccgcgtcgcgcttccgttcggcattgacgcgcgccgtcaccatggccatagtcatatcgcacctccttgtaataccagtattacaagagatggggacgagtgaatcgcgtctattaggcggtgccgccagcgaccttttcgcgctgtttgccgttgaggcaccagtaggccagcgccacgaacagggccgccgaggatattgccgagcgtggctgcggacaggttatagaggatgcccgacacgtcgagcgccgcgacgcccgccgcgtcggcgccgaaaccaaacgttttggcgaccaggcccatcggcaggaagaacatgttggccacgcagtgttcgaagcccatcgccacgaatccggcgatcggcagcaggatgcccagcaccttgtcggatacggagcgcgcggcgaatccgatgcgcacggccaggcagacgagcacgttgcacaggatgccgcacacgaacagcgtgtcccagcttggcgtcactttaacatcaactccggttggaaaaaaatctcagtatgtagcattcggttctcaaataggagaaacatgcagcggcaatcaacaacttgtcgtttacgacgccaagcaagggaaacagctcagacagatgacgcttccctgcaatcggatgacatattgcgggacggcagcggattttgggcgttcttggcgtggcatcccgcaagcgttatcgcacgttatttgcaccgaatcataagaatggcagaattccaatgatttcgcaggaagagttgcgggacgcgagctatgtgcatcgtttgacgtgtgtggcatcccacgtgattgcgggatgccacgtcaaaacggacgaaaatcgcgtgccgtcccgcagtttgccgttatctgggataagcgcgtccgatatatggcgttcgaggaaaagagctgatccgatacaactttttagtgttataggacaccggaatccatggagagcaagggtaaaccgcctcgggcctacaggtccaaataccagtaggacatgtcccgcatggtgccggtggagtcggtggcagcggcgggcatgaggccgaattgggtgaagccgaagcggcgcatgagggcaatggagccgacgttatcggcgaaaatgatgccacaggccttgcgcatgtggcgggcccgcgcctcggtgagcagcctgtcaagcatgaacgtgcccactcccctgccttgccatgccggatcgatgtaataggccaaatcggtgacgccgtcatacccggcacgatcgtagaacacggagagcgcaccgaagccgatgattgaaccgtcttccgattccacaacaaaaacgccgtagggcggcgtatgggattcgacccaggcgcggcgttggtcgagggtgcgcggggtgaggtcggcggtggccccacccgccaccaccgcagcgttgtagatgtcggtgatggcttggatgtcggattcgacggccggatggaaggtgtatggcatgaagttcctttgaatacgcaaatagcccgtccttatgataaggacgggctatgtcagttgaggtaaccgactcccttcagtcgccttcggcgatagctcccctcaccctgagggaagccaagttacttgtcgagctcgatggccttgttgagggcgtcttcaagctcctgctgcgccttgccgtaggcggtccagtcgccgttcttcatggcggactggctgtccttcatggcttgggcggcatcgttcaacgcctgctggagttcggggctgcggtcggaagacgagccggaatccgactttccgtccgtggtgccggactgaccaccattggtatcggaaccagattggtcaccggacacgttctcggcatcgcccgcggccgcaccggaattgccaccgaacacctgatccaaggcctcatccaacgtatccgcgaatccaacctgatcaccgaatgcgaccagcgtcttcttgagcaacgggaatgaggtcacgcccgaagacttgacgtacacgggctgcacgtacaccagtccgccaccgagcggcagggtgagcaggttgccgcgcaccacttgcgtgtcgccggattgcagcaggttcagttccttggatacatcggcgttggcgttgaagttgttctgcgcctggccggggcccggtacgttcgaatccttgggcagctcctgcaatcggatggtgccgtagttcgagcctatcttgcccttctcattgccggcatccgagtcgaccgacaggaagccggtcaggatctcacgggtggactggccagccggaatgtaggtggaggtcagcgagaacaccggttcctcggtgccaccggtctgcaaggtcaggtagtacggcggctgcaggatgtcctggtcctgctgggactgggattcggtcggatcgaccggcgtctgccagaagtcttcgcctgagtagtactggctggcagaggtcacgtggtacttggagagcagctcgcgctgtaccttgaacaggctttccgggtagcgcatgtggctcatcaggtcgccggagatatcggagagctggtggtactggccagggaagatcttctcccatgccttgatcaccggatcggattgatcccacacgtacaggtccacggaaccgtcgtaggcgtccacggtggccttgaccgagttgcggatgtagttggccttctgagagcccagggacgagaccgttgcggaagagacggtggtggaatccttggtggcggagccgaggtcggttatttgcgagtacgggtaggcgtcggaggtggtgtagccgtcgacgatccacttgacgcggccatcgaccacggccggatacacgcggccgtcaagcgtcaggtacggtgccaccttggccacgcgctccttgggggaacgatcgtagagaatctgcgattcgctggtcacacggtcggagaagagaatctgatcggagccgaagcggatcgcgtagagaatcctggagaacaggttgccgaccgaagggccgccgtcgcccttgaacgtggtcagagcaccttccgaaccggtcgggtagtcgaactcccaagcctgcgtgccttcaggggcaccgacaatcgagtattcggtggtgttcggcgagaagtagatgcgaggctcgtacttttcggattcggtgagcttgccctgggtggggatgccggattcgaagaattcgggctggccgtcggcggtcaccttgttgccgtaggcggccaccacgccgtaaccgtgggtgtacacggtgtggtcattgacccagttgcggttgtcattgccggccagatcgagctcgcgggcggcaatcacggtgtcctgggagacgccgtcaatctcgtacttgtcgaccgccagggtgtcggcgaaggtgtagtactgcttggactgctgcaactgtttgaacgtggggctgacgacctgcgggtcgagcagacggatctgcgcggtggtgtcggcctccttggccagagcgccctgctcacccttgtcggtcaccttgtattgctcggtcttgagcttgtcaagaccgtaggcggcgcgggtggcgtcgatgttgcgctggatgtaggtggattccatctcctgtgcgttcgggttgacgcggaagcgttgcaacagcaccggccatgccacggtgagcacaagacccaccacgaccacgacggcaatggaggtcaccggcacacgccaggccttgagcgcggcggaagcgcgcacgccgatggacgcctggccttcgagcgtgtgggagcgcatgagccagatgcccagcaccacgccgaggatggcggtcagcacggccatgatgaaggtgacggggatgttggcatgtacggcggtgtaggaggcaccggtgatgcgtgaaccctgcacggtgagctggtcgaagacgccaatcatctggcgcactgcccaagcgaacatgttgagcatcagccagatgccaagctggcgacggcaacgcttggtaatggagaacaggccgcgtccgttaaccggcatggtaatgcggataccgcccatcagcacatgcgtgaccacggaaaacacaaggcccacgcccagcagcatggccacggcggcgagcacgagcttcaggcccggcagcacgaacacgtagaagccgttgtccagaccgaactgcggatcggtggtgccgaacgactgcgcgttgaacatgagcagaatctcgctccagttcgcgttaaactgggaaccgaagatgacgccgacgatcagcgaaatcaccacggccacgcggcgagcggttttcgagctgacggatttgccgacctcgaccacatcgccgttaatgcgaatggtggaaccgtcggccgaatcagggcgtgctcgaatggccagccaggcggaaacgaagccggtcagggccatgagcagcgcgtaggccacccacagaccgattttcaccccgagctgggtccagaccacggactggaagccgagctggccgtaccacatcagatcggtgatgaatcgggacaggccgaagaacagaccgacgatgatggccaaggccagcaccacgccgatcagaatcttgctgccacggctggctcctgagccaccggacgctggcttacgggtgatacgcggattggccggaccacgtggagggcgggatgacccggaggggccagcgttggtgttgtgggccggaccgtccccatcggcctcgacatcgaggatgatcggatcgtcattgttcgcattgttgcgtcgtgaatcgccgccattgccgaacagtactgagaaaggatcgttaaaagacataactcaagcctatcgaaagggcgggaggtcggttatgccctgagcacagaatgaggcaacatcctgttctacgctctgttctacgcttgccggtatggacagacaacggccacaacatatgcgtccctcagcacacgccacacgccaacttcggcacaggagcattccaatcgtggcggcaatatgtgctttggcggtggtgttggccggtgtggcagtctacggatggcatgtcggatggttcgccaaatccacatcaaacggcaacaccaccactccccagacctcccagacgagtgcgttaccgcgcaccgacgttccttccccgaagaagaacgacgatccggcggcacaagcccaacgtgcggtatccgccatgacgcttgaggaacgtgtgggacagttagtgatggtgccgttgttcgccggttccgaaccctcctcgttggcttcaacaatcgccgacgagcacattggctcggccattctcattggcaattggaataccggcgtcgatacggtcaagaccgcgaccgcgcaactccaaggatatgcgccggccggcaatcgtctcatcatcgccaccgatcaggagggtggtcaggtacagcatctgactggtaccggtttcgacacaatgcccagtgccgttgagcagggcacaatgtccgctgacgcattgcgtcaatcggcaggcacgtggggttcgcaattagccactgctggcataaatgtcgatttggcaccggtgcttggcacagtggttggcaatcgtgcctcaaatgctccgattggcgcgctggatcgtgatttcggattggatgcggccggcaacgccgaacatggcatcgccgttattgaaggtttgcgagacgctcaagtcggtgcggcggtcaaacattatcctgggttgggcgcggtaagcggcaataccgacttcaccaccgaaggcattctggatacgaccaccacgttggacggggccgaggcaggtgcctttgaccaggcgattaccaaggccgatcctgcaatggtgatgatgtcgttagccacgtatcaatccatcgacccgaataatccggcggtgttttcttctacgattatcgacggtcatattcgcaacgtcctgaagtacacgggcgtggtgatttcggattcgatgtctgccgaagcgttgagcagctacgatgtaagccaattgggagtaaatcttgtcgaggcgggcggcgacatgccctgcatcggtcagacggattatgtaaagccaattgtggacggcctcaacgaacgggcgaagtccgatccggctttcgcttcgaaggtgacggcggcggcgactcgcgtaatgacattgaaaatcaagatgggactgacctgaccgttcatccttgcactggcgaggattgatgcgcgctgattcgcgctaatcctcaccagccctcgtacaaatgcacactagtcctcgtacgaatcgtcagtcctcgtacgaatacagaccatgcttgccgatgtattgcaccacgccgtcgggcaccagataccagaccggctcgtcgtgttcggcgcggcggcgtacatcggtcgaggagatggccaaggccgggatctcaagcgtatcgaccttgccttcgggcaaggtcacgccgtccgggctggagtagccggggcgcgtgacggccacgaagtgagcgaggtcccacatgaggtcggcgtccttccactgcatgatttcggccacggcgtctgcgccggtgatgaagaacagctcggcgtcgggatgttgggcgcggatatcgcgcagagtgtcgatggtgtaggtgacgcccggacggtcgatgtcgacacgcgagacggtgaatttggggttggatgcggtggcgatcacagtcatcagataccgatcctcggcgttggtgacgtgcttgtccagcttgaacacaggtcggccggtgggcacgaaaatcacctcatcgaggtcatacacccaggcgacttcagaggcggcgaccaagtggccgttgtggatcgggtcgaacgtgccgcccatgatgccgacgcgcaggcgtgtatgccagttgccgcgtgcggaaagcctgcctttgccgtggctgctggccccggccggtacggacaggtcggacatgcgccgttcggtttcgccttgggtgacggcaatgatttcggcgggctcggcggattccaccgttttttcggactgaactgacgcagccgttttgtggctgccggtaacaccactcatgcctggccgccctcgccggcggcgtcatcggctgattcggtttcctcttcgatttcgccggcggagggattgtcttccttgggatcgatcttgcccatgtcttcatcccattcgtcttggaccacgcgacgaatctcggcgaaggtgggcagcgggaagtccggctggtagaggcggcggacctcggccacgcgctcggtgatgcggatgagcgtgtcggtcatgccgtcgaggtcgccgtcgtgctccatctggctgtatttgccgatgtagccttccatgagttccatgtgttcgcgcacgatcttgagctgggcatcgttgaggtccacgacttcgggtgaatcggtctcgggccagccgatgagcacggcgtccgcgtattcgagcgacgcacgctgggcggcggaggcgatgccgtcctcaatctgcacgaggaacacatagcggacgatgctgagccgttcggccgcgatcttcaggccgagcttgggatcgttgaggtcgatgtcgggccgcagttcacttgccttgtttgccgtgtcagccgtagtgttcatgttgccgtcctcgttcatgcgcgcacctggcctgttccgtaaccgatccacttggtggtggtcatctcccgcaatcccatgggaccgcgtgcgtgcatcttctgcgtagaaatgccaagctcagcaccaaagccaaacacgccgccatcggtgaagcgagtggaggcgttgaccatgaccacggccgagtcgatgcgcttggcgaattcctcgatggccgcataatcctcggcgatgatggattcggtgtggcccgtggaatgcgtgttgatgtggtcgatggccgcgcccagatccggcaccaccttgatgcccatcttgagggccagatattcagtgtcccaatcctcctcggtggcgcggttgaggtcaaggccctcgatcgccgcgccggagatgatgtcatacgacgtggtgtcggcctgcagtacaacgttcgcctcggccagagcggcggcgatctgcggcaggaattcggcggcgacatccttatgaaccaatagcttctcggcggcattgcacacacccacgcgctgggttttggcgttgatgatgatcaggatggccttggcgagatcaccggacttgtcgatgtagatatgcacgttgccggcgccggtttcgatgaccggcactttggagttgcgcacgacggcttggatcagacccgctcctcctcgcggcacgagcacgtcgatatggcctcgcgcctccatcatggcggtggcaccggcgcgtccgtactggtcgacggactgcaccagtgcggattcgaaaccgtgtgcttcaagcaccggggcgatgacgcccagcgtggcagcattggtgcgttcggcggcgtgaccgcctcgcagcaacgcggcattgccagatttaaggcacaggctggccacgtccacagtgacgttcggccgggcctcataaatcatgccgatgacgcccatcggtacgcgcgtctgggtaaggcgcagaccgttgggcagattgtatccgcgcacgatttcgccgaccggatcaggcaaggtggccacatgacgcacgccttgggcggcggcggccacgcgcggcacgtcgaacagcaggcggtcaagcttgcccgcatccatgccgttttccttggattcgagcatgtccagcgcgttggcggcttcgatgtccgcggcgtgctcgtccagcgcgtccgcaatggcgagcagcagttcgtttttggcttcggtatttgcctgtgcaagacgctcctgtgcgcgtgcggcctgatcggcctggcggcacaccgcgtcgaacacctcaggactcaattcatcgctcataacagtcaagcgtaactcacaacgcggctgattgcttactccgacccgcttgttatgggatgtctgacgttttgaatcgcaaacagaaccggctcccctccatctcaggcgggaagccggtgacgtgatgcgctccggtcagcgaatcatcactaaccggtacaccacggtggattagcgaatcagcaaatcagtggatctggtccaggtcggggtagagcgggaagtcttcggcgagcttgtcgacgcgggccttcagcgcggtcacgtcggcggacgggccggcggcgagcgcggtgccgatgatgtcggccacctcctcgtattccttcgggccgaaaccgcgcgtggccagggcggacgtgccgattctcaggcccgaggccaccgaggccgggcgcgggtcgaagggcacggtgttgcggttgatggtgatgccgcaggcggcaagcagatcctcgccctgctggccgtccatctcgctgttgcgcaggtcgaccatcaccaggtgcacgtcagtgccgccggtcagcacgctgatgccgttggccttgacatcgtcggccaggagacgttcagcgagaatcttggcgccgtcgagcgtgcgctgcatacgatctttgaattcgggggtgccggccaccttgaagctcacggccttgcccgcgatcacatgcatgagcggaccgccctgctgaccggggaacacggaggagttgagcttcttggcgtattcctgcttggcgaggatgaagccggagcgcgggccgccgaaggtcttgtgcgcggtggaagagactacgtcggcgtacggcacaggactcgggtgcagacccgcggctacgagtccggcgaagtgggccatgtcgacccagaatttggcgccgacctcgtcggcgatctccttcatggccttgaagtcctcgatgcgcgggtaggcggaccaaccgccgatgatcatggccgggtgggtttcgagcgcacgctggcggatgatttccgggtcgatgcggaaggtctcggggttcacgccataagcctcggcatggtagaagcggccggagaagttgattttcatgccgtgggtcaggtggccgccgtggtcgagggccaggccgagcacggtgtcgccgggcttgacgagcgcctggtagacggcggcgttggcctgggcgccggagtgcggctggacgttggcgtattcggcgccgaacagggccttggcgcgttcgcgggcgatggtttcgacttggtccacgtattcgcagccgccatagtagcggcggccggggtagccttcggcgtatttgttggtcagcacggagccctggcattgcagtaccgctcgcggcacgaagttctcagaggcgatcatctcaaggccattgcgctggcggcccagttcggagtccagcagttcggcgatctcaggatcagtttcgcagatcggcgcgttgaaagcatcggtcgctttctgcgcaaggggtgaagcggtcatgggtgctcctttttggtatgggcgacaattgattcgccgttgccgccttactgtatggccggtttgtagccggcctgtttcatgatatggccggtccccgttcgatggcaatggtgattttcgccggtttgaccggtcggctacgcgagacggacggctcttctgcccacggcccacgctaaactggtgtggattcatcatccctttcaggcagaaggattcatcgtgacaaccaccttccattccacccgtagcaccaccgattcgctgaccgccaagcaggcgattcgtaagggcatcgccgatgacggcggcctgttcgtttcggacgcgttgggcaagaccaaggtggacgtggcctccctgccgggcaagtcgtaccagcagatcgccgccgaggtgctgggcgcgctgctgccggacttcacggccgaggagctgggccagtgcatcgccgacgcctacggcgaacagtggtccgatgagcgcatcaccccactcaagcccctgggtgacgattacgtgctcgaactgttcaacggtccgacttccgcgttcaaggacgtggcgctgcagatcctgccgcgcttcatggcgcacaccacgccggccgatggcgacgcggacgagaagatcatgatcctcaccgccacctccggcgacaccggcaaggccgcgctggccggcttcgcggacgccccgggcaccgcgatcaccgtcttctacccggaaggcaaggtctcccaggtccaggaactgcagatgaccacgcaggccggctccaacgtgcaggtggccgccgtggaaggcaacttcgacgacgcccagtccgcggtcaagcgcatcttcggcgaccgtgccctggccgagcgtctcgccggcaattcgcacgtggtgctttcctccgccaactccatcaacgtgggccgtctggtgccgcaggtcgtctactacttctccgcttacgcccagctgctcgccgaccaggtgatcaacgtcggcgatgaggtcgagttcgtggtcccgaccggcaacttcggcgatatcctcgccggctactatgccaagctgctcggtctgccggtcaagcacctcgtggtggcttccgacaagaacaacgtgctgttcgacttcctgaccaccggtacctacaaccgccagcgcccgttcttccagaccatctccccctcgatggacatcctcatctcctccaacctggagcgcatgctgtactacttgtccgagggcgacacccgtctgatctccatgctgatgaacgacctcaacaagtggggcacgtacgagatcccggaagaactgctggccaagattcgtcagatcttcggcaccggttgggccgatgaggatcaggtacgcgagtccatcaaacactgctgggacgagaaccactacgtgatcgatccgcacaccgcctgcggctactacctacttgagcagatgccgcgcgacccgctgaccccgcgcgtgctgctctccaccgccagcccctacaagttcccgcgcgtggtgaacgaggcattgggcttcgacgccaccggcaccgacttcgagtgcatggatgtgctggcccacgagaccggcaccaccgccccggccgccctgcgtggtcttgagaccgccgacgtgcggttcaaggacgtcgtggccatcgacgacatggaggactacgtggagaaggccgcccaggcgctgtaaaacataccagcacattggctcccctcagagcggggagccattttttacatcagaattgcgtttacatcagtatcgcggcgactggcagtcctatggcgattgccaacagcacgatagtgccgatgatcacgctggggcgtgcgaggttgacggtccagccgacgccgaaacgtttggggatcatgatggcaggatcgtcacggttgatgtagatgatgccgccaatccagtgcaggtcatcgtcatacggcatggcattatcgtccgaaatgtcaccgccgtcactgtgccgaacaccggcatagacgcgcgccccgttctgcccgtaatacacgccgatcatcagcgcgccgaccagagccgccacggcgatgaacatgccgatgatgccgattagattgatatccagcacgccaatggtgacaagctgaacgcctaggcccaatccaccggctgccagcagtccgatgaccagcacgtagatgctccagacccgcgagaacacaccataggcatacccggtggcggcggggtggtcgggatcaatcgggtgcttggcgtagatgatcgcggcatggctggccaccatcaccgctgccagcaccacctgcgcgagcacggcgtaccaaatcaccatcggactcttctcggcccaaccgttcacattgccggcgatatccgcatgaatcggcacccgctccggcatccggtcatagcccagcaacccgacagcaatggtgacagcgagacaaacgacttgcagcaattcccacttcaagctcatcgggtcgggattgtcccgctcacctatcaatgctgcacggcgggcactggacgcctcccatccctgatcgactttgatggatagtactttgcggcgaaacatctgctgcagcacgaaaccacatatcgcaatcgccaccgctgcgatggacacagtccagaacgccgcgtcgactccgcagagttgccaaacggccagcgagaccagtatggcgcatacgccaagcgccaccgtaattcccgaaaacgcgactttaaatccgcgaatgcgcgtattgacatgggcggcggccggcactgtgacaccgaacacctcatgccggtcggtaacccatggaacccctgccaggccggcggtcactatcaccggcaacagtaaaaacgcacacaacgcgatgttcatcgacacgactgtattattcatcgttatctcccctgatttccttttgttgcaccgtcagtaacgctctgcgaggagcgcacgccgtatgcccgttcgcattgccgtttggtggcatcgaggaatgcggccgaatcaccgccgcgcgccctgtaggccaaggcaaggcgatagagttcctcgcccatccgctcatcccgtgcttcggcagttcggttcggtgcttctcccccgccgtcatgctcggcgacggttgcaccggcaccacgacgcataacgatgtatccctcgtcacgcaacagcgcataggccttgttcaccgtgtgcaggttgatgccaaggtccacggccagcgagcgcacggacggtaacgagtcacctggcgacagctcatcgcccgcgatggctgcgatgagctgcctgtgcagctgctcgtaaatcggcacgtcactgcgctgatcgatttccacaatcacggtcaattccacccctctcaagaactgttctatttgttctacatcaaatataacagttttgccgtatgagtcaagatatgcgaatctcggttgaacatccggcaatgggccaacggcgtgttgcttgaattttctaggaaggcgggaatcgccatgctgccggcgaatgggaaaatccatgtggcttgtcagattctgttcctgcaactgaatagtcccatgagggagtagacagcattgcggcgaagggctcggcccaaaccgcaataaagcgtgccgagcgccaaagccgccaacaccggtatgac

SEQ ID NO: 654 - DNA, 24182 bp, Unknown
  R14_15m  MAG No. k141_12608
tccttgatcatgcgggcggtgagcttgtggtccttgccctcggtgccggccagcggggagtcgttggtgccgaaggtcatggagatggccggatcgtccacgtggatgagcggcagcggcttcgggtcgttggggtcgacgatggtctcgccgatcatgatgtcgttgacgccggcgacggccacgatgtcgccggggcccgcggactcgaccggggtgcgctcgaggccctgcgtgcgcagcagttcggagacgcggaagttctcgagggagccgtccacacgggacaggccgtaggtcttgcccttctcaagggtgccgttgtagatacggaccagaccgagtcggccgaggaagtcggaggagtcgatgttggccacgtgagcctgcagcggggcgccttcctcgtattcgggggccgggatggtggagatgatggcctcgaacagcggctcgaggttgtcgttgtccggcaggccaccgtcggcgggctggttcacggaggcgtagccggccttggcggcgcagtagatgaccggcatctccagcagctggtcaaggttcaggtcgatgccctcgtgctgcacgtcgtcggccaggccgagcagcaggtcggaggtttcgccgacgacctcttcgatacgggcgtcggggcggtcgaccttgttcacgcacaggatgaccggcagcttggcttcgagggccttgcgcagcacgaagcgggtctgcggcagcgggccttcggaggcgtccacgagcagcacgacgccgtcgaccatggagatgccgcgctcgacctcgccgccgaagtcggcgtggccgggggtgtcgatgatgttgagggtgatgccctccgggtggccgtacttggcggccagcggaccggtgtattccacggccgtgttcttggcgaggatggtgatgcccttctcgcgttccagatcgttggaatccatcacacgatccggcacttcctcacgctcggaaaacacgtgcgactgctgaagcatggcattgaccagggtggtcttgccgtgatcgacgtgagccacaatcgccacattacggatatctccacgaaccgccatcgaaacctctcttaatactgattttcttgcgtaatcgttcggtacttgcgttctcgagtacttgctcttggatatcaacctgtacctacacacaaaccgtcacgatgttactggcacaccttgacacacaacgggcccggctttctgagaattagtcacatgtcatctggcttgcgagactttttgtattccacactctcgactcccctccctgaggggagctgtcgccgtgggcaactgaggggcgcaagtgtatcccctgaatctcccctgaatcatccctgagtacagcaccgtcatgggtagttactgagtaacctgatatccaacgatagttactcagtaaccttcgcccaaggcaaaccgtctatgcaaaggggatgcggtatggcaatcagagaagcgctattagcactgttggagcgaggcccggccagcgcctatcagcttaagaaggacttcgaccgcaccatcggtctgacttggccgctcaatatggggcaagtttccactacgctgcagcggttgaaccgcgacggactgattgaagagaccgcgccgactactagcggatccaatgatgtcggcaccgcagcggccgcaccattatggcgattgaccaattccggcgcccaagagcttgaccgatggtggcgctcccccattaccccggaacaacgcggacgcgacgaactggtgatgaagctggccgtcgccgtggaaatacccggcctcgatgtttccgaactcatccaacaccaacgccacgctttgcagcaactgctgcacgacatcacccgactgcgccggcaaacaccgcccaccgaactcgccacacgtctagtactcgaccaccatattttcatcactgaagcggaattgcgctggctcgataccgtggatgagacccagctgcgagcacaactggcgcagcaccccgtttcggcacctctcacggcaagctcagccgcactcaccgccaccattcaatagtgcataggagcacatcatgacttctcccgttctttcttctctcccgcaatcttccccatgcgcgctggaattacacgatgtcactcgcgttcacggcaaagatgcacgtcgtgtcaccgcgctcagtcacgccaatctcacgcttcgcccgggtgaattcgtggccatcatgggccccagtggttccggcaaatccactttgctcaatcttgcgggcgggctcgatgtgcccacgcaggggcacgtgctggtcgaaggccgcgatctggccacactgtcagtggccgaacgcgcggccatccgccgcaaatcgataggctacgtgtttcaggatttcaatctgctgccttccctgagcgcagccgagaacgtgtcgttccccttggaattggatggctggaatccccgcaaggcacgtgaggccgcgatgcaatccctcaatgaagtgggagtagccgatatggctgatcgccggcctgaagacatgtccggcggccaggcgcaacgtgtggcgattgcccgcgcactggtcggcccacgccgtctactactggccgacgagccgaccggagctctggattccaatgccggcatgacgattctcgaagtgttgcgcacccgcgcagatcgcggcgcggccgtactgctggtcactcatgagcctcgcttcgccgcctgggccgaccgcacggtgtttttgaaggacggccgtatcatcgatgaaaccggctccagcaatatggatgatttgctcaaccttgaggaaaggggagcatgatggcacgcgcagccctcaataatcttgccaatgccaccgtcggtcgctctgcccaaattccccatgccgctaggccaagccttggcgcacgttgcaaccggtatcgggccgcgctgcgactcggctggcgcgacgcactacggcacaaggcccgcaccctactgtccttgctgctggtaatgctgccaatcgccgcaatggtggcctccatcggtatgaccaccaccataccgcccaccagatcgcgtgcgctggcgacaatcccggctgatacgcaggcggtcatcaccgccaccgccaggccccgcaccggccaaccgttccggcagtcacccgaaagcggcggcacgtggcaggacgatccctcccagcagccggcctcggccgccgagcttgcgaagattctgccgcaacaggatcggctgctcccgtattggcagtcgcccgaactcatcgccatcaccggcaccgcgttgcaacccggcgaacagaccaaggctgggatcgacgtgaaaagcgggaacgacattgatctgaacgcggcctccaccgcgaccatgaccgaggcttcacctgaggcattgcaacgaatgttgccgaagctggtcaagggttcggcgccgcagaataatacacagattgtcatcagccgcacattggcggataatctcggcgcttctctcggtagcacggtgacgttcgtcgctccgccgttcgatggctggatgagcctggacgggcgcatcggcgaggcggtggccgacactcagcgtgcttggacagtcagcgggctgaccgatgaatccgaagccgcggcatggggcttggaaggctggatgtcagccatattggaatctgatggcgtcggtgtggatggccattatttggtggtcggtccagagccggtcacgtgggcgcacacccgcagcatgaacctgttgcaggccatcgtcatttcccgccatgtgctgactgacggctatccgcccgcatcgcagctctacccgatgcagatcgatgcggctaccatgttgaaccacatggtcactgtggtcatcaccatgctggtgggtatgttgctggtactgtttctggtcacgcccgcgtttacggtgtcggcagatcagtcacgtcgtgtgcttgggctcgcggccgcatccggtgctgcaccacgtgacctcagtcgaatcatttcctcgcaaggtctcgttatcggcgccatcggtggcgtgctgggctcggcattgggattcgcgcttaccttggcggccggccctgcgataggcgcattgcgtggatccacgccgctggagatcctgcacggattctcgtggggctcgctgccgatgggtattgtcacggcaatcatcattggatttgccgcgacgattgcgccggctcggcatgtggcgcgtatgcatccagtcgatgcgttgaaggattgcccgacaagagaggaaatcggctacggtgaatccgcgaatggcgtggatacgaagcttcgccgtaatcctttgagactgctccgtgttgcggttggtccgattctggtcttggtctccatcgtatgcgccgcgctcagtctgacattgccattgcccacgctggccgatcacaatccgggcgcggttccggccggaaccgaaacgcatatggctctgcttgttgccacgattttgttggctgtcatagggcttgcgttgtcgattcgcacttttgcacggtggtgcggcaaagcgggttcccaactgaacatcggcgcacgcctggcactcagggatgcagccgagcatcatcgacggttcgttccggcggcatgcgcggtgctgattaccatgtgcatcgcctcgtacacactggtaatcaccggctccatggtggcggaccagcgaaattccacgatgacgatgacgtatggaccgtcggggatggccattggggccgacgtgcatgtcagcaatgagttcgaccgtgctgtggtgtcggatgcgatacaccggcttggcaaagagacgccgatacgcgctcattacccggtgtacaccgaggatgtcaagcgatggtcaaagctcaatgatacgaccgaagtcgattccgacaagttgaacgccgaacacggctacatgtatgccgctgcattgctcccggccggtcacacttgtgataacccaacgattcaagagcaaccggacacgtccacatgggtgggccaggatgccgcttcggccctgtacccaaacgttccgatacgttgtgtgccgatagaccggtcccatcagccaacgtattcgaatatactgccgagtttccgcggcgtgaatctcattatggatggcaatgcgatgcgtttgtccggcttcccgaacgcggatgaggcggcacaggtgcttgatgcgggcggtgtggtggtcggtgatgccggcacaatcgacgcgggaggtatggtgcgtgtggccatttcgccgaatccggcaattgcaaacgaatctcaggccacacatatcgagaagcgcaaggccatctacgtgcgcggcgcgtacccgctggtgatgagcccggcaacagcacaggcgctcggcatcaaacaattgcagtatctgggtgagtatctagacttcgccggtggcaactcccccgttaccgtaaagaaggcctcagcttatgcaatcgaaaatctgccgctggcatccacgagcactgacgggaatcgcctgccgtggggtgacaatatggcattggtgcccattggcctgttggcattgctggcactgatggccacgctcgtttcattgctgctggctcgcacgcaggcccagcgcgacatggccacgatggtcgccgtgggcgcgccaccccgattcctcagacgttacggcctgacgcaggctgcggtgattctgctggccggcgcgccagtgggcgtggtatccggcgtggcgttgggatggctgcatgtggcatggaaccgcaggatcggtgtggacggtcattggctggaaaccgtgccgatctggggattgcaggcggcgctggcattcggcgtagtggcaaccggactgctggtggcgtggctggtcacaaaaccaccgcgcaatctcacccgtcgttcccttgattgatcagtgacatacggcaacccttgccgtgtcattcgggagctataagacaaaaagtggcccacacattggtgtgggccactttagtagcgaaggctgaagtgtaatcagtcttcgagattgaggcctttgcgctcgggcaagcagagggctgctatgcaggcgaggatgaaggcggcggcgaagatgatgaaggccacggccttgttgccgccggacagggtcaggaaccacggcatgaggagcggcgcgatgatggcggcgatgcggcccaccgcggcggcggcaccggcggccacgccacgcaggcgggtcgggtagatttccggggtcacggcgtacaacacgccccacgcaccgaggttggaggcggacagcagcatgccgaacacgagcacgagggccgctgatccggcctgcgagaacgcgaaggcggccacggcggagacggccaggaagatgctcagcgtcttgcggcggccccagacctccaccagccaggcggccaggaagtaaccgggcagctgggcgatggagatggcgagcgtgtagccgaatgacttggtcagggagccgaactggtcggcgagcagcgacggcatccatgtgaacgcgccgtagtaggagaagttcacgaagaaccacgtggcccagatggcgatggtgcgggccaggtacttggagccgaacagctcgcgcgtcttgatcttcggcagcggcttgcccttgggagaggttaccggggccactcccccggcttcctcgaagtagcgcacggccttttcggcttcgtcttcgcgacccttggcttcgaggaatcgcacggattctgggatgtgcacacgggtgacaatcgcgtagagcagtggcagcgcgccgatggccagcgcccagcgccagccccagtcaccggtgttcgggatcacgaagtagccgattatggcggcgatgatccagccgacggcccagaacgattccagcagcacggtcatgcggccgcgctgtttggtcggcgaaaactcggagaccagcgtggaggcgaccggtagttccgcgcccaagcccagtccgatgatcagtcgggcgccgagcagcatgccgagcgaccaggacagcgccatggcgccgttggcgatgccgaagatgatcagcgtggcggtgaacacggttttgcggcccacgcggtcggcgatgaagccgcccaccgccgcgccgatggccatgccgacgaagccgatggacagcacccacgacttttcggtcggggtgaggttgaagtgcgggtcggctgcgatggcggcgaccacgaaggaaacgagaccgacgtccatggcgtcgaatgcccagccgatgccggaggcgacgaggagtttacggtgcgccttgttgaagggcagccggtcgaggcgctcgttgcgggtgagctgcgcgggttgcgctggagtggtggtgctcacgtcgtttcctttctggtaagtggcgtcagatttagtgtcgggtcaggtcggtgtaggactcttcgatggccaagctgatgcgttcgacttgttcgcgggtcagcggcttgcggaaggtcatgcgtaatgccgatttggcgatggacggttcgaggcccatcgccagcaacgtggcaggaatctcgtggcgcccgatggcgcaggccgagccggatgaggcagcgatgccacgcgcgtccaggtcgacgagcagcgcttccccggtgacgccggggaagatgaaggaggcgtgaccgggcagacggcgcacggggtcaccggtcaggtcggcgcggggcacgacccggcgaaccgcatcgatgagcatgtctcgggacgcgaccaattcacggcactgcgcctgcatgcgcgcattcgattcgttgagtccgatggcaagcgccacggcgccggccacgttctgtgtgccggagcgcaggccgcgttcctgccctccgccggacagcaccggttcgatgggtgtgcggccgcgtaccagcagtgcgcccagtcctttgggcgtgccgaatttgtgtccggatacggacagggcgtccacatcccagtcacgaaaacgaatcggaatctggccggcggcctgtacggcgtccacatggatgggcacgccgtgcgcgtgggcgatgcggaccagttcctccacgggttccacggtgccgacctcgttgttggcaagcatggtggagaccatcgtggtacgttcgccggcctcgccgtcgagctcgcgttcaagtgcgtcgagatcgagatgtgcttgcgcatccacgggaatgcgcacgacttcgaaaccgaaccattcgtgcagccatgccgccgattgggccacggccgggtgctcgatagtggaaatgataatgcgcgggcggctgcttgccagttgtttgccatcggtttcgtcgagtccgtagaccggccgcaggcccagtttgcgcatgcgcgccatggcgatgcctttgatggccagattgtccgattcggtgccgcctgaggtgaagatcacgtcatccggccgggcgcccaacgccgcggcgaatgatgcgcgggccgcgtccagcgcgcgggccgcggttttaccgggctggtgcacactggccggattggcgtaggcctcagtcaggaacggggtcatggcctcgatgactgccgggctcactggttcggtggcggcggcgtccaggtacagttcaccgggttcaccggatgcgttgggggtatcggccatgactagttccaatccaatccaaggtcgatgctgcgcaccgagtgggtgagcgcgcccacggagatcacgtccacgccggtggcggccacggctggcactcgctccaggctcatgttgccgctggcttccacgatggccttgccgtcgatgagctccacgccgcgacgggtgtcgtcgagcgagaaattgtccagcatgatggtgtccgctccgccggcgagcacggcgggaatctggtcaaggcggtcgacttccacttcgatatgcgtagtgtggcccacctgttcgcgcacgtggcggatcgcgccggccaggtcgatgccgcgcgcggcgagcgccgccagatggttgtccttcatcatgaccgcgtcggacagtccgtagcgatggttgtggccgccgccgcagaccacggcgtatttttcgaacgggcgcaggccgggcgtggttttgcgcgtatcgacgatgcgggtgcgctcgtagcggcgcggccgggtgacgggtccgtcataatcgtcgccgtagatggcgttcaccgcgtccacgaaagcggcggtcatggtggcgatgccgctcatgcgctgggtgaagttgagggcgatgcgctcggcggtgagcaggtcgcgtaccggaccttccacggtggcgagtacctggccacgctggaatcgttcgccgtccttgatggcggcggtgacggtgacggccgggttctgcgcggcgaaggctgcggcgaacacgtcgatgcctctcatcacgccgtgttcgcgcgcggtgaggtgggccgagccggtatcgtccgcggggatggtggtctcgcaggtgatgtcgccgtagggcgcgtcttcggcgagcgccgcttcgacggcggtgcggatgatgtgtgatgtgagcatgggtcagtccttgatgtaggcgacggagtgggcccagttgtcgactggctcgctgtagtcggtgcgggcgtgggcgcctctcgactcggtgcgggcgagcgcggcgatggcggccacatagcctacggtgagcatgttgcggttctccaaagcctcaacgctgcttgcagcaccatcggcgtttacatcagcctgggcgtttgcggcggcgaggccttggccgagttcggcgatggcggttttcagtccggcctcgtcgcgcagcacgccgacgccatgccacatggtgttctggatgcgggtacggtcccagaccttgtcggcggcggtatcgtcagcagcagccgtagtggcaggagcggccagcgcgatcggcgcatggtcgaacacggcaccggtggcggagttcaggaacggttcgggtgcccagaccgcgtcgtcaccgtccgcgacggcggcaagaccggcgcggcgtccgtagacaagtccttcgagcagcgagttggaggcaaggcggttggagcccatgacaccggtacgagcgcattcgccggccgcgtacaggccgggaatggaggtccgggcgtccagatcggtgcgaatgcctcccatgtagtagtgcgcggcgggcgccaccgggatcggctccttgctccagtcgaagccaagcgaacgcgtataggcgtcgatggtcgggaatcggtgggccaggaagctggctaggtcggggttctcgcgggtcatcggcgacacgtcgagcatcacgggcttgccgccttgcgcctgcatcacgcggaagttctcgcgggccacgacgtcgcgcggtgcgagttcggcgcgcggatcgatgtccttcatataccggtggccatgttcgtccagcagcaccgcgccttcgccgcgcacggcttcggagacgaggaagtgctcgcccacggccatggcggtgggatggaactggtagaactccagatcggcgacctgggcgcccgcacgccatgcggcggcgaggccgtccgcggtggcgaccggcggattggtggtgtacgggtacatacgacccgcgccaccggtggccaagatcacccggccggcggccagatccttgtcctgcccgtcgatcagcaggcggacgccggcgatgtggccgtcccgcacgatgagatctttgaggaaggcgttctcgatgatgtggatgcgcgggttcttgcacaccatggcggagacgtccagttcaagcactttgccggtggcatctcccccggcatgcaccacgcgggcgcgagaatgagccgcttccaggccgcgcagcatgtgtccctgcgcgtcgcggtcgaagtggacgccggccgcggcgaactcgcggacgcgctccgcaccctcacgggtgaggatgtccacggccttcgggtcgcacaggccatggcccgcggccatggtgtcggcggcgtgcagcttcgggtcgtcgtcggagaaaatggccgcggcgatgccgccctgcgcatgataggtgttcgattccaccagtccggccttggttaccaaggtcacgtcgtgtccggtgccggccacggccagtgccgcggacagtccggcgacgcctgcgcccacgacgacgatttcagtgttgctcattgtgttgctttcctctgtttttgcgtcatctgctcccctcagtccgctacgcggacagctcccctcatgtacgaggggcgccagggacggatcacgggtgaacgcgcagcatgcgctccagtgccaccttggcttcgcgggcggtgtcttcgtccacggtgatgcgattgaccacgttgccggcttcgaggttctccaaagcccaagccaggtaagccgggtggatgcggtacatcgtggagcacgggcagaccaccgggtccaggcagaacacggtcttgtccgggtactgagcggccagacggttcaccaggttgatttcggtgcccacggcaatggcggatccggcgggtgcgttggcgatctccttgacgatgtacgcggtggagccagtaccgtcggcggcgtcgaccacctgcatcgagcactcggggtgcacgatcaccttgacgcccgggtatgccttgcgggcgcgttcgacctgttcgacggtgaagcgctggtgcacggagcagaagcccttccacagaatcatcttggcacgggcgtagtcggccggatcggcggcgccgccctgtgccttgaacgggtcccacagcggcatctcgctcagcggaatgcccatggcgcgggcggtgttgcggcccaggtgctggtccgggaagaacagcacgcgcttgccgcgggcgaacgcccattccagcacggcgtgcgcattggacgaggtgcatacgatgccgccgttgcgtccgcagaacgccttcagcgcggcggatgagttcatgtaggtgaccgggatgatctgctgcaagccatcggagtccggctgggtgccgcagatctcgccgagctggtcccagcattcctggacctggtcgatgttggccatatcggccatcgagcagccggcggacaggttgggcagggtcacgctctgttcgggagtggagaggatgtcggcggtttcggccatgaagtgcacgccgcagaacacgatgtggtcggcgtccgggcgttcggtggcgttcttggccagctggaaggagtcacccacgaaatcggcgtgcttgatgatctcgtcacgctggtagaagtggcccagaatcaacagtttggagccgagacgctgcttggcgtcggagatgcgctgctgcagttcctcgtcggaggccttgcggtactcgtccggcagcacctgctggcgcggcgcgttggcgggcagacggtcgagcatcgaggcaccgggaccgtagctgggtgtggtggtgtcgaagtgccatgggtcctgggtcagtcctgcatcgcaggtgctttgcgcgcccagcttggcgatgatctcgtcaacggacggcgcagtggatagtgcggtcatagtggttcctttccctatatacgtctgtgatgccggcccgaagcgggtcggcgggaaaaatcagatgcgcgcggatgggatcagcgcgtcgagagcgtcttcacgctcaccttgtctggacagttccacgatgtcgtcgccatcggattcgtggggcgtgccattctcgacaggtcgtttggggatgtagcggtagacggtggccggtcgttggcggccttcgcgcaccttctccccggtgtcttcaagatcgcccgaggcaagcattttgcggcggaagttcgccaagtcgagggtttcgccgccaatcgcctcatagacgccgtgcagttggcgcagggtgaacgtggggccgagcagtcgggtggccacgtcggagtattcgattttggagcgcaggcggagcagcgcgtagtcgatgatctggcgatggtcgaacgccagctcgggcagttcgtcttcggggaaccatcgtacgttgtcaccgtcctcgaagcccgcggcctcggtctggccgacgagcgcccagtacacgacggataccatgggcaatccgccatgggaccgggtcgggcctccaaaggtgtacagctgttcgaggtatcgcgggtgcaggtctgtggtcgattcgagggccgcgtaggcggactgttccaacgaccgatcggagcgcaggtcgccgccgggcaacgcccagcagcccaggaacggctgacggacgcgcttgaccaggggcagccagagacgggaatgggccgagttcgcggcgttgccggaatcggcggcactgttgccggtatcgcctttcgggccgagtgccagaatcaccactgacacgccgacctgtggcggtgcgctgcggcgctcggacacattgccgaatcccatgccatgcctctttccataccggttgttctccctgcattgagagcatagcactacttatagtcacaatgaccataaatcacatattggatggtctagcgcacgaatattggtcaggtagcgggccccaatcgctacgaaatcacgtccgtgtcttccgatttcgactgtgtcatttcggcgacgggcgggaggaacggcgctagggagggtagttcgtcgagactcttcaggcccatttggtcgaggaaggattcggaggtgaccaaaagggccgcgcgggattcggggtccacgccgtcttccttgataaggccgcgtaccgtgagcgagcgaatcacgccatcggagttgacaccgcggatcgcggccacttgggctcgggtgacgggctggcgataggccacgatggcaagcgcctccagtgcggcctgactgagtctcgcagtctggccgtcggtgacgaatgatgagacgaccggctcgaacgcggcgcgactggcgaactgccagccacgagcggtgcggcgtagttcgaagccgcgcgggcggatgccacgggattcatcgccctcatagtcatcgtgcagggcttgcaatgcctcttcgactgtgttgcggtccaatgccaaaatgcgggccagctcggtggcggtctgcggctggtcggcgaccatcagaatcgcttccagacatgcaggcagcccgccgggaaaatcgtctaccgtgaaatccacgtattcggggcgcgtctcctccactcccctcacctcggcctttgcggatccagccgtcgattcggcatccgccatgtgctcggttgcattcgttgcgtcaatccgttcagtcaccagtcgccgtccttacgcaaaatcgccttcggaaatgttcacgtcgttcatcgtttcgtctacgccggatacccacctcaggtgcagttcggcaaacggaccatcttgctgatactgcagcacaccttgtttgaagaacacgagcacggccatgaaccgagccaccacctcaatacgagaagtgcagtcccgggtcaattcgctgaacgacatcgactggtcgcccttggattccagtgctgcaatcagccggtcgcgcaccaccagcgattgggcccgcagatcgaccagcggcacgtgcagctggtggatcgatacttcggaggcgggcgcgttggcgatgacctgggcggccagttgggcgagttcgagcggggtcagcgtccataccagctcaggcaacatggcggcaatgccctcgtccatggccgccggatgcgggaatcggccggcattggcggcgatacgcgcccggaaatcaccggcggcctgcttgtaggcgcggtattggaggagtcgggcgaacagcaaatcgcgttcgcgcagcgcctcgagactttgctcgtcgtactggttgtcttcgccgccgggcagaatcgccacgcttttggcctcgaccaaaatagaggcgatgtcgagaaaggcgctggcctcatccatgtttttcgtgaagtcgagcccgcgcacgtatgtcaggaattcctcggtgatcgaggagagggaaacttcggtcagctcgagtttgttgttggcgatcatgccgagcaaggcatcgaacggaccggaatagacctcgaggttgacccggaagccggaagtggcggattcctccgtgctgatttcggcttccgcggagctcccctcagtctcgctacgcgagccagcttccctcagagaggggagccgagaaagggaagtctcattcatcgtttatcgaaacaatcgttacgccacgatgccgcgagcaatgagctcacgtgccacctcacggtattcctttgatgtcttgtgctcaggtgcatagaccaccacgggcgcggcggcaaccgtggaatcgggcagtttgatggagcgggagatgaacgtgtggaacaccttttcgctgaacgcctcgtaaatgcgctggcagacctcttcgcagtgcagtgtcttggtgtacatggtgatgagcacgccatccacttccaatgcgggattgatgcgggactgcactttttcgatggactgcataagtagggccacgccacgcaaggcgaagaattcggcggccacgggaatgatcacgccatcagctgcggcaagcgcgttcacggtgagcaggccgagcgatggctggcagtcgacgatgatgagatcgtattccgacttgagcttgcgcagcacgctgttcaggatctgctcccggcccacttcggtgaccagttggacctcggcggcggacaaatcgatgttcgccggaatcacatcgatgttctcgaatgcggtgtgctgcaccacatcatgtggatccacggaaatatcgaacagcgcggtgtaaatcgtgttctccacggtattcgcgttgacgcccagtcccacagtggcggcgccctgcggatcgaaatcgacgataagcacgcggcggccatactgggccaacgcaccggcgatattgatggagctggtggtcttacctacgccgcccttctggttgcacatggcaatgacacgcgccggaccgtgctgttgcagcggttcgggtgcggggaaggtttcgtattcacgtccaagcaaatcggtaggcatactgtctaccttatcaacatccgggttcgctgggggtgcaacgacatacgttcccgccataggcagcgttccttgacggaatgcgctgtctttatcgcggatgtctcgccagtcgtccatcgttgcccctcgccccctttgccgggaatacctgctcgcctatcctaatgtactcgccgggctcgcctcggaacaccgttttgcagcgggcattccagtgttccgaggtttatggatctcgtctcgtactatgtcgatgcgcttactcggtgcgcagtgcggtggccgggtcttgcttggctgccttgcgcgagggaatcaggccgccgatcagcgtgagcaccacgcttaggatcaccagcaccacgccgccggtcaccggcagggcggcattgacgtccgcattgccgatgaagtgatgcaacacggcgttgatcggaatatcgagcagcacggtcaagcccacgcccaacaggccggagcataggccgatgatgccggtctccgcattgaacacctgggacacgttgtgcttcgaggcacccattgcgcgtaggatgccgatttccttggtgcgctccagcaccgaaatgtaggtgatgatgccgatcatgatcgaggaaacaatcaacgagacggacacgaacgcgataagcacgtaggaaatcacgttgacgatggtggtcaccgagctcatcatgagccccacataatccgtgtaggtgatcttgtctttcttcgagacggtgttgttgtagtcggtaatcgcgtcggcgatgtggtccttgtcttcgaagctgtcggcgtagacgttgatcgagctgggcgcgtcacgactcaccacaccgaatgcggcgaggttgtcgtcgtaggtgccggtcgacacgtactggtcgtagatcgcgacaagcacgtcgttcgaagccgtggcgatatacgagtcgaaactgtcggcgagctgctgttcgctcatcgcggccatcgcgtcggcctgatcgccggcacccgccgcgccagcgccagcgccagcaccagcggcatccgatgcgcccgtaccggaccgctgcccggcactcatcatcgacttggccatgttcgccttctgcgtcacgcccagtgaaaccacgtaggtgcgcgcgtcggccgccttggtggcgtcgtccgagggcgagaacgtcatgccgttgagcacgttcgtgttcgggttggccttctgatcggtgacgatggcgctggaggccgcacggtcgatcagatcattggtcagagcgcgcgtgtatcccacgccagcggccaacggtgtggccgaagcatccttcttcgccttgacgacgcccaccaccttgagtttggtggccgtttcgaggcgctgttcgattacatccttgtcgttgccgatgaatcggtagtggccgtcatcgcccttgacgtactggtcggatgccggaatcatgtacagcgtctggtcgagcgccttagcatagtcgatcttgtcttgtggagtgctgaccttgtcgccggcgttgagcttggacatcatctcgtggtagtcggaggcgggcagcaggccgagctcgtacagcgtggtcagcggcacgctgttgttgtcgtcgagcaccagcaccacctcgtccttggacttcggccatgaaccgttgaccacttggtagttgtcggtgatgaccttgcctacgagcttgctgtcgtccgctccaggcatgatctcattgaacgagtcgggcgcggcgttctcatcggttttgccggtcagcatcgacatctgctgcgaggtgatcgacgaggtgccggacatgccggacgagcttgtggacgccatctgcgaggccattgaagtggagtcgctggcaccgatcgtcacgccgtccgcattgaccagcgtgccatcggggtcgtggtcgaacacggagaatttcacgtcatacgtgtactggataccggcggaacccacatactggtgaatctcgctcttggaattatccaggtatttcttgaagcgggttaggttgttttcggtaatcgaactggtcaggctggatgcctgcttgacgctgcggtcgtccgggtagatgccgtcggttctgtgcgtcttgccgccgtatccgtcatcgccgcccatctggccgcccatcatgctgctcaggtcgaaggtctgggagtcgatggtgatcgggtaggcggtcatcgtgtcacgctggatgtcgctgatgtatgcgttcacgccagtcgacaccgatagaatcagcgcaatgccgatgatgccgattgagccggcgaacgaggtcagcagggtacgcgccttcttggttttcagattgttgaagctcaacgccagcgacgtgacgaacgacatcgacgcgcggcccatcgtcttgtgcacggccggctgttcggccgtctcatccacgacaaacgggtcggagtcggagcgaatcacgccgtcgcgcaggttgacgatgcgcgtggcatattgttccgcaagttcggggttgtgggtgaccatgaccacgaggcggtccttggccacgtccttgagcaggttcatgatctgcacggacgtgtccgaatcgagcgcgccggtcggctcgtcggccaggacgatgtccgggtcgttgaccagtgcgcgggcgatcgccacgcgctgcatctggccgccggacagctggttcggctttttattgatgtgttcgccgagtccgaccttctccagcgccttgcgcgcacgttcgcgacggtcggccttgccgatgccggaaatcgtcagcgcgagttcgacgttcgacagaatcgtctgatgaggaatcagattgtagctctggaacacgaagccgatggtgtggttgcggtacgaatcccaatcgcgatccttgtattggcgcgtcgagatgccgttgatcaccaaatcgccgtcgtcataccggtcgaggccgccgatgatgttgagcaaggtggtcttgccggaacccgagggacccagaatcgcgacgaattcgctgtcgcgtaggttcaggctgactttgtcaagcgcctgttgaacgaaatcaccggttttatagcgcttcgagatcgatttgatctgcagcatgaatacctcttcctggctgacggttcgctgttatgtactgtattgtcacgccttgaatttccggccgactttggtgctcccccccccgccgcgattccgctatgggcggacgcgtcgcaaaatggtgtgtctcaccgcgctctggggtgtgaggtcagatacgtttcgatcagggtttcggggcttacgtgcgtgtagatctgcgtggtggtcacgctggcgtgcccaagcagttcctgcacggtgcgcacgtccgcgccgccttggatcaggtgcgtggcgaaggaatggcgcaaggtgtgcggatggagtggtttggtgatgccggcccgctccccggttgctttgacgatttcccataccgattgccgcgagatgcgcttgccgcgtttgttgagaaacagtgcgcgtctctcgggaatcttggcgctggagcgccgttccagctcgccacgccccgcattgaggtatgcggtgatggcccggcatgcgtagctgcccaatggcacaagccgctgcttggagcccttgcccatgagtcgcgcgatgtgctcgtccaggtcgatgtcgtccagattcacaccggtggcttccgagacgcggcagccggtggcgtacatgaattcgagcagggccttgtcccgcaataccaccggatcggttgagccgccggctgccgccgcgtcgagcagacgggttacctcgtccacggtgagtacgtcaggcagggtgctggcacctttgggtgccttgactgcggcagaaacgtcggcagtcaccgcgtgctggccgagcgcgaagcgatggaattcatggatcgaggccagtcttcgggctttggagcgggcggactcccccgcctggtcaagggcggcgatgtagtcttcgacgtcttgtttggttatggcgtccggttcgtggatgccgcgggtttcgagccaatcaatgtatttggcgatgtcggattcgtaggcggtgacggtggccgtggcgagtcctcgctccacgccgatgtggacgaggaactgctcggtgagtttggtgaatccgttggtcatgtgtttgttctcttccccacccgctgcgcgggagcccccctcgtcagagggggctaataataggaaaccccgctcggaagcggggtttctagtgtgaagtcacgacttcaagcaatcaggcctcaaccggagcgttgacgtcctcaggcagggcggccttggcggcggccacgatggtcttgaaggtgtccgggtcggagacggcgatctcagccagagcgcgacgatccagctcgatgccggcgagacgcaggccctggatgaagcggttgtaggtgatgccctcagcgcggacggcagcgttgatgcgctggatccacagcttacggaaatcgcccttgcgagccttgcggtcgcggaagttgtagttaaaggagtgcagcagctgttccttggccttgcggtacaggcgggagcgctggccacggtagccggaagccctctcgagaacaacgcgacgcttcttgtgggcgttcactgcgcgcttgacacgtgccataatctattcctcagctttctaaagtcttattatttccgggtaagccctatgctcacttctgcagaagctggtgcagcttcttggcctggccgccgcgcagcacatcgtcggcggacagttcacgacgcttgcgagcggacttgtgctcgaggttgtgacgcatggcggaaccgacatgcttcaccttgccggtgccggtgatcttggcgcgcttggaagcggcggaattagttttcatcttcggcattgctgccctccttgctggtttgcttcttgtcggaagtcttctgagaaatcgcggactgcgcgtcggccgcggcctgagcctgagactcctgcttggccgcgagacgagccgcctggcgagcctgacgctcggcgcgggactcggcgccacgacgacgctgctcggactgggtgtggaccttcttgcccttcggcgcaagggtcatgatgatgttgcggccctcctgcttcggcttggactcgacggtgccgtattcctcgacatcgtcggccagacgctgcagcagttccacgccaccaatcgggcgggagatctcacgaccgcgcaacatgatggtgaccttgaccttgtcgcctccgttaaggaagcgggtcacatggcccttcttcacgtcgaaatcgtggtcgtcgatcttcaggcggaaacgaatctccttgatttccgcggtgctctggttgcggcgagcttcacgagccttgatcttctcgttgtacttgaacttgccgtaatcaatgagcttggcgaccggaggcttcgcgttcggggccacctcgacgagatcgaggtttgcctccttggccaggttcagcgcgacggaagtcgcgatgacgcccacctgctcgcccttcgggccgatcaggcgtacctgcgggacgcgaatctcgtcgttaatacgtggttcgtcgctgatgatgactccaatcctctacttcaattccgtggcggggcctttgctggagtcctgttcaatgctttgggttcatggcaagccgaaaccagcgccaatatgcgctcagcttctgcagacgcatatcagttctttgcgtcattcctgactgcgcgttgtatatcgcaatcgctaggctgtttgccttgaacccgaggccttgaaaggcttccaggtggggttgccccgctttcttgattcctcaagccaaataggaagtttaccacatgcccggacattcgcggaccgtgtgtcgatgggtggataccggctacagtgggcatcatggctcaggtatgcgtgatttttggtgcgggcgaatactatgcgggcacgcccgtggtgccggccggcgcgtatgtgattgcggccgatggcgggctcgaccatacacgcgagttgggcatcgtgcccgatgtggtggtgggcgacttcgattcgctggagggccggccgccccgcaccgatgtgcgcaccatcgcgctgcccgcgttgaaggacgacccggacatgctttccgcgctgaaggtcggctggtcggcgggttgccgcgagtttcacgtgtacggcgggcttggcggccgtattgaccatacgatttccggcattcaactgatggcgctgctggcccgacacggggcaagcgggtatctgtatggcgacgggctcatcgtcacggccatcaccgatggcaggctttcgttccccgcgcatccggtgcccgaggacggccgcatggtgtcggcgttctcccactccgatgtttcgcttggcgtgaacgaaccggggctgaaatatgagcttaaagacggcacgctgaccaatacggtggtgcagggggtcagcaacgagttccgcgacggcgtggacgcggccatcagcgtgaaacgcggcacactgatcgtcaccttccccatcgaagtggcgttgccacaggtgagcagattccatgaattcggcggcgatatcggcgagctggacaccgaagtgtccaagctgctggttcgctgacttgcatgccgcgcgcttgctcgtgatgattcgagacattcctccaaaggagaggaaaatcacatgtcggttgcgggcaatccaaattgtgagcgctcacaaaaaatacggcatttttacccaaaacgcacgctgaaacgttgccatgtgtacagagtcggcattacagtagcaactgttggtaaacaatggcccggtgtgccaaagcgcgccaaggccaccctacaagggagaattacatgacagttaagattggtatcaacggcttcggtcgcattggtcgtctcgccttccgtcgcatcttcgagctgcaggctcgcggcggccaggctggtgacattgaagttgccgccatcaacgatctgaccaccccggctaccctggcttacctgctgaagtacgacagcacccacggcaccttccgtcatgacgatggcactccggttgacgtcaaggccaccgaagactccatcatcgtcgacggcaaggaatacaaggtctacgccgagaaggacgccaacaacattccatgggtcaagaacgacggtgttgagtacgtgctcgagtgcaccggcttctacacctccgccgagaagtcccaggctcacatcaacgctggcgccaagaaggtcctgatctccgccccggccaaggatgacaccaccccgaccgttgtgttcggcgtgaaccacgacatcctcaaggcttccgacgtgatcgtctccgccggttcctgcaccaccaactccatggccgccatggtcaagctgctggacgagaagttcggcatcaaggccggcttcatgaccaccatccacgcctacaccggcacccagatgctgctcgatggcccgcgtggcaccaagaccggccgcaacctgcgcgccgccgccatcaacaccatcgcccactccaccggcgctgccaaggccatcggcaaggtcgttccgtccgtgaacggcaagctgcagggccatgcccagcgcgtccaggttccggacggctccgtcaccgagctgaccaccgttctgaacaccgagaccaccgccgacgagatcaacgaagccttcaaggctgccttctccgacaccgattactacggctacaacgatgagggcatcgtctcctccgacatcctcggcgacacccacggtggcgtgttcgacccgacccagaccgacgtcaacaccattgacggcgtgaccctggctcgcaccgtgtccttctacgacaacgagtacggcttcacctccaacatgatccgtaccctgctgtacttcgctgagatctccgagtgaaccactgcggtctaggccgctacggttcgtttgagaactaagctgtgagacccccgccttgtgcgggggtctcttcgtagtagaacggtaatcatggcaaagaa

SEQ ID NO: 655 - DNA, 28997 bp, Unknown
  R14_15m  MAG No. k141_12740
tggctggattcgcgttcttccggccctgccggaggattggcatgagggaagcttccatgcgctccgcgcaagaggtggaatccaagtggatgcgacatggacggatcagacagtggaatatacgttgcgctgttcgaagcctacggagattacgctgaacgttctggggactgatatgggacgtgtcgcattgtctccggataagccattcaagggaaccatccggcgttaacgtattgcgttatatccgttactaaatgttgcggaccgtctttcctaatagaggaggacggtccgcaatctttttttgatgggaaaggagattccgccattttccacgattggtatgcgcagatgaacctgtacagtgaaagctatgcgtgtaatttctggacgattcaagggtgtggcgcttgctacgccgaaaacgggtacccggcctaccacggatcgcaccaaagaggcgattttctcgcacctcgactcatggggagtgctggatgacgcccgtgtactggacctgttcgccggtactggtgcgttgggcatcgaagcgctgagccgtggcgcgcgagaactcgtggccgtggaaagttcccggcctgcggcggcgctgattaccaagaccttgtcgcagttacagaagaaccgttcgtgggatgcctcgctcaaggcccgtgtgttcaccaaaaaggccgagcaagtggctggcggctttggtgaatcctttgacgtgatattcattgatccgccctacgcctatgagaccgctgaatgcaatcagttgttggccaatctggcggtgggcagcgccaccaacgagaacaccgtgattatgctcgaacgctcggtacgctccgacacccccaccgcccccgaaggctggcaaatcactgaaagccgcaactacggcgaaaccgccgtcttctacatcgagcccgcggatgacgactcggatatagagcgttccgacgattccgccgcgtagtgaatctcccaccgtgtggtgaattaatcggcgagccggcgcggatgggtggcggagacctcccagcccaaggccatcagggtcttgcggtcggccttatccagcgccttgcaatccagtgccgcgataaggtctggccggatctcggcggtgcgggccagcgcttcgtcgcggcgaaaacggtccaccttgccgtggtcgccggacaacagcacgtccggcaccgcaataccacgccacacggccggcttggtgtactggcgatgttcaagcagtgcgtcctcgccggtgtaggattcctcgacaatcgaatctgggttgcccatgaatccgggcatcaggcgggtgatggcctcaagcatcaccgacaccgccacttcgccaccgttcagcacatagtcgccgatcgaatattcgcgtacgtcgacgccctgggagcggtagtagtccgggatgcgcgcatcgtagccctcataccggccgcagccgaacagcagatggtcggcatggctgagctcggtggcgtcgcgttgggtaaacaacggggccgatgggttcgggaagatgagcaccggtgtgccggatagggcggaggattcagacggccgcgagaatcccagcagttcgtccaggcattcgctccacacctcgggcttcatcaccatgccggccccgccgccgactggcgtatcatccaccgaatgatgcacatcgtgggtccagtcgcgcaggttgtgcgctttgatctccaacaatcccttggcctgggctttgcccatcaggctgaggttcatcacctcaaagtattcggggaacacgctcacgatatcgatcttcatgttatccagcctaacggtagccccgcccgcattacacggccaccactacactattgcggtgatgaatacgacgatgaacctccccacccgcaaaaagcccgaagtgttgtccccggccggcaacctgaggggcctgaaaaccgcggtcgattatggtgccgacgccgtctactgcggcggcaaagccttcggcatgcgatcggcccccaaaaacctaagccttgaggactttgaggaaggctcgcgctacgcccatgaacgcggcgcccgcgtgtacgtgacctgcaacgtgctgccgcgcaacaacgagatcgaagccatgcgcgagtacgtcggccagctcaaggacaccggcgtggacgcgctgatcgtctctgacatcggcgtgatgatgatggcccgccaagtggctccgaacctggaattgcatgtctccacgcaggccggcgtcaccaattaccaagctgcgaacgccttctatgagcttggcgctcgccgtgtggtgttggcccgcgagatggacttgcaggccgtgcgtgatattcgcgccaacattcccggtgacctcgacatcgaatgcttcgtgcatggcgcgatgtgcatggcgttctccggccgttgcctgttctccaactatctgaccgggcgtgatggcaatcatggcgaatgcgcgcagccatgccgctggaagtattcgatcgtggaagagaagcgccccggccagtacttcccgatcgagcagaccgagaacggcgcctatctgttcaattcgcaggacatgaatatgctggggcacttggatgatttgattgactccggtgccaccagcctcaaaatcgaaggccgcgcgaaaagcgcctactatatcgccgccatgaccaacgcctacaaaaccgcggttaatgaatacatgattcaacgcggttttgaagacgctgatggcaatgttctgaagcctttccgtgaccgtgtgattcgcccgggcgaccccgattttggccaaggaaccgaagatcaagtgatgagcaatgccgatgccgcgttcgccggtgtggccgatgagggatatgaccgtggctctgatactgcggttgccgattcggtcaccggctcggttgccgcagaacgtgaccgcgtgacggttgctgatgccgccgactcaactgcctctggtacgtcggccggcaccgccgtcgaacccgacggcatgagctcccacgcccgctccacgcgccgcaagtccaacaccgcggtcgaacagatcgagaccgattggaagcatgcggccgttcgcccggccccgcacgtcgaactgcccgaatggctgctcgaggaaaccgacaaggtggcccaccgcgactactccaccggcttctattacccggagcacaaggtcacacagaacaccgaccgctccgcctacttccgctcatggctggtagtgggcgaagtgctgagctggagcgcggacgaaggcggacgtgtcacgctgatgagccgtaacaagatcgagcccggtcaacaggttgaattcctgctgcctggcgagagaccattggtctttaccgtgccggaaaccggcctgcgcgatgccgatggcgcgccagtacccgccatcaataatccggcgcacgtgttctcgatgccctgcccgcaccaggtgcccatcaacgccgccatccgctcgcgcaccaaaaagcccaccctcaaagccgaataacctaccactccgcccccgctgactgggggtggtcatgggaatcatgaacaccgcccgcacccaagaaagaatgccttatgcctgaatacagcgaagaaatcctcgattccaacagcatcagctctaccgataaagccggtcgccctattccggtgaccatccccatcgcactggcccccggcatcaaggtggtgtacaccacgcgactgggcggcctgagcgccggcgattacggcaacctgaacctcggcggcaagtccggcgacgaacctgaggccgtactgtcgaaccgcatcgcactcgccgaagcggtgcaagcccgcctatcgctggtctcccaagtacattccggcgtggctgtggacgtggacgactcgttcgtcatcaacacccccttcggcttcgacgtgtccggcacacatggtgagactgacactccgcacgtcatcgaggcggacggccaggtcaccgcacaatccggcatcgccctaggcatgttcgcggccgactgcctgccggtgctgctgggcgacccggtcaccggcatcatcggtgcggcccactgcggccgtcgtggtctggagcgtggtgtgatcggcgccacggtagacctgatgaagagcaagggtgccgacccggcgaacatcgtcgccacactcggcccgcgcatctgcggcgactgctatgaagtgggcgacgagatcgccgatcagttcatcaagcgcttcccgctgaccaagacgaagacccgcttcggtggtgccggcatcgacatcgccgaggcggcaatgatcgacctcgccttcgccggcgtacaccaggtggtcgattcgatgccgcgcgtgcacgccgccacccagtaccttgaggaagacccggaactcgccgaactgtgccgtacggacggcgaaggcccggccgagctcgcggagcgcatcgacaacatcagccacagcatgtgcacgctcgaaaacccactgtggtactcgcaccgccgcgccgcgctcgccaacaaaacacacgaaggccgcctccttgccctcatcgtgcgtgactaaacggagaatgcgggcacattccgtggagaagatgtgatgcagttcacggacggccagccctcaccctacggtggtgcctatgactgagagagatttcgatacccccgtcgagacgcctaccgtccagccggcccccgctcagggcgccaaaccggcacaaaccgtgccggtggtggccgtggtgctggccgctggcttcggtacgcgcttcgaccccgacaatcccaagcagcttgtctccgtgggcggcaagcccatcgtgtgctggagcattgatgcctttgaacattgcgatcgcgtcagcgacatcgtggtggtggtcaatcccaaggtgcgcggtgaagtggaaacgttggttggcgagatgggctacaccaaggtccgcgtcatcattgacggcggtgacgaacgtgtggacagtaccgccgccgcgctcgacatgctggctacggctggcattccggacgatgccaagattctgatccatgacgccgtccgtccgttcgtggaacagtccgccatcgacggttcgattgatgcgctcgaccagttcacggccgcgaccgtggcctacacctcaaccgacaccgtgctgttgaccgaggatctgggcgatttgaaagtggtcaagtcggtgccggaccgcccgaacaccttccgcgcgcagaccccgcaatccttccgcttcgcgacgattcgtcacgcttacgatctggctgccgccgacccggacttccatcccaccgacgacacgcgcgttgtggtcgattatctgcctgatgaacccgtcgccattgtctccggtgcggaaaccaacctgaagatcaccacgctggaggatattcccacagctgagcgtatcgccgaggagattctcggtcgtgatcccaaggaagaggcccgcgcccgcatgcacgccctgctggcccaagcggccggccagatgcatcgctagactggcattatgcgtgaactcaatgttgtgatctccggcttcgaccactatgacggcgtggaggtcaatcccgccgtcgaagtgcccaaggccatcgccgagcaggggttgggcgtctcctctgctccggacgatccgttggagcaggtcgccgtcaccgtccatgccgtcagcatcccggtgagcttcgccaaagcctggcccacgctgaaagggacgattgaggccaccaagcccaatatcgtcatcgccaccgggctcaagcacgcagcccgaggcgtgatgcttgaacgatgcgccaccaacctgatggacgcgatcaggccggacgcggacaacgtgaccccacgccgcgaacccatcgaccccaatggcccggccgcctattggacccgcctgccgttgcgctcgatcctgaatgatttcacggacgattcgattccggccaccctgagctcggacgcaggcacgttcgtatgtaattcgctgttctacaacttgctgaactggaccgccacccaggagcgggtgctgggcggattcgtcagcttcccgccggtcgtgccggcggattccagccagcatggtctgccactcgaccagcagatcgccgctggccgtgatgtggtgcgcgaagccgtgcgctactatctcaagccctccagctccggcatcctcatcgcctagcacgctgcgcgccacgccggaatagaacatggttcgcacgcattgtaacgattgcgcgtcactcaacgcccagcgctagtgcgatgcgctacagtgcttcaaggatgtgccaagagctttatgcgtgtgcgaaaggaataaacagcgatggtggatcgtttcccggtggtgctgcgaggatatgacaaggagaaggttgatgctgccttcgacgctactcaggagagtatgaagcgtgcgcagcagacgttggccagcatgcgtgagcagattgcggcggatgacgaccgtattctgcaactgcaggcccaacttcaggaagagaagaacaagaagccggaaggcaacagcttcgcttccttgggagcgaacgcccagcagatgctcgcctccgccgaacagacgagtaccgaactgctggaacgcgccaagcaggacgcgtcctccatccgtaccacggctcaggcgcaggccgaaacactgatcaacaacgccaagctggatgcccagcatattgttgacgacgccaatgccaaggccgcctcgattctgacgaacgccaacaatcaggccgaatcagtgaccacctccgccaacgaggacgccgcacaactgcgctccgaaaccgccaagaccatcaccgaacagcgtcagaccgtcgagcttgagctcagcaacgcgcgcgaagagcacaccaagaagatggcttccgaacgctccacccaagagcgcgaaatcgccgatatgaaggcggaagctacccagcaggtcgccgcaatgcgcaaaagcgccaatgaggagatcaccaagcttaagtccgattccaacgatcagattgaggcggcgctcgccgaggccaacaagaagctcgccgacgtgcgcgagcaagtgtccaagatgatgaccgaagcccagcgcaaggccagcgaaatcattgatgcggccaagaccaagggccaggaaatcactgatgaggccgaggtcaagcgcaccagcacgatgagccaggtcaacgccgaagtcgagcagatccgtcacgacatcgccgctcagcaggatgaggccacgaagaaggtcaacgaactcctgcagcacctcgaagagcgtcgtgtggcggccaagcgggaagccgatgagttggtcggccaggccaagaacactcgcgaccaagccgattcatatgccgcgtccaagcgcgaggaggcggacatccaggccgccgcaatcgtgcataaggcgggcgaggaagccgatgcgcagatcgaggagcgtcgtgccgccgcccaaagcgagcttgacggtctgtccaagcgcatcgccgatctgcaggaacgcgagtccgtcatcacccagcgtgtttcggaactgcgttctatgttctcgcaggcgttctccggattcgctttcggcggtaatgcggcggcctctggtcagagtcaggaagccgctgccgtggcgtcattgccggtggtcgcgcccgtcccggaagtcaagcctgtacacaacgaggccgatgatcagccgggtgagttgagcggaaacgagtcggctgccgacgatcacaatgagacagatgcggcaccggctgattcggctgattcagctgcgcagaatgagcagtccgaatcgtctgagccgtccgagcaccagacacagggcgaaccggaggccccgactcaggagaatccagccgtatctgagcagaacggcgaatgacaggccttcgattagactactagcggtaagaattacggcacctgcgctttcgagccaggtgccgtattcgtttggatctgcgccacaagcgcaccatcacagaaggagtatgacatgagtgaattgacgcctctgaccggcgaagcattgaataccctgcgcggcgatttcgcacagagcggcaccaaccgtctggccatgaacgcggtgaccgccgccggcatcgacaaggtggctcgcaattatgaccgcgctcgtctgatgcagcgccgtttctccaccatcgttgacaatggcgaagccacccatcaggatcgctccggccgctgctggctgttcagctccctgaacgtggcccgtttcgtggccaagaagaacatgaacttgaaggagttcgagttctcccagaactacgcgatgtactacgacaagctggagcgcgtcaactacttccttaaggatgtggccgctctggtggctgccggagagccttccgactcccgcctgatgcagcacctgctcgccgacgtgatgggcgatggcggccagtggaccatggccatgaacgtgtacaagaagtacggcgctgtgcccaaggacctgttcccggagaccgaatcctccaagaacaccggtgaaatgaacacccagctgcgccacatgctgcacaccgccgtggcgcacatgtacgccgctgacggcgatgcctccaaggtcgaggcgattattgccgacgccactgctgccggccaccgtattctgaccatccacctgggcgagccgccggtctccttcgactgggaatggaccgacaaggatggcgaattccaccgcgacggcgagattacgccggttgagttctggaagaagtacgtgggtccggctggtcttgaggactacgtgtgcctggtggatgatccgcgcaccgagcacgccaagggcaagaagatcggcatcgagcacctcggcaatgtggctggcggcgacgccaccgagtacctcaacgtgccaaaccagttcatgaaggactgtgtcaagcagattctcgttgagcagggcatcccggtatggttcggtgccgactgccacccgttcatggaccgtgagaacggcgcttgggccaccgacctgttcgagtacggccgcgtgtacgacgtggatttcgatttggacaaggaagcccgcgtgcgcttcggtgactccgccatgaaccacgccatggctttcgccggcgttgacgtggccgacgacggcaccacccgccgctggcgagtggagaactcttggggcaccaagatcgccgacaagggctacttcaccatgtccgacgactggttcaccgaatacgtctacgaggtagccgtcccgaaggccctgttgccggaggaataccagaaggccctcgaagagccagccaccatgctccccgcatgggacccgatgggcgccttggcctgacttcgccagcctcccggaatcggcctgacggccgatgctgtgttttttcgcagcctgccggctgctagggtctctccctctgtcagcgcgaagccgctgacggggggggagagaggccgcggtcgcaggccgcacaacaacacagcatcgccgcaggcgagtccacgcaggcgagtccacgcaggcgagttcacccaaagtccataaccgccggcccaacaagcagtccccgtaacagactgctatagttgggcttttgcgtctatagcgccataccgacggtacgtatacaaggaaaggagtcgagcaatggcagcactacgtggtccggatagttccgaggatgaacgtcgtttgggggagcaggccgtctttcccgagaccgtcgatgtcaacattcgtcagcttgaccccattcccgcgccgcgtgccttcctcagggagcagccgctcaccgatgagatgagcgagctcgtgctccactcgcggcaggaaatccgcgatgtgctcaacggccgcgacgaccgactgctcgtcatcgtgggcccctgctcaatccacgacccgaaggccgcgcacgagtacgcagaaaagctggctgccgtcaagcgcgagctggaagaccgactcgtgatcgtgatgcgcgtgtacttcgagaagccacgcaccacgatcggctggaaaggcctcatcaacgaccccgatctggacggtcgcttcaatattcgtaagggcatgtggctggcccgcaaggtgctcaccgacgtgctgagcctcggcctgcccgccgccaccgaatggcttgaccccatcaccccgcagtacatctgcgacgcgatcagctggggtgccatcggcgcgcgtaacaccgaatcccaagtccaccgcgaactggccagtggcctgtccatgccggtgggcttcaagaactccactgacggctccatcaaggccgccgccgattcctgcttcgcggccggcttcgagcatcacttcctgtccattaacttggacggtcgcgtgatttccgccgaaaccaaaggcaacccggattgccatctggttctgcgcggttccagccacggcccgaactacgatgccgaatccgtgcgtcaagctctggaagacctcaaggtttccaaagcgtccggcccgagccagcatggcctcgtcatcgatgccgcccacggcaactgcggcaaagacgaaaaccgcgaagccgaagtcatcgaagagatcgctgagcgtctggcgcacggcgaacaaggcatcaccggcgtaatgatggaaagcttcttggtcggcggtcaccaaaagccggccccgctcgaccagttggtctacggtcagtccgtcaccgactcttgcgtgccgtgggaacgcaccaacgagctgctgcacaccctagccgacgccgtcaccgctcgcagctcggctaaatagctttgtctttgtaaaaatgctcactgagacccactcagtgagcattttttgccaataacggtggtcatgtcagtttgttcccgtgacaccttatccttgggaaagatactgacccaaggagagatgttatgcagcagcaggaggaagcagcacattcgctgcatccgttgcaagtcggtccgcagccgttgaacaccccggaagagcttcgcgccattcgtcaggcgatgggggaggggaagaacccgctcgttgccactgatgtgccgcgctgggaagatcaggtgggtgtcagtcgcatcatcaaccgccgcgtattggagctggagccgctgcccacgcccgcgcaagtgctcgctgaactcccgctgaccgatcaggctcaggaaatcgtcgcctactcgcgtgatgagattcgcgcgtgcctgtacggccaagacgacaggttgttggtcatcgtcggcccctgttcggttcatgacccgaaggccgcgctggactacgcgcaccgattggccaagctgaaggacgagctcggtgagcagctgctcatcgtcatgcgcgtgtacttcgagaagccgcgcaccaccatcggctggaagggcctgatcaacgacccggatattgatggcagccacaatattcgcaaaggcctgttgcttgcccgcaaaaccttgcttggtgtgctgaaggaaggattggcggccgccacggaatttctggagcccaccagcccgcagttcatctcggacgcggtgagttggggcgccattggtgcgcgcaacacggaaagccagatccaccgccaattggccagcgggctttccatgccggtcggcttcaagaacgccactgacggctcggtgaaggcagcggtcaacggttgcttcgccgctgctcagcagcacacgttcttcggcattgaccatctggggcgtgcctgcgcagtcgagacccttggcaacccggactgccatgtggtgttgcgcggctcgattcacggcccgaactacgatgccgagtccgtggccaaagccatggaagacgtacgtgccgaaatgcccgccgaatccgcagcctcgcacggtctgattgttgattgctcgcacggtaactccggcaaggacgagcatcgtcaggccgaagtcgtgcgcaatattgccagcagaattgcagctggcgaacagggtattaccggcatcatgatggaaagctttattgaagggggcaatcagaaggccgcgccgcttgatcagctggtctatggcaagtcgattaccgacaagtgcatcagctgggaagaaaccgaggccttgctgcgcgagcttgcggaagccgtggccacgcggcgttggcactgagttgcgtcatcggctctctcggggggagcaatgcaacgaaacgtctctacccctcagcctgccattcggcggccagctcccctgacatgggaaccgaaagtgttgtgaaaggaacttacgtatgggtatgaaaactgtagctattattggcgcattggatgaggaagtggcactgatcgccaaatcgctcacgcatgtgacgcacaccgccaagggcagccttgacatcgtgtccggcacggtcgactccttcggttctgacgtcatcaaggttgccgcaacggtaggcggcatgggactggtcaatgcggccgccaccacgcagctgctgattgacgagttcgccccggacgtcgtgattttcagcggcatcgccggcaacctcaacacccacctgcacatcaacgacgtggtgctcggcggcaccctgcgctacctcgacactgacatgcggctcgtaggccagtggaagcccggcactgcggacgctccggtggaggaattccactctgatgaccgtctgctggaagttgccgacgaggcgcttgccaatgcgggcattacccacatcaccggcatcatcgcctctggcaactacttcgtggacacgccccaaaaggtcgaggaggtcatccgactcaccggggctgacgccgtggagatggaaggcgccgccgtggcacaggtcgccgcccgcaatgacgtgccggcactggtgattcgtgccctttccgacaacgccgacaccgattacgaggtattcaaggagttcgacatctccgagtacgccgataccgccgcccgtctggctgtcgacatcgtcaagcgcctgtagtcggcgggctggcccatctcaccatccacgttttgggtatgatgaccacaatatgagcgttttcaaactattgcttataacctgagccatactcggtgttcggcacagcgatgtgcggggttcatcgctggggccacaagccgtaccagttcttctcccgcatgccggtcgctgtgctcaattcgttaagcgacgacaacaccgtcgcgaagcattgaatacacaatgcgcacgctgcactggggtttatctgcagcatgaggagagaaaaaatgactgcaagcgcaaccgcggctgtgaccaaaccggtgaagaaggattcggttcctgagatcatcgccgcttccatggtcggtacggccatcgaattctacgataactactgctattccattgccgctgctagctacttcggcatgatcttcttcacggacgtcgccaagtccaaccagaccctcgccacgctgatggccttcgtgaccttcgccgtttcgttcctcgcccgtccgttcggctccatgctgttcggccacttcggtgacaagctcggccgtaagaagacgctggttatcgccctgatgaccatgggtatcgccaccttcctggtcggctgcctgcccggttatgagcagattggcgcatggtccgtcgtgattctgtgcatctgccgtgcctgccagggcgtgggcctcgccggcgaatggtccggtgccgcgctggtcgccactgaaaacgctccggccgacaagcgtgccctgtacggttccttcccgaaccttggcgccccgattggcttcttctgcgcttacggcctgaacctgctactcgaatccaacctgagcaaggaacagatgattgccttcggctggcgtatcccgttcctgtgctccgccgtgctggtgatcattggcctgtacgtgcgtgcccgcatgtctgagaccccagtgttccagaaggccactgaagagaagcgcacctccaagcacccgctgcgcgacctgctgccgtactggaaggaagtcgtgctcggcaccgtagccatgggtatcacctataccctgttctacgtactcggcacttggtcgctggcctacggcgtcaagggcttgggcttccagcagggcgagtacctgctcatgcagatgtgctccgtggtgttcttcgccatcttcatcgtggtctcctgcgtgtacgccgacaaggtgggccgcaagaaggtcatgattgccgtgaccgccgccgccttggtgttcagcttcttcgtgccgatgctgctcgtgcactccgccgcccatatcatgatcttcctgtgcgttggcttcatgatcatgggtggtttgttcggcccctgcggcgcctacctgcctgagctgttcccggtgcacgtgcgttactccggcgccggcctgagctacaacctcgccgccatcttcggtggcgcattcgctccgaccatcgcccaggccctggtcgcctccaagttcggcgttgccggtgtgggctggtacatggccatcatggccgccctcgctctgctcgctctgttcctgattaaggaaagcaaggacaaggactacgagctgtaaatagagctccccatattatgctcccgctggcgggagctgtccacgaaagcggactgagggtggccaatgggatttcggttctttgaccaccctcagtctcactgcgttcgacagctcccgccagcgggagcattttgttatgtcgtcccaccaaaaatgaacaatagacgaacttacgtagtttgggcatctcactacgccttgcacgttttactctggaaatcatggatatctggcagatcgtcgtgattgtggtgctcgccgcgctgatactggcgtgggttgccgtcatcgcctacaacaaaggccgcgtttcaggtcggctcgccgccgaacaggacctgtccggcgacgaggatacgcgttctctattcggtgatgatgcgcccgtgcgccccaccgagcgtcgcctgattgaagtcctgcccgaagccctgattgttaccgaccgcaacggcttggtccaatattcaagccccggctcagtgccattcggcctggtctccggcgaccgactcaactcgcgcgaagtcgaggacatcctcactcaggccgccgccgacggtggcgtgcgtgagcgtgaggttcagctgccggtcaatcgcaattcctatccgtcctctaatggccgaggactggaggccggccagtcacgcccgtccaacatgctgtatttgcgtgtgcgcattggcgatatcggcgatgacctgtacgccatcttcatcaacgacatgtccgagcagcgccgtttcgaggccgttcgccgtgactttgtgaccaacgtttcgcacgaactcaagactccggccggtgccatctcgctactggccgaaaccgtgaccgacgccgccgatgatccggacgccgtacggtatttttccggccgtatctccaaggaatccgcgcgcctgaccgaactggtacatcatcttatcgacttgcagaaagcccaaagcccgcaaagtgtgattgatgcgcggcgcatttccgcgctggatgtggcacgcgctgccatcgccgccaatcagacccaagccgactcccgccatgtggatattcgactgagtgtcaacggacagtcagtgcccacgaaggtcgaggagctggccgatggcgaaggttccttggaagaatcaggcagcccggccacgagcggtccgatgatcaaggccgacaaagaggccatgcaaaccgccgtcaagaacctcgtagagaacgccatccattactcgcccgaacacaccactgtggcggtcggcgtgggggagcgcgatggcaaagtcaccattcgcgtggtcgatcagggcatcggcatccccgccaaatcactggaccgcattttcgagcggttctaccgggtcgacccggcccgttcgcgcgagaccggcggttcgggactcggcttggccatcaccaagcactgcgtgcaggagaacggcggtcggatttcggtctggtcgcgtacgggggaggggtcgacgttcaccatcgagctgccggccgccccggatgaggatgacgacgaggcccggccggacgagtcgacacaagcgtagggccttggttggtgcccgatatggtgccattccattgccgcacaatcacacagtgggcgaggtgcgcacaccgtgcgtagcacaattacgcaattacgtactttcaggaaacagcaggctaacggagaacaaatggttacgatagtatcggaaaactttgcgcctatgcgcacgggaacatacccaagaaaggctactatggcacgcattcttatcgtcgaagacgaggaatcctatcgcgagccgctggtataccagctcacacgcgaggggtacgacgtgtccgccgccgccactggcgaggaaggtctggaactgttcaccaagggcggcatcgatttggtgctgcttgatttgatgctgccgggcattgatggtactgcactgtgccgtcgcattcgtgagcagagccgtgtgccgattattatgctcaccgccaagagcgccgaaatcgataaggtcgttggccttgagattggtgcggacgattatgtgaccaagccgtactctttccgtgagctgctggcccgcatccgtgccgtgatgcgtcgcaatcaggccacggcccaggcttccggcactgtggatgacgatattccgctggtgtgcggcgatatcgccatgcaggtaggccagcatcaggtcaccgtacgcggcgaaaccgtgttcttcccgctcaaggaattcgaactgctcgaatacctgatgcagaacaagggccgtgtgatgacgcgtcaccagctgatcgaccgcatctggggttcggattatgtgggcgacaccaagacgctcgacgtgcatgtcaagcgcgtgcgctccaagatcgaggaagatccggcgcaccccaagtatctgactaccgtgcgcggtctcggatacaagatcgatactcccgcggagtaaatggaaggcggccttcgggccgccttttttgttgtggattgtgggctcgccgcaggcgagtccactccaaaaactacgtagcctcaacgtagcccacaaacatccaagtgttcatcttctgtttactgatttcggttttgggcccttgaaaccaccaatacgcttgtagttgtcatgaattgaccgggcagcgctgagccgcccgcgaatagttgatagagggattaagtaataatcatgcagaagaacatcctcattcgttccattgccgctctgtccggcattgtgatgctcgcttccgtggccgcctgcggcgataacaccgccaccacgaccgacaacagctcctcctccgattccacttccaagtccaccccggtctccggcaacttctcgggcgccggcgcctcctctcagcaggccgccgttgaagcctggatcgccggcttccagggcaccaaccctgaagccaagatcgcctacaacccgtccggttccggcgctggcgtgcagaccttcctgaccggtgccaccgcttgggccggctccgataaggcccttgccgatgacgaagttgagcagtccaagtccgtgtgcactgaaggcaccgccttcgatgtcccggtctacatctccccgatcgccgtggtcttcaacctcaagggcgtttccgatgccggcaagcacatcaacatggacgctgccaccatcgccaagatcttcgacggcaagatcaccaagtggaacgatccggccatcgccgatcagaacaaggacctgaagctgcccgacaccgccatcaccgtcgtgcaccgctccgataagtccggcaccacccagaacttcgtctcctacttcaaggacgtcacccctgacaactggacctacgacctctctgagaactggccgaacgaggttggccagggcgccaagggcacttccggcgtgatctccaccgtcaagcaggccgacggcaccatcggctacgctgacttctcccaggtcggcgacctgggcaccgtggccgtcaaggtcggcgacaagtacaacgagatttccgccgaggccggctccaaggtcatcgaggactccaagcaggacgacaccgttaagggcgacaaccgcatcgtcatcaagatcaaccacgccaccgaggccgagggtgcctacccgatcgtcttggtctcctacgacatcgtctgcccggcctacaaggacaccaagcaggctgagttcgccaaggcttggctgacctacgtgacctccgacgagggccagaaggccgctcaggatgccgccggcaccgctccgctgccctcctccctgaagtctaagatcaccaagtccatcgaggccatcaagaccaagtgatgacgtcggcccgcaagggtcgtgtggactggacctgacaactgaacgatagactgtagtagtaagagcagtcgccgccaactttaagccgcagtcgtaaaccatacggctgcggcttaaagcgggtcaggacccgaacggtttggcaaagtcacagacgaaaaccgcaccacttgaatacttgataaccaccctatataaggagaatccgtgagttcgcaagacaaaacggctgtgcagccagttggaggcaagaccgccgacaaggtgtttcgcggtgtggcatacgcctgcggcatcctgatcctggttgtacttgccgctgtgttcctgttcctgtttttccgcgcctggccactcatcggtggcgatcaggccgccaacagcgacaccgtgtccagctttaccggcggcaaggccagcagcttctggggctacgtgctcccgctgttgttcggtactgtgctcgtgtctttgctggcactgctgattgccttcttcgtgtccatcggcattgcgctgttcatttcgcactatgcacctaagaagctcgccaccgcgctgagctatgtggtcgatctgctggctgccatcccgtccgttatctacggtttgtggggcggcctgattctggtgccggccatctacccgttctggaactgggttgccaaccacttgggcttcattccactgttcgagggtccggccgccaacccgtcgcgcaccgtcgccaccgtggctgtggtgctcgccgttatgattttgccgattatcacctccatgtcccgcgatatcttcatgcagaccccgcgcctgcacgaagaggccgcgctggcgctcggcgccaccaagtgggagatgattcgtctggccgtgctgcctttcggcaagtccggtattgtgtccgcctccatgctggctctcggccgcgcgcttggtgagacgatggccgtgttgatgatcctgtccccgggcctcaactactccatcaagctgctgcaggcctcgcagaaccagaccatcgccgcgaatattgccgcacagtaccctgaagccaacgatctgggcgtctccacgctgattggaaccggtctgattctgttcctgatcacgttcgtggtcaacttcatcgcccgtaagcttaccgagaaagcgactgcgtgatgactgctgctgagaacactgaaaagactccgatggacggcacgcccgaaatcgacttcgatcgtttccgcccgacccgttccgccatccagcgccgtaatatcatggaccgcttcatgtgggccctgatcgcggtggcgtttgtgatcgcctgcatcccgctgatctccctgctgtggaccactatcgtcaacggcatcaagcgcctgaacctgaacttcctgagctacaacatgaccggtgtggtcggtggtagccagaccccgtccggtggttacggcggtgtgctgcacgccatcatcggtactctcgaaatcaccgctggcgctatggttatctccattccgatcggtttgatgtgcgccgtgtacctggtcgaatactcgaaccgcggcaagctcgccaccacgatctccctgctcgtcgacgtgatgagcggcatcccgtccatcgtggccggcctgttcgccttctcgatgttcacgattctgctgggccccggtaccatcaacggtttcgaaggctccgtggctctctccctgctgatgctgcccaccgtggtcaagtccagcgaggaaatgctgaagatcgtgccgaacgatttgcgtgaggcttccttggctctgggcgttaccaagcagcgcacgattaccaagatcgtgctgcgcaccgctctgccgggcatcgtctccggtgccattctggccatcgcccgcgtgattggtgagaccgcaccgttgctgatgaccgccggctacatctccagcaccaacgtgaacctgttctccggccagatgaccaccctgccggtgttcgtctaccaggagtactcgaagctcagcgcgaactgcccgcccaacgccgacgccacctgcgtgaccacgattccgatggaacgtgcgtgggctgcggctctcgtgctgatcgtcatcgtgctgctgctgaacctcattggccgaatcgtggcgaaggtcttcgccgtcaagaccgagcgctaagccagtcgctaagcctaagccttaagaacacaaggaaatataaggaaacatcatgggacaacgtattgacgtcaaccacgagaacatctattacggcgactttctggccgtggaagatgtgaacatcaacatcgagccgaacaaggtcaccgccttcatcggcccgtccggctgcggcaagtccaccgtgctgcgcaccttggaccgtatgcacgagatcatccccggcgctcacgtcgagggcgaggtgctgctcgaaggcaagaacctgtacgacaaggacgtggatccggtggccgtgcgccgcgacgtcggcatggtcttccagcgcccgaacccgttcccgaccatgtccatccgtgagaacgtgctggccggtgtgcgcctgaacaaccaccatctggccaagtccgacgccgacgatctggtcgagtgggctctgcgcggtgccaacctctgggaagaggtcaaggaccgtcttgacaaccctggcatcggcctgtccggtggccagcagcagcgtctgtgcatcgcccgcgccgtggccgtccacccgcaggtgctgctcatggatgagccctgctccgccttggacccgatttcgaccttggctgtcgaggatctgatcaacgagctcaagagcgactacaccatcgtgatcgtgacccacaacatgcagcaggccgcccgtatcgccgactacaccgccttcttcaacctgaaggcagtgggccagcccggtcacctcgagtacttcgcggacaccatcacgatgttcaacaacccgcaaaacgaagaagccgagcgctacatctctggaaggttcggctgatcgtttcctgcgcgcagcgtaatgatttgtgcgtaggagaaacggcaaagcccgccgcaaggcgggctttcgcatattgagggcgagtattgccgagtattaccgttctcgcaacggagcgagctggaatacttcgtcggactgggcggcgacttcccgcttcggtcgatcgacgggagaacggcgggtaaagcggtacaagacaagtccgcacgatgaacactctgtgatgaatcttctgtttacggtgcgagtgtggaagaatggtcacagcaaggtccagcaaaggagcataggtgagtactggtctgatcgtcggcattgtcgttgtcgttattatcgttgtcttgattggttggggcgtcagcgcctataacaacctggtgacgctgaagaaccgtgtgaagaacggttgggcgcaaatcgacgtgcagttgaagcagcgcgccgacctcatcccgaacctggtgaataccgtcaaggggtacgcatcccacgagtctgaagtcttcactcaggtgaccgccgcccgcgccggcgtagtggctgtggccagcaacccgagcacgaccactgctcagcgcgccgccgccgaaaaccagctgtcccgcgccctgttcaacctgcaagccacggctgaggcatatccgcagctgcaagccaaccagaacttcatggatctgcagaaccagctcaaggaactggagaacaagatcgcctacgcccgtcagttctacaacgacgtggtcctgaagctcaacaccgccatcgaaaccgtgccgacgaacatcatcgccggtctgttccactttgagcaggcgcaatacttcgaggccgatgacgcttcccgtcaggtgccacaggtccagttctgacccgcttcaggcccgtccggtaagccgccggccgggcccgtattgtcttaagagagggaagatatgcggatacgattcattcgcgccggaatcatcagcattgttgccacggtggtgttggcagttatcaccttggcgataatcgggacttccgcgttcggcgattcggccgacctcagctaccgcacgctggactatgacgtgaccgccaccgcgaacggtgatttgaaggtcacgcagcatatcgacgtcaagatgcgtgagcgtaccgacagtgacgacaacaccaagccgtggaagcagctgttccagcaatacacgctgaactccggcaccttgactgatatcagcgatatcagcgtgcgcaacgtcaccgacggcatcgactacgcacaacagagcgagcccaagctgcccagtgacgtctcttccgacaaggaatggaacagcgactacgccaaccattggtatgtcgccgatgtgagcgatggcagcgaccatccaaaggcatacacgcccggtaccgatggcctcaagcccagcgcctccgccaccgaagatgacacaaccgtggagatcggctggaatattccggtcaccaccgaggccgacagcatgaagttcgatgtaagcttcaccatgcacgatgtggccaccaaatggaaagacgtggcctccttccagtgggagccgttcggcaagaagaaccaagtgcctatcggcacggtcaccggcaccgtccatttccccaacggcatcaccggcaaaacctcatggacatggctgcacaccgagcgcacctcggaaaccaagcgcaacagcgacggcagctacacgttcacggcctacaacatccacaatggcgactacctcgatgtggtcgcggcgttcgatgccgccaaagccaagggcatcgcccgcaagggaaccggcaatcatctcaaggacctgaaacaggacgaatataagcaacagcagcgctggctcgacaagcaacgattcgctgccagagctcgtctcgtgttctggattgtcagcatcgtgctcggcatcgcgttgtgcgcgtggggtatctgggctgtgatctccagcaaccggcgtgcgcaatacagtggcagcgtcgaatactggcgcgaccagcccggcatcagtccggcttccgcagcccgtctgattcgcgtggtcgatccgtcgacgcgccaatccgatgaagaccgccagctgaccgccaccatgctgtcgctcgccgtcaagaaggccatcgccatttatccggggccgtcggacatgtatcgcggcatcgacatgagccaggccacgccggtgggcttgagccaaatgattgccgccgaccaaggcaagcagtatgcggcaggcatcaccagcaccatcgtgattctgccgctcgccattgatgaggcacccaacgcgcaacagttgggattgagcgaatcggaagatgcgctgctgaacctgctcatcgtcatttctcagcgcgtgggcagcccggtattcgacctgaaccagatgaaggcgacctgccagaactggcaagacggctatattgagctcggcaaattcaccggtgcatgcagcatggaataccagcggctgggtgccacgcgctctgtgggctggcaatggatcctacccggcgtattggccgccgtgctgggatttggttcgctgctggccaacagctttatcggatacccggtggctggtcttatcgggctgccgatattcctggtcggactgttctgctcgatggccggcgcgatgaccgtgctcactgatcaagggcaggatatcgccggccggactctgggccttaagcgttatatggaagacttctccaacttcaccgaccggggtaccgccgatttggccttgtgggattggtatatggtctacgccgccgcgtttggcatttccgatcgcgtgatgcgtgaactggccaaagcatatcctcaggtcaacgacccggcttggctggatgccaacgcctccaactcgttgttctactggaactaccgcccgtatggctggtacagccaccgtcataatggtccattcgaccacgatgctgccgggcagatggacctaggcgttggcggcccagctccggcttacggaggcacgtcgtttgccggcggattctccgacctcggctcgcagctgaactccggtctggcggacatcagctcgaccatcagcgcggcagcaccatccgccgattccggtggcgatttctccagcttcggttcgggcggcggctccggtttcggcggctcgttcggtggctcaggtggcggctcgttcggcgggcggtagcgcatgcctatgtcgaaacgcattgttcgtgccctgggcttaagccttgtcggtgcgctgattcttgccgcactctgtgccggtgccttgattctcggcacagatggtgccgacctgagctaccgcacgcttgattacgatgtgaccgccaccgccgacggcgatcttaaagtcacggagcatatcgatatcaagttgcgcaaacgcaaggatgacgatggcaagaccaaaccgtggagatcggctggaatattcccaccaccgtaaaaaccaacagcatcaagttcacggtgagcttcaccatgcatgacgtggccaccaagtggaaggacgtggcgaccttccaatgggagccattcggtgagaacaatcaggtgccgattggtacggtcaccggcacggtgcatttccccaaaggtgtgaccgcgagcaactcgtggacttggctgcacactgaacaaacctcggaaaccggccgaaccaaggatggcagcttcaccttcaccgtaaatgatgtgaaaagcggcgagtacctagacgtggtggccgctttcgacgcggccaaggcgggagatatggctcgtgtcgagaccgacgatcatctgcaggagttgaaggaagacgaagccgacgacgaacggttctggcgcaatctggaacgccaacgcgccacaaggcgcctgaacaactggatgaccaccatatcggccggcctgatattcgggattattggtgttgttgcagccttacgctcctccggacgttcacgttaccgtggctccatcgaatattggcgcgatcgccccgagctgagccccgcatcggcggccaaacccatcgatatcgtgacttccggcgacaaacccgacatttccgagcgccaactcgtcgcgaccttgctttctctggccgtgaagaaagtcattgctgtgttccccggttcggcggacctgtatatcggcgtggatctgaaacaagtttctccggtggagctcagtcagcgaatcgggtccgatccatacaagcgcaataatgcgcgtaccaatagcacgattgtgatgctgtggcagtccgattacggcgtatctgagggatttgatgaatcagtattcgtcgaatccgtatttgatggatctggatctggcggatctggatctgccgcatctagcgtgtccgatgcacaccagcccgatctcagtgcttctgagcgggcattgctctatctgctcaccgtgatttccgagcgcgtaggtcgtacggcatttgacatggatgacatcaaagacgcctgcaaggattggaaagacggctacaaggaactcgaaaagttcaccaatgcgtgcaagaccgaattcgcggcggcggatatcgcgccgaaaaccgagaacggatggctcattcccggggcaatcaccgtactgatcggtggcgtcagcatattcatcaacggtttggccggatatctggtggccggggccctcatcggcattcccctgatgacggtcggcatattctgcttcctgatggggaattcctacgtgctgaccgatcatggtcagcagatggccgggcaatgcttgggtctcaaacgatatatgcaaggcttctcgaacttcaagtaccgtggagtcgcggattcgacgctgtgggattggtatatggtctacgctgccgcatttggcatatccgaccgggtgatgcgggagctggccatggcctatccgcaagtatccgatccggaatggcttgatgccaatgcctccgacacggtgttctattggaattatcgtccgtacgactggtatgggttgcgtttctacaatggctcggcgttcgcggattccgtggctgacagcggattggccggagcggtgccagcgttcgggggcacgtcgttcgcggctgggttctctgacctcggcacgcaattgtcgtacggatttgcggatatcaccgcgacaatcaatgcggcctcgccatccggtggctcaggcggctttggcggtagcagcggcggttccggcggcggttcgttcggcgggcggtaagcgatgtgcttctgaaagtccctatagctttgaaagtaaaaggcccggtgtcataagacatcgggcctttctctcaaaatcgaggtgaggagacctcaacagtcaggtccaacggggcgaaagtctgtggcgccgccgagaagattgcctcgaagctagcgtgacctttctgctacaacacagcataccagcctccaccgaagctcaccagtacactggactgaccaaaccaaggtctactagcgtgccactttggcgcggtgtcgttgtgtcaaccggcataatgacgtctcaaaattcaagaggaggttctcatggtaggcaacgaccatgacaaccgtccgagacaagaccggcaataccgggaaggtctgatgaccggcctgttgatcgccctggccaatcaagttggacaggggcggtcgacggccatcatcattgccgcactggtattgctgggaatgagtctcagacgaggccactgatctatcagcggaacagccggaatccatggggttccggcccctcgttttcactgaactgggtatgagtaagttgcgttttctattccgtgaagtcgcggaaatttcatagattgattgtgcgggcaggccgagagtgtgaaatccaacgggatgcttaggcttgatcgtggatatcgagtttccataagtttcacgaagggaatcaccatggcattgttccgtaacctcggaccgttctccaccaccgccatcggccacggcgaaatgccgctgaccatcgaaaacaaccgcggccatgaggtcggcatcgaaaccctgcatgcctcgctggacgccggctgccgccacatcgacaccgcttgggcctactactgctccggcggcgaggagcagaccggtgaaaagctggtgcgcgaggcccttgagacctggaaggggccgaaggacgaggtgctggtggccaccaaggtgggccacttccgcaacttcaccgacggccgccccacgtgggatgtggacggtcgcccggagaacctgattcggcgcggcaaggagagcgcactggcgctcggcgtggacaccatcgacctgctgtacttccaccgcccggacccgaaggtgccgtacaacgagtccgtcgaagccatcaagcagctggtggacgagggcgtggcgcaggaggccggtatctccaacgcctccatcgagcaaatcgacattgcgcgcggcattctgggcgacaagctcgtggccgtgcagaaccagtactcgccgattcacctggagacccaggacacgctcgactactgcgccaaggtcggtctggccttcgtgtgctggagcccgctcggcggctaccgtcacccctatgatgagaccaagttcgacccgttccgcgaggtcgcggcggcccacggcgtgagctaccagcaggtcgtgctggcatgggagctcgccaagggcgaccacatgttcgtgattcccggcgcccaccaccccgagaccatccttgactccctcaaggccgaccagctcgaactcacccccgaagaactcgccaagctcggctgattgcccattccccatcctcccgaatttgtgccgctgacgttggcttaacgtcacaaattcgggaggattgattcgtcttgaaggaaccgccatgcgcaaaaaactcatcctcgacctcgataccggcatcgatgacgcgctcgccatcgcatataccctaggcagtgccgacgagatcgatctgatcggtatcacggccacctacggcaatgtcgcggtgccgctggccgcgcgcaacgcgctggcggtggtgcacttgttcggccgtgacgacgttccggtctatcccggagtcgaccatcccatcgccccggcaacattgccgaaaatgcgtggcaccacaccagacgagcggacccaggcctacgcgcgctggcagaacggcggcgcggacggctggcaaacggacgcttcgtgggcaccaactcccagctcggtggcggtccaccatcccaacggcatcggcggcgcaatcatccccgactccccgcgcgctccggaagcaccaggctcggcggtcgatttcatcatcgccgccgcgcgcgaatacggcccggacctgaccatcgtacctacgggcgcgatgaccaccatggccaccgtattccgcaacgctccggacctgaaggattccggcgtgaacgtgacgttgatgggcggtgcgttgacgctgcccggcaatgtaagcccggccgccgaagcgaacatctccca

SEQ ID NO: 656 - DNA, 19790 bp, Unknown
  R14_15m  MAG No. k141_12996
ccggccaatccacgaatgcgatatctccatagatgattgcgttctgtgcgttacgcagtactagggaaatcttgatttgctgtccatcagatggcttgaatccatctgccacggcgcggacctcgccattgaacgtcgtgccgccgtccctgttgtctattttggatattccactgatggggaaggcggcggttccctgagccttggcgacgttgtatgtatccggattgagcacagtaaaatcaaccgtttctggggcggtgccttcgcctgcttgaccggcgtcatatacagtctgattcgggaatgccatattcagtgcttgcgtctgcgagaacacgatggaaccgtctttggcccgccccgtaatggtaatctgcggatactgcacctgctgggtcttactggtgttgcgcagggcgaaagcgtagtggacatacccttgctggtccgccgaccagccggattccactattttcagaggattgtcggtgacggtgtcttgattgtctccatcagcgccgtcagtgccgcctactccgcccgtgccattggcattgtcggttcctgacccgttcgaggagtgcccgccatcggccttatcggttgattggctgctggattgtgtcgaggaatcgggtgatgttgccgacccgataatgccaagttggcctgccaacacaatgcctcccgcaatggcggcgattatcagtgccgctccggcaatggaccacagcacgatggcgcgtttgctcaagtgcagacgccggaatagtcgagacgccgacgcgctgccgttcgttgttctcgttgatggcggatttgccgatgatgcgttcggtatgggcggattggactgggagaacagcgcctggcgaaactcttggacgctctgtggccgtttgctgggctcgaatgcgcacgcatagccgatgacggcgcgtagtcgagccggtactgcggcatcatcggcaagtcgctgctcgtagtcgctggcatcgggatatacgccggtcagcatgaatccgagtagccggcccagcgagaatacgtcggaacgcgcgtcggttttggcaaagccatattgctcaggcgaggcgaatccgtaggtgccaagcgccgtggtatcccgtgaacggttgcttgcctctgaccggatgcgcgcgatgccgaaatcgatgagatgcgcgccatcctgggccacgatgacgttggccggcgtgatgtcgcggtggataacgccgtgctggtgaagctcctgcacggcttcgcaaatttggtcgataagctgcacggccacattcggtgcaagccgcccgttttcctccgcaatttgcgcaagcgtgctgcccggcacgtaatcgtagacgatgacgaaccggtcgggcagctcgtacgtcgcttccacacgcggcagacgattactctggcaggcgctgagcgccgcccacacattgcgttgcgctaggggagagggaatcttcttgcgtacgaacgggccgttgccgtcaatgctcaccagttcggtgacgccggaaggtccgcgagcgagcgtacgctcgacatggtacgcatcgtcgatgctcatcgcatgcatcgcctgcttatcgtccatgtctctccttgatgccctcttacttgcgtctcactggtgagtgttgttgggccgaatgtcgtcaatcggccggtagcaacgtcgcctctcccatacgatacaactcgtcgtccgtggcaatgcggtcgaatccattgcgtatacaccagatgataatcgcgtcgcgtcgctgtttgcaccacagttcggaaacgcctgcaagacgaagtagccgttgggtttcacgtaatgtgcacttgagaccaaaagccagcataatggcgtgatctcggccggggcggcttttgccggagaaaatgtcataaaccactgtggcgttgaggccggatgcccgcaccacgtcggctcgtctcaggtcatgggcttccatacggtcgaacagatagtcggtcagcgtgcgtgcgctgacgagtccctcatcgagatactgctcaatgctggcgctggcgagcagccgatccaacagttcctcggtcaaatgttcttcggggatgtctgccattgcccatgctccttgtcgctgtgttgcgggtgctgtgctgcgccatcgtacgcggttgctcgattcccagcgtacaggacgccgacttttcggaaacacgccgaaaaattcagttgtcagctgatgtatggcccgcgcgtgtcgccgacaatggtcgatgccatccgtgtaggtgcggtggcggaaaggatgttcatgcgcggtatcaagcatcgacaataaagctaatatgcatacaaaatgctaatttgcgtacataataacaacgccatacactggtttcgatgtatcgcagagcaaagcgagcaataagaagggacgcaatgatgagcgaacgataccggcttgccatggcagtcggattgaccgtaacggttgccgggcttgcctcttctgtgctggtaatgctgctgcttaaggaaagaagggcatcatgacaacgccatttgatcaacaacctcagccggttccaccgtccgaaggcacgaatgacgcaccggaagatcgcgcgaatgcgcctaccgtgccgaatactgtaccggctggccaaccgaacgtagcgtctgatggtgctaccaccactccgatgactccggctacggcatcgcagcggcccgccggcgcgccatttgatcgtgtatatgcggtcagtccgcaacagctgttccaagttattcacgaccagctgactactggcgccacgtttaccttggataacgaaaacacccagaccggagcgttttccttccactcctatgatggggtgaactgcacgctaaccgtagtcccgcagggtgcggcaggggccgccattcgtctggaggcgactggaaacgaaagcgccaagcgcgttgatgagttcctcgccgctctggacaagcgtattggtgtggctcctgcacccgccacacatggtgccggtgctgccactggttttgctggtgccgctgcgcctgccgtgcttgctccgaatgcacaaggggtgaagaagacttccaagctggctgtgttcgccattatttggggagtgttgttcgtactcgcccaatttgtggatgtttctggccgatcctggggcggactgctgttcgccacggtgattccggcactgctttcaggcttcgccgtatacgtgacccgcccgagtggcaaggtgcaaggccgagtgctggcctgggtggcagtcggtatcaccgttgtgggtctggtaatcggtggcgtgttcgtaattcgtgacgatgcgaaggccaaggctgatcgggcggaattggaagcatcgctcgccaccaagtgcgaagcatattcatggccggagtcggatatcgcggcgctgctgccgcagccgaaatccacaaagggtgaaattagaagcgagtcttcggactatttctccatcgaggtgtgcggtaccgacgccaagcagtatgccgactacgtcaagtccgtgcaagacaacggtttcaccgtggactatagcaagtccgctgacagtttcaatgccaagaacgccgatggatacagtgtgagcgtttctcgtaacactgacgacgagaccatcatgtccatcactatccaggttccggaaaagaaggaagatacgtctacggacggcgacgccgcgaagcaggatgataagagcactgatacgggcactgattccagcgatgccaacaagcagagcgaccagtcttcggatcagaaggcgcagcagaacaccaatgacagtgctgacttcaaggccacgatggacagctacgaggcctttatcgatgagtatgttgccttcatgaacaaatatcagaaatccgataacgtggtcagcatggctaccgactatgccggcatgatgaagcgttactctgagttctcccagaaggtagacgccattgacgaaaactccctcagcagtgaggattcggcctactacaccgaggtcatgactcgatgcgcgcagaagctcgcatcggtgggccagtgatcagactggcgtatcgaggtgacggttttccaagaaaggaacgatgacggtatatgggtatacgcggcagacagtatacgccaatggatgagccggccttcaacaaggccatccccggaacggaggctctggccggggcgctgaaggacacttttggcgcattccgtagtgggcttggtattaccgaacctgtggtttcggtgaattgcgaaggttgtggcgctccgctttccggtcatcgcaaagaagtcgttcgatgcgaatactgcgatcgcgaaacgcagctataaccaacatgccagcataacggccggtcttgcgattgcagagtcgcaagatcggccatatgcatgagatatcgaggaaaaaacagatggcagttattaaggcgttcgccggcgcgctcggcggtacattcgcggacctgtggcgtgatatcatcaccgctggtccgttcacggaacacaccgtcgttgtgccgggcattccccgcggaagcaacaacgatcgcggttcgaatgaatacggttccgagggaataatcaccaatggttcgcgtatctatgtgccagagaatactgcggcgttcattttctctgaaacaggtatcgaaaacgtcatcaccgagtcgggcggttatgaatatcgcaacggggagcagagcgtgctcgccggagacggcatcggatcgttcttcaatcaggttgccgatcgattcaccttcggaggtcagcctggccgcaccaaatatgtggccttcgtcaacctgcgtgagattcgtggcatcaaattcggcacttctgcgccgctggtgtataacgaccggttctatggcgtcgatttggaaattcgcgcacgcggatccatgtcgctaaaggtcactgatccagttcgattcgttcgtaactttgtgcctgccactaccgtgtcgtattcattcgatgatgaagggccacgtaggcagattctgtctgaattcgtacagtcgtttattgtggccatcaattcgttgtccaatgaatatcgtatttcgcaattgcccggcaagacgaatgacatcgcggcatgcgtgcgtggcgatcgggccaatgcgggtacgtggaatgatcgttttggctttgaagtgtccagtgtgggcatcgaaagtatcgagttcaccgagcaatcacgtcaactcgtgcagcagttcgcctcgaataagatgaatgttgccgcatacgagggcgtttcccagcaagctggcaatatggctgcccagcagcgcattgcgcaaggcatccaagacaacggctttggcgatggtggcatgttgctgggcatgaatatggcacaagccattaatcctatgacggccgccccggttcaagcgccggcgcctgcgccggcaccggaagccgctgctcctgcctctcacacggcatccatgtctgtggaagaacaagtcgaggcgatgaaaaaattgaaggaattggttgatatcggcattctctcccaagaagaatttgatgcaaaaaagcacgaaattcttggcctataaacggcgcattcatgcaactcgaaatagttgataatgagggaaacgctggtgcgatatatcggcgaaaacaatggatgaatatatcattgaataagcagtaattatcaggatggttggattcacattgacgtggttccgaccatccgcagatctgcgactacaagggagagaataatgttgaacaacagggttcgtttcgggaacatgaagcgtgtcaatcgtgcggtttgggcgttgaccgtgattcttatgatggttctgggtcttgtgcttgctggatgctcggggtcttctgacggtgcggacggcaaggaggaatccacatattcgaaaattgtcgccatcgccaagaaagggcgttcgctggccgatgtgaaagacgagctcaaggatgccggtttttcctcctctgattatgaggtgaaaagcgacacggataaaatggtgctcagagcttcgaactgggttgtccaatccgtggaagatggggacaagcctgttatcaatgttcgtaaagccagcgatatagcgcaggaggaagaagcgaagaaggtagctgaggagaagaaagcagctgaagaggcagccgccaagaaagcagctgaagaggcagccgccaagaaagcagctgaagaggcagccgccaagaaggcagctgaagaagaggctgcaagaaaggccgctgaagaacaggctgccgcgcaggccgaggcccagcggcaagctgaggaggccgctcgacaggcacaacagcaacagcaagcgcagcaaaatgtgcattatgcgaattgctctgaagtccgtgcggctggtgctgctccgttgtatcaagggcagcctggatacaacggcaagttggaccgcgatcacgatggcgtggcctgcgagtaacggattcgatatttcggcgactcagcgcttgttcgggccgccgtccgggaacatcaagtaggtgatgatgccggcggcggttccactggccaatgcgccggtgatgacggcgagagcctgcatcgccgtgctgagcgtgggcttgcccgttgcggcagtctttgaagccttcaatgtggcggcactgggcttgcgtttctcggtggcggcgttgtcggcagcgttgccaccgtccgtattgactggggcattgtcggcaacggcctcgccgtcttgctcttgggcgcgccgttcgcgaatgcgttgctcaatgggatcgtcgaccaaagtcttgatgatgcgtgccagatcgcggtcttcacgacgtgcgatctcggcgctgaacaccgtacgtaaagcgagatactgcagtttggtcatcgggcttttgccggtctccaagttagacaccgtctgtcgcgcgactcccagctcgtcggccagttgctgagtcgtccatccggctaccttgcgaatcggacccaggttctcctgaaacttatcaatccaccattgttcgatttcagacgtcgccattacgcacctccttccacgctgtcaccagtgtacgttacctgtaccgaaatcaatccaaaaaacagtgttcatgtgaaattcactgcgtatttgcgctttcgccggcttaccgagattagccttagacaaggaataacagagtagaagcagaaggtatgcgcgtattcgatttcgacggaaccatctatgatggcgaaagcctgttcgacttgtacctgtattccgcccgccacgacccgaaagtgttccgctatatcgcccccgtgctgcggtacgcggtcaaatacaagcttggccgggccacgcttgaacagatggaatacggcgtgggcaagatgaccgaaggctatctcacggaactgagccgatccaaacgggtggcgagcgtcgaacagctcgtggacgatttctgggaccgatattacgcacgtatcaagccttggtaccagcctgagtcggacgatgtgatcctcaccgcatccttcgatctgacggtgggggaggcctgccgcagactcggcgtgaggaatctcgtggccagcgaggtggatgtggggacgatgaaggtcacgtacctcaacttcagcaccaacaaggccaaacggttccgcgaactgtacggtccggacgtcgtcatcgacgagttctacaccgactccaaattcgatcagccgatgatcgacatggcccggcacgcgttcatggtcaaggggaacaccatcacgcaagtcaagtaggaaacaacagaaaacaacacaacgtaaccaataacgaaaggggaacatatatgagcatgccgctcgatctatacgtaatccggcatggcgaatccgaagcgaacgtcatcgtccaggcgggcgagcagggcgacaattccctgtacacgcaggacaacgtcactgtgcccgatcgctcctggagactcaccgccaccgggcgcaagcaggccgactgcatcggtcgctggctggtcagccagcagcagctgttcgaccgctacatggtctcgccatacgtgcgcacccgcgaaaccgcagccaccatggccctgcccaaggccaaatgggaggagaaccgtgtgctgcgcgaacgttcttggggtgaaatcaacaccatcaccaaggacgaattcaaaaacaactacgcacgcaactggaacttcaagaataccgatccgctgtactggcgtccgccggcaggcgagtcgattgccgatgtggccgaggaccgtgtgcacaacatcctgacctcgctgagccgcaaatccgattcggaatccgtggtcatggtcacccacggcgacttcatgctcgccctgatgctcaccatcgaggatctggccgacgaggaattcctgcatcgcgccgactcggacgactggaagatcaccaactgcacctgcctgcactatacacgccgcgacccggaaaccggccgcacctccaagcgtgtgcgctgggagcagaccgcccggcccgtgctcgacgagacgaccggccgctgggaggtcaaggtggagccgtggcgcgaattcaagcgcccgtatctctccaatggcgatttggtggatgtggtgcaggccgtcgatccgcacctgctggagtattacggcaaatagcctttcccggaagagagacttcacaaaatcttcgtgagctagaatggcgcgtagtgcggctggttgtgaatgccgtgccccaagcgagagcgaggagagtagtaatgtccaatatcttccaatggcaattgcatggcgacggcaagacgctggcgcccggcgaggtcgtcgagcccgatgaacgtctgacttgggtgcgcaccgccggtatcggcgcacagcacgtcatcgccatgttcggtgccaccttcctagtgccgattctgacgggcttcgacccgtccaccaccctgttcttcacggctatgtccaccgcactgttcctgcttatcaacaggaacgtgctgccgagctatttgggctcgtccttcggcttcatcgcaccgatcaccgcggtcaccaccgccaacaagggcattgcggtcgccagcttcggcatcatggtcaccggtattctgctggccctgattggcgtgctcgtgcattacgccggctccaaatggatcgacatcatcatgccgcccgtggtcaacggcgcgattgtggccatcatcggtttcaatctggcaccttccgtgtggaccaacttccaagccgcgccggacaccgcactggttaccctgctggccgtgctgctcgtggccgtgctgttcaagggcttgctgggtcgcctcaacattttggtcggcgtaatcatcggctatgtatatgcctgcatccgcggccaggtcgacttctccgccatcggtgacgccgcatggatcggcttcccgaagttccacctgccgcaggccgatttttccatccttcccatgttcgtccctgttgtgctcgtgcttgtggctgagaacgtcggccatgtcaagtccgtggcccagatgaccggccgcgactacgacaaccagatcggcaccgccctcatggccgacggcctgggcaccacgctcgccggcttcggcggcggctccggcaccaccacctacggcgagaacatcggcgtgatggccgccaccaaggtgtactccaccgccgcctactggtgtgcagccgccttcgccctgatcctgagcctgtgcccgaagttcggcgccgtgatcaacacgatccccgccggagtgctcggcggcgtgaccacgctgctgtacggcatgatcggcatgatcggcatccgcatctgggttgagaacaaggtcaacttcgacaagccgctgaacatcatggtggcagccatcaccatgattattgccatcggccaattcgcgttcactgttggtggcatttccttcaacggcattgccattggcacgatcgtgattcttgtggcctaccacggcctgaaggccattggcaaggcaaccggcactatcgccaaagacgatccggatattttgtagtgtgttttagggctactgggccgtattgtggctcagcccttttgcacaatggcttctaccttcacgggtaggggccatttgcgtgttccatggggcggtgctcgccttacgtggtggtagaacccatggggcggtaattggcccatggggcggcaaacatcccatggggtggtaaaaccctcatggggcggtagacgaaaatggctttattctgcggtttcacaatttcttcaaaccgccccatgggcaagttgccgcctcatgggcgagttaccgcctcatgggcgagttaccgcctcatgggcgagttaccgccccatggggtcataagtaaagagtggaatgacagcgtggcgagcatcaagcaaagtagggggcttacgctaagctcggaaagcttgcgtaatttgcgtaacctttgacatgaaaggccactgtgccccgtaataatttcgatgatcgtgacgattccgctgatttccagatgaacgacagcgcggaatcccgcccccttacctttggcgaacttggcgtacccggaccgctggtgcgcgtacttgcggcagatgacaagaagaccgcattccccattcaggccgacaccctgcccgattcactggccggccgcgacattctcggccgagggcgcaccggctccggcaaaaccctcgccttctccattccgctggtcacccggcttggctcctatgattcgcttggcgaaatcgcgatggaggagttccgcaaggaaatcaagcgccgcaagaaggccagcttggaagagcgccgcgctgacgatttcctgccgcacccgcgcggcctggtgctggcccccacccgcgagctcgcgaaccagatcaacgacgtgctgatgccgctggcccacacgttcggcatgaacaccaccacggtgtacggcggcgtcaagtacatccaccagatccgcgatctgaaggccggcgccgatatcgtggtcgcctgcccgggccgccttgaggacctgctgcgccagcaggcgctcacgctctcgtccgtcgaagtcgtggtcatcgatgaggccgatgaaatggccgatatgggcttcctgccgccggtcaagcgactgcttgagcagatttcgcccgacgcccagcacatgctgttctccgccacgctcgatcacggcgtggatgaagtggtgaacaccttcctgcatgatcccaaggtgcacgaggtcgattcggccaccaccgaacctgacctgatgacccaccacgtgttcgagaccacgcgcggcgacaagcacgaactcgtgcgcgtgctcgcctcgggcgaaggccgtcgcatcctgttcacccgcaccaagttccaggccaagaagctcgccaagaacctgacgcagaacggcattccggccgccgagctgcacggcaacctgaaccagaaccagcgtgatcgcaacctcgccgcattcgattccggcgacgtgcgcgtcatggtggccactgacgtggccgcccgtggcatagacgtcggcggcgtggagcttgtggtgcaggtcgagccgccggctgacccgaagtcctttgtacaccgctccggtcgtaccgcccgcgccggcaaggcgggcgacgtggtcaccctcgtgctgcccgagcagcgccgcgagacgcgccgcttactgaaccaggccggcatcaaaaccaagatgatcgaagtgacccacgattcgcccgaagtgcttgagcttgtgggcgaccgcgccgagcgcgtggatggttggagcctcgacaagtcgcagcccgtgggcaacccgcgcaagggcaagaacaggggcgccaagaacgcggcgggcgatgagtccggccgcagcggcaggcgcaagcacaatcgcaatcgcgaccgcgccgagcagaacgttgccgagaccggattccagcacgagaacgcaggcggcgagtttgttgccgaaggcgagccgcagcgcaagcacggcgacaaggccagcaagaaggccgtgaagaagaaccgcaaccgtgcggaacgccgcgccggcatgagcgaccccgaggccgagcgccgcgactatctgttcgagcatggcgatgaccgccgtaagggcggccgtcgcggcggatacggcaaaaaccgttacgacgagcgccaggacgatggccgcaacgagtacggcaagaaccgtcgcaatgatcggtacggcaagggcggaaaattcgacaagcgcatccatcacaagaacgagaaccgcatcgtacgcgacgagcgttcagaaggtgccaagcgtcacgaacgccgcatgatcgccaaatacggcaacacggaaggcccgaaccgccgccattccaagaagaatcgcaataatgcgccattccgtatgaagtccggacgccgttagtccgacagcgcgtatgaatcaggcccgacgacctttgatggtcgtcgggcctgattgtgttgtaggtcggtgttttcgatgcggatgcctgttcccgacatgatgtgtatcaatgttccataagtatgatatattgatatacaacttgatgggagccacgctgtcatccatcatcgggttgttcgacggatcgcctatgcgtgggctggccgtcggactgcgggtcggcacatccggggtgggcatagcgctcggcccggtcatcggcggcatcctgctgcaacggttcgcatgggatagcgtgttttgggtgtgcgccgtcatcggcatgttggccatttgcgccgccttcctgtgcctgttcggtttcatcttcctcacaacccaatggttccaggcgctgcgtgggtattcggcgctcgagacggcgattgccacactgccgttcgcggtcgtcatggcagtgatggccgcaggcatcgccctcgtccagggtcccgccaccgacacactgatgacggccgtgccggtcggcgaggagggtatgggcagtgccgtcaacgacacgatccgcgaactcggtggaacgctcggcgtcggcatcatggggtcgctgcaggccggtgcgtacaccaccggcctgacggacgcgctgcggggatcccacctgccccagggcatccttggcgtatccaaggaatccgtgatggctgccgaatccatctccagctccctgccgggcaccccgcgcagattgctggatggctcggtcgcatccgcgttcatggacgggctgcacatcgcctgcctggcggccatgacgattgcacttatcgccgcggtcgttgcgatcgtggccatgccgaaacggcggtaatggcctgtatgcaccctagaataacggatatgacgcaatcgcagccccgatccaaacgcacgcccacccttgaaatccacgggagaatccttgacgcggcaaggcagatcgtggaacgggacggtgtggacggtctgaccatccgtgcgctgtccgcgcaggccgacgtgtcgcccaccagcatctaccagcacatcggcggcaagcaggcggtgtccgatgcgctcatcgacgcatacttcaccgatctgcgcgaacagctcatcgccattgacgaatccgaccccgtgctgcgcctgcgcagggcgggcatgatctaccgtgaacacgcgctggatgcccccggcatttacgcgctggtctggatggggcaggcgtcggactcggcccagcattgcctggaagccatcacgcagatcattcgatacggccaggcggcggccgtgttccgcgacgatgaccctcacctgattgcatcctccatctgggtgtccatacacgggttcatccaattcgaactgcgttccgcccaaccccgcacacgtggccgcgaacgggtcgaccggtcgtacggttacctgctcgacctgctgatccgaggcattcggcggtgaatggtgagctccctctgatgaggtagctcagtattgatacgctgtactgccgtcggcgttgcggatggtgaaagtgggggattgctcgatgttgaggtccacggtcagggaatgctgggcgtcggcgctcgtcgaacgatagacgaagtgcttgttttccagcttcacggcctcggtacgcgcatccatcagccatgggttgcgacggcgcagcgcgatcagcgcctgatgcagccggtatgtcggctctcccagcgtggacagttcggcaggggagtcggggaacttcggacgtacgtcgtcatcgccgccgaaacgctcctgcttgacgcccacatagccctgctcgtcgccgtaatagatgcttggcacgccgccgaccgtcatgagcaccgccaatgccaacgccgccttggccgggccaatctgcgatgcgatacgcgtcacgtcatggttgccgatgaacgtctgcggcacgaaggaattcaggaacgcgttgtgccgcttgagattccaatccagctcgaagaagttctccgtctccagcgcatgctggatcgacttccatagctcgtattgcgtgatcgaatccatcgtggattcctcgatgatgcgcgggtaatcgccatggatcacctcaccgaaaatccacgaatacgggtgtgcggctttgacctgcggcaacacgcgcgcccagaacgggctcggcacggcatacgcggcgtcgaggcgccagccggcggctccgcgatccagccaatggctcatcacatgggccacatagtcaacggtctcgtcagccgaatggtccagcgccaccagatccccgtgcccctcgaacacatccaaagcgggttcgtcattatcaccgacatgcgcgcggaccagaccatgccacgggttgtcggccggattcaagcgtccggcggtctcgtcaagcgccgcccggacggccggatgatcgcggctcacatgattgaacacgccatccagcaccacctgcaatcccatgtcccggcaggccgcaatcagctggtcgaacgcggcatccccgcccaatcgcacatcgatgtgcatatggtcgagcgtgtcgtatccatgcgtcgccgactcgaacaccggacccagcagcaggccggacgcgcctagatcgcgcacgtactccagccaagggatcatcgcgtcaaggccgcggccatggaactggcgcgggccggcgggcctgatatcggcaccgcagaagcccagcggatacacgtgccagaacaccccgtacttcacccaatcgggcattgtgcggctcgaatccgtgcttacaaccactgtgcacctcctgattgacaccgtgtccattttcgcacacgcatgaccgaatcctcggtagatgacgatagttgtcgatgcaggcgccgaatcgaagcatacgactgtcccgctctgttttcacgaaaggatgcgcggcgcgcagcataacaacaccataaaacccgcgcgccatgggaactacgtagccattcttccgttacaatcagtgtgacggcttccgcccccgaagaagaaggtgttgattccctttggacgtctcactggcgcatttcctccaacaagtgctttccaacccggctctgaccgtcacaacgttgctgacgctgggagtcatcttcgtcaacggctggaccgacgcacccaacgccatcgccacctgcgtgaccacgcgatgcatgcgcgtacgctccgccgtcatcatggcggccatcttcaacttcctcggcgtcttcatcatgacgcagctcaacgcttccgtggcctccaccatcagcaacatggtcgatttcggcggcgacacgaacgcggcgctcatcgccctatgcgcggcgctgttctccatcgtcgtatacagcgtgggcgcctcgctgctcggcatacccacctccgaaagccacagcctgatcgccggcctgtccggagcggccatcgccatccaaggcggcatcggcggcatcaacatgggcgaatgggtcaaggtgctctacggtctggtcgcaagcctcctgttcggcttcgccgtcggctggttggtatgcaaggccgtgaccctgatttgcgctggcatggaccgccgccgcaccaacgggttcttcacctacgcgcagatcgtgggcgcggcggccatgagcttcatgcatggcgcgcaggacggccagaagttcatcggcgtgctgttcctcggcatggcgttctgcaacggccaacccagcgtgaccggtgtgatgattccggtctggctcatgattctgtgcagcaccatcatgggcgtaggcacgtccgtcggcggtgaacgcatcatcaaatccgtgggccaggacatggtgaaactcgagaaataccaaggcttctcggccgatctgtcaagcgcgctgtgcctgctcgtcatgaccgtgctcggcatccccgtctccacaacgcacaccaagaccagcgccatcatgggcgtgggcgcggtacgccgcctctccgccatcaacttcggcgtggtgcgcgacatgatgctcacctgggtgttcaccttccccggttgcggtctcatcagcttcgtaatggccaaactgttcatggtcgtgttctagaaaggaatccacccatcatggcgagacaaaaagacgtgttctacttcgacggattccgtcgcagcgcggactacgcatgccaggccgcgaagctgctgtccgaggtcatgcacgacttcaatccggaccagctgcgcgaacgcatggacagcatgcacgcgattgagaagtcggcggacgaggtgcgccacgacatgatggacgaactggtgaccgcgttcatcacgccgttcgaccgtgaggacatcgacgagcttggccacgtgctcgacgatgtgaccgacagcatcgaaggcgtactcaaccgcatgtactacgacaatgtgaccgacatgcgcgacgatgcggtccagatgtcggatatggtggtgcgcgccacggaaagcatctgcgagctggtcaacgaactgccgcgattccggcattccaagacgttgcgcgaactggtgttcgccatcaacacgatcgaaacggacgccgaccacctgttcatcgagtcgatgcgcacgctgcacaccacctgcaccgatccgctgcaggtgttcgcctggcatgacgtgtaccgtcacctcgaacagtgctccgacgactgcgagcgcgtggccaacaccatcgacagtatcgtcatgaaaaacagctgaggttggtttttcacaacctccctctgatgagccgagccgtgaagaaaacgccggaggtgtttttaggcaagggtgagtaacaacgagcgaataagaggtcagctgcaagctgtcctgaatcgcgttcgaggtggcatcgcgaagcgatgacggagggagagacctacttgaccaaaggcccctcaccgatgggcgttgagccagaggatggcgagttgggtgcgattggtcaggccgagcttgtccagtatcgcgctgatgcgattgcggaccgtgccttcgctcaggaacagtctggcggcgatgtcgcggttatcgaggccctcggcgaccagcgcggtgatctcacgctcacgctcgccaagcaggccctcgatggaatcggcggtatctccggaatcgtcggaatcggcaggattcggagtccgttcggtgagcttgccgagcacttccgcgccgagcaccacctgaccggccatcaccgcctgcagcgcaggcccgaccgccgccacatcctgtttgatgagatagcccttggcgccaagccccatcgcctgcgcgatatacgactggtccgcaaacgtggtcaggaacagtatgcgcgcggccgggtccgtggccagaacctcgcgcgcggcatccaaaccgctggtgcagggcatctgaatatcgatcagcagcacgtccggtcggctcgccggcgtctcgaaataacggcgcacggcggcgtcgccgtcatttgccgtccatagcacctcggccgtgccggtggccgtcagaatcgtctccaacgactggcagacgatcggatcatcatccacgattgcgattctcatcaatccctcgattccatggtccaacgcttcttcggcacggatacgaacacacgccagccgccctcatacggcccgcagaccgcggtgccgccaagggcgcgtacgcgcgattcgatatccgccaaacccatgccgcgcatcagctcatcggccgaaccgcgcatatcggcaacactgtcggcggcgagtcgcgagccgacgagcgtggcacgcatcgcacgcgggcgggcagcggccgtccgggacccatcggactcggacacggccggccccggatcctgaatgaccaactgccagaacgcggggaagtctcgcaacgtcacgctcgcctcgcgcgccgcactatgatgcaccacgttcgacaatgcctcgcgaatcacggtcgcgaaacagcgcgagaccggcgcgggcgccttggcgatgtcgttggccagcgtcacggcgaaaccgggggagatgccgtcgaacgacgtgacggcatcatcgatctgcgcggcgaaatcagtgccgtcatcctcaagatcatgcaccgaacggcgcaccatcgtcatcgcatcatccaacgtcgcacccaacgtggcgaacccttgcgcggcgaccgtatcgttcgtcgcctcggccaccgtcctgccggcctgcgcctgcatgatcgcgcgggtcagcagatggcccacattgtcgtggatctcccgggcgatacgcgtgcgctcgccgagggtcgccatgcgaatcgactgggcgcgttcctcatcgatgtcggcgatgcgcgaacgagtggcccgcgaggattcgcgcgccctgtcctgcgcgtgcagcaacgcgcgccgcgcctcgtccgaggaggcgcgggcccggcccagaacgaatccaagcagggcgaccatcgtcatcaccagcgtctggagacggtcggtgccacgggcgaaccagagcgcgatcggcggcaacacccatatccagcgcgcggcgaccgaaagccacggggccgaacgtattgcatcggcaagggaacggcgagaggccgcggtccgcgagacactgggggagcggccgcttgccgcagtccgtgccccagcccgggctccggtcgaggcgagggccggcagctgtgcagtatcgtaggcgatgagcggcatgaacgcgcaccatgaaggcaccgccacggcgatgacgagatacgccgtacacaagacccaagaccattgcgcgggacgcagccattccaccaatccggcgacggaaacggccaacagcaggccggcgatgaacacgccatcgagccgcaccccgacaagccaggccaaagccaggcccaacacgagcagcaagcccttctcggccaacacgcgcatggcacctccccggctcgacgctcttccaccaccagtctagcggtgtgcggaacacgacgaacttgacgggcgtgcggaattattcgcatgacggtccaagacaacgggtctacacttcccgaatagatgaggcacaagcgtcggatgttgtcgacacaaccgtaaagggatgataccgatgattgcgcaaagccacagggcgtccaactattcgatggacgagatcagcctgatgccggtcgataaggtgtacaaggccatgcagaccgacgccgaaggactgtaatgacaaatgtcacgcctgtgcggccaagtcgtgacgtttgcctgtggcggcgtc

SEQ ID NO: 657 - DNA, 3260 bp, Unknown
  R14_15m  MAG No. k141_13011
attaagtatttcggggttggcatgtcgcgaatggaaagaaagggcagtcatccccgaaatggagacagcttagccgggaaaaaggacgacgccagcatccggagaagatggatgactggcgtcgggtaagctcgcaaaagctctactgaataacccacgcagaagtgtcggtggggagctggccttcgggggtcagcgggccggacgccagcaccacggagccatcgggcagcgcgaccggggcattgccgaagttggtgattgaggtgaacacccgcccgccaaccgccgcgcgggtgtacgccaccacatcgtcgcccatgtccacctgctcggccgtggtgtcgcgcgtggcggtcagcgactcctggcgaatcgccagtgcggcgcgatacagcgcgagcatcgagtccgggtcggcttgctccacgtccaccgcgtaatccttgaaccacagcggttgcggcaggtgcgggtcggcggccggcgtcacgccctcagcgcgcgtagccggcgagaagccgaaggaagcgcccgtgccgaactggccggcggcgcacagcggcacatggttctcgccggtaccgtcatcggccggagtcggacggctgaaatcggccaaggccggctcatcggcggcggtccacggcagcggcacgcggcagccgtcgcggcccttgtccatcgtggcctgagcagtgtggaaagcggtcggatcctccaagtgatcccacggaatatcggccacttcaaacaggcccagctcctcgccctgatagatataggcggcaccgggcaggccgagctccatcaaagcggcggcgcgggcgcggcgggtgccaagctcgcgatcctcgggataggtagtgccgttgcgcagcagccagtcgtgcggcagctggtggtagggcgcgcccttgatctgcggcaggccgtaacgggaggggctgcgcggcacgtcgtgattgttcatgacccacgtggtggtggaaccgccggtttcggccgccgccttgagtccggcggcgatggcctcgcggaactcgtcggcataccagttggcttgcgcgaagtcgaagttgaaggactggcccagctcgtccatcgaagcgtacaggtgctggtgctcgggcaccacccacgcctcggccacggcaaagcgcggcgggttgtactcgttgaacacctcgcgccattcgcggtagatatcgtgcacctcgcgacggtcgaacagcgggtggctgaagtcatgattcagcacgccgaccacgctgtattcgcggccgagctcttccaacggcttggattcgaggtccttggccaggccgtgcgccacgtcgatgcggaagccgtcggtgccgtggtcggaccagaaacgcagggtcttcttgaactcctcgtggatgtccggattcttccagttgacgtccggctgcgccttatcgaacaggtgcagataccactggccgtcggccacgcgcgcccaggccgggccgccgaagaaggattgccagtcgttcgggggcagttcgccatgctcgccgcggccgtcgcggaagatgtagcggtcgcgcgccggggagccaggctcggcggcgagggcctcctggaagaacacgtgcttgtcagcggtgtggttgggcacgatgtccacgattaccttgatgccggcctcatgcgcggctttggccatcgcgtcgaagtcttccatggtgcctaggcgcgggtcgacgttgcggtagtcgatcacgtcgtagccgccgtccgccaggtcggaggggtagaacggggagagccagatggcgtccacgccgaggttcttcaggtagtccattttctcggtaacgccggcgatgtcgccgatgccgtcgccgttaacgtccttgaagctgcgcgggtaaatctggtaaacgacggcctgcttccaccagtcgtcattgaggttatttgcggtcatgccgattccctcctgttccgggtgcgttgtggttgggttgttccggtcgcgcccgaactgctgtgtgaaggcccaaccgttgtattgatgatgacaacgatatcatgtgaattacgcatgcaaaaatcgatttatcggcgttttgcggtggtaacgtgctcacgcctgcgcgggcgctgctgtcgcggcaggcggcgcggtggtttcgcgcagtattagcggagtgtccggccgtacgaatgccggttcgattgacttgccggcaatggcatccaataccatgtgcccggcagtcgcgcccattgcgaacgggtcctgatgcagcgtggtcagtcccacggcggcggacagggtggaatcgtcgaagccgatgatggaaatgtcctgaggtacccgccgcccgtattgacgcaggcgatacagcacgggcgcggccatttcatcatcctcaaaacagaaggcggtgatgctgggggaggcgttcagtacggcgttcaatgccgcgttgctttcgccaagaccgcgttgaatgctcaggggcgttagctcgatccccggatgggcggcagcggcatcaatgacgccctgcaaacgagcctcggtactgtagcgcatattggtttcggtcggtgcgctgccgacgaacgcgatatgccggtggccgagtgcaatcaggtgctcgatagccgaacgtgtggcggcgtaatcatcaatgctcacgcctgcgtcgaacccatcggtggaggggatgttgatgccgacaatcggcacgtgcatatgcttcagtcgctccacttcagccggttcgatgtcgaaggagctgacaatcaccgcatccgcattgcgccgcacgggcaaatccgcaaagaagtcgtggcgctcggcggcgttgcgcatggggtagggcacagtgtcgtagccggaggggcgcagcgccgagtcaagaccggcgaagatgttcgaattgaaccaactggcgatggtctcgctggcaagtagtgcgatacggaacgattggccggattttagggcggcggccgagcgtgagactgagtagtcgagcttttcggccgcggccatcactcggtctcgagtctcgggaagcaccagatccggcttggcgaaggtccgggacaccgtggatacggaaacgccggcctcgcgggccactgcctgaatgcttgccttggtcatatgccgtcgctccttcgccgtcgcgaacaatcattgtcatgacaacgataacatgcccataacaagtcgtcgtcttcggctatctcgattacgaggggctgatttaggg

SEQ ID NO: 658 - DNA, 17000 bp, Unknown
  R14_15m  MAG No. k141_13147
agcaaatcggacaccacatgcacgtcacgaatctccggcacgttcttcagcaccgacttgcccggtgccagcaacgcggcgaccatcgccttgctcacgaagttcttcgcgccacgcaccttgatcgtgccattcaaaggcttgccgccctcgacatgcaacacgtcatccggattctcagccacgccactctcctcaatcaatcaagattcaaaaaatgctaccgtccagtttgccataagccatgtgccgactccgtgaaatgcaccccagccgaactttgatcaccgtgcacaacggatcccataccccccgtcgaatcaaaccgataacgtgatcttcctcacatttgccgccacggtgttctccatacttctacgctacgattcagggcaatggcatcagacgccatggccacaagcaaaggagcattcatgaccacagtcgccgtcatcggctgcacgcacgccggcacgttcgccaccacctcgattctcgccgagcaccccgattggaccgtccatgttttcgagcgcaacggtacgctgtccttcctctcctgcggcatcgccctgtgggtgggcgaccacgtatccgacccgaagaaaatgttctactcctcccctgccgctctggccgaagccggcgcgaccatgcatatgcgcaccgacgtgacgtccgtggacctcgacgccagaaccctcacctaccgcgcgctggacgaggccggagaccccgccgaacagaccctcgctttcgacaaactggtcgtgaccaccggctcgcgcccggtcatcccgccgatccccggcatcgacagcccgcatgtgctgctgtgcaagaactgggatcacgccatcgccatcaaggaaaaggcgaaaaccgccaagtcggcagtggtgatcgggtcgggctatatcggcgcggaaatcgccgagcagttcagcgtcaccggcgtcaagaccacgctggtcgacggccttgatcgcccgctggccaataatttcgataagaccatcaccgatcaggtggcggccgcgttcgaggagcacggcgtcacgctcgcgctcggccagaaggtggtcgagttccgcgacaatgacgacgacaccgtcactgtggtcaccgaaaagggcgagtacacggccgaaatggcgattctggccgtcggcttcctgccgaacaccgacctgctcaagggcaaggtggacatgctgccgaacggcgcgatcgtggtcgacgactacatgcaggcgtccgcgccgggcgtgtacgccgccggcgactccgccaccgtgttctacaaccccaccggccagcacgattacattccgctggccaccaacgcggtgcgccagggcctgctggtgggccgcaacatcgagacgccgaccgtgaagtacatgggcacgcaggccacgtccgccgtgcagctgtacgatctctcgctcgccgcctccggcctgacccgcgccggtgccgaacgccgcgggctcacggtccgcgagacctcgctcaccgaggattatcgcccggacttcatgctcaccaccacaccggtcacgtcgatcctgacctgggatcctgagactcgtaaggtcaagggtggccagttctgttccaaggccgacatttccggcgcggcaaacgtgatttccatggcgattcaggccggcttcaccatcgaccagctcgccaacgtggacttcctgttccagccgaacttcgacaagccggtctactacgtcggagccgtggccatgaaggcggcggccgagtaagacggctgtacccaccgcaaaaaagaaaccccggcgtgatgggcgccggggagagaaaggagagaagaagaaagaggttaagttatgcagcttgttcggccgtgattacatataacagcaacagtttcaatgcaacatgggcactgtctgggaatcgtctgggaatcacggcccgtacaggctgttgcttgtttttggagccgatttaccggctggccttgatcttgtgggccagttcggcgtcccacatcgcgccggtggcggacatcaccgagtccgcgccggcgtcacggtacgcctggtagtcggcgggcgagaccacgccgccgacgccgttgatcgcgaaatcgagcccgagcttttcacgaatcgcggccagacgggcgaccatgtcgaggccggcgccacgaatcgcattgccgcacacgcctgagtgatcgcggcccgcgccgggcagggcctgattgccattggcatcgaccagtttggcggaaatcgtattgatggtgctgaagccctgcacggtgccgtggcccacggtggaacgcaccataagctccagagcgtcgtcgctggggatgtaggcgagcttgaccatcagcgggatgtcgccgatctcctgcttcacggcctcggtgatgcggcccacgagcagcggattgtggcatagcaggcggttgtggccctcgttggggcagctggtgttcatcaccatgagcttggcaccggtctccttgaccaggcgggcggtagtggcatggtcggcgatgtattcctcctcgctcatgccctccacacgcgagccttggaagctcgggaccagcacttgaccgggaccggcggcctcgatggcggcgcgcatgtccggctgccagacgtcagggctctgcgagggcacaccgaagctgttggagatggaaatcggctgttcatagttggtgtcggccagcacgccttcgtccagttcggcgctgcccggcgtcagtgaaccgtccgccgacttggggtgtacggcgagcacgttcgggaacgggttgcagccccaggcgcgcgaacgcacggttttgtaggtcgccagatcgaaacccatgtggaaagcggccgtggtgaaacggctgttgagcagcgggcctgcgggaatgccgaaaggcaggttgaccggctggcccaaaaaggtggccaaggcaccctcggaggcaccctcgctggtggttccggcggcatcggcaccgttgccatccttcagcgcctcggcgaacgcgccgaacggcccttgctcatagttgtcttcgtaactgcggctgacatcgtaaaacggctcaaaatcactcatgcttcaacgataagccaacctgcatgcgcacacgcacactcaacccatcatcgcgccgacaaacgaaataatggcgaaagcggcattggctaccacaaagatgatgaacgtcggagctgcccagccaaagtacgtgtctggaatactacgattcgtacggtgatattggcgcatctctttgccgtatatcacgaatatgataatcgatccgatcacgccgatcacagatagcgacaatgagaatatcaaatatgcgttgtcatcaagatagttgccggcaagggtatcgatggcgccggaaagaatcgcattgttgaagatgtgcagtgcaatcgaccaaaccaacgagtattccatggccacgaatcccagaatcaggccaaagaggaacgcgaatgtgccttgcactacgtcgtcatggaacaggccgaacaccattgccgaggtgacgatggcgaagttcttgcccaacggcttgagctccttcatcagtacgccgcggaacagtacttcctcgcaaatcggagcgaccagcccaacgtacagccacatgcttacggtgacgctggattcggcgatgctgtctgacgtgggagaggcaagatcggtgcccagcatggaaaaagcgacctgcaccaacataacgatgccttgcacgcccatgcccagcacgatgaacatcaacgcccagagaggctgcatgcgcccgccgccatattggctgatgtggccaagctgattgggctccccgtacgagtcgcgatgctggccaccaagccagaattcgcaggtgaagatgtcacggtggcgcatgagcagcagaaatccgaacgcgacgaacaccgatatcaggctgatgatgccatcccactgcacgccggacaaatcgctcgcggttattacgccgacgataatggtggcgaccattgcgcccaagagcatcatgccttcataggcgagagtcagtcccattacacgattgaccaccttgcgacgccacgtgcgccatacacggcgaggatcgatcggcatgaccacgggcattgctgcgggcatcgtggcaggcattgcgttgggcattgtgactggcattgccggagccgtttgcacgaatggttgcggcgcagcggaatagggttgtggcgcgtagcccactggttgagcgtagtacggatgagcgaggggctgtggagccgactgttgcgccgggtatggggaataggcggattgcgccggatacgtcggctgcgtgggatacatcggctgggcaggatacgtaggttggacgggatatgtcgggtatacgagctgcgcggcgtattgtgcaggctgcacagcaggtattgcggcttgcggcacaggttgtgaaacaccttgtgaaacaatccgtggaacaccccgtgaaacatcttgtggaggtagcggttgtgcccatgcctccggctgacccgcatattgcggctgcatgctcggcccaggctgaacatactgtggcgtctgtggcatcggcgtctgtgactgtgccgcagactgcggtgccggtcgaggtggcaacggttgcgctgacagcgattgcgccggagccgtatcggaatcgttcgacggattcatgtcattcatggtcatgatgctcaacctaaccgtcattactggatgaatcgtgattatgtccacaaatgtgtacgaattcaggcacagtatttcgaacgctaggacggagttcatgagtgttgaggaaagcgccgccacgccggtgttggtggctgcggtggataacgaccgtatggcgttgttggcactgaagggaatattgccgcaactcctgcccgccgcgcaatggatgtggggcgcgggcaccagtgagacctttgtttgatgcgatgcgagcgacccaataatctcaatcagacacagagccaacggccctgggcctgcaattatggactcgcctttcggcgaggctcaatgctggcctcgctgctgtcgcggctcggcacagggcctgctgaaagcccaccgggctttcagcaggccgatcgcggctaaataatgccgcgatcggccaacggccctgtccagtctgcgtcctcaggctcgcgggcggactcgattctttcttcggcccagtgtttggcggggatggtcttgggcttgaaggggaacttttcggcgcgcatcttttcgtaggcggcgatgtcgtcctcgtgctgcagcgtcagatcgatatcgtcgtagccgttcatcagacgccaacgcacgtaatcgttgacctcgaacggcagggtcacgtcgccgcaagtgacagtgcgggtctccagcgagacagtcatctcacgaccaggctcttcctccagtagcttccacaggagttcgacggactcctgcggcataatcgcggccagcacgccgttcttggcggtgttgccgtagaagatgtcggcgaagctcggcgcgatgaccacgcggaaaccgtaatcgtgcagcgcccacacggcgtgctcgcgggaggagccgatgccgaattcggggccggcgaccagaatctggcccttaccggcgtattccggcttgttgagcacgaagttcgggtctcggcgccatgcgtagaacagggcgtcatcgaagccggacttggtcacgcgcttcaagaacacagcgggaatgatctggtcggtatcgacgttggagcggcgcagcggcacgcccacgccggtcagtgtggtgagtttttccataacaattttcctttcggggatctctcccccagtcagtcttcgactgacagcccctcgtcagagggggctcacgtgtattgactcagagatcggcgggagacgagattgtgccgcggatggcggtggcggcggctacggccggcgacgccagatgcgtgcgcgagcccttgccttggcggccctcgaagttacggttcgaagtggaaatcgagcgctcgttcggcaccagcttgtccgggttcatgcccaggcacatcgagcagccggcgttacgccattcggcgccaaagtccttgaacaccttatcgaggccttccttctccgcctgcaaacgcacgcgggaggaggccggcaccaccagcacgcggtggatgttctcggccttgcggtggcccttcataatcgcggcggcctggcgcaaatcgtcgatacgaccgttggtgcacgaaccaatgaacacggtgtccacggcgatgtccttgatcggcatgcctggcttcaaacccatgtatgtaatcgcacgttcggcggcggcgcgcttggtggcgtcggcgatcttgcccggctccggcacggaggcggtgatcggcagaccttggccggggttggtgccccacgtcacatatggaccgagcttggtggcgtcaatatccaccaccttgtcgaatacggcatcgtcatcggtcttcagcgtcttccagtacgccacggcctgatcccacagctcgccttccggcgcgtgcggacggcccttcaggtactcgaacgtggtctcgtccggcgcgatcatgccggcacgcgcaccggcctcgatggacatgttgcacacggtcatacgttcgtccatggtgaggttgcgaatcgcctcaccacggtattcgatcacgtaaccctggccgccgccggtgccgatcttggcgatgatcgccagaatgatgtccttggccgtcgcgtccgcgggcagcttgccgttgacgttgacggccatggtcttgaacggcttcagagacagcgtctgtgtggccatcacgtgttcgacttcggaagtgccgatgccgaacgccagcgcgccgaacgcgccgtgcgtcgacgtatgcgaatcaccgcacacgatggtcatgcccggctgggtcaggcccagaatcggggcgaacgcgtggacgatgccctgatcggcgtcgcccagcgggtgcaggcgcacgccgaactccttgcagttcttctccaaagtcgtcaactgcaacgcgctcgtctcatccgggttcgggcgatcgatatcaacggtcggcgtgttgtgatcctcggtggcaatgagctgatccacgtgacgcggcttgcggccggccaagcgcaggccctcaaacgcctgcgggctggtgacctcatgcatgagcatcagatcgatgtacagcaaatcaggagctccgtcgctgcccttgcgcaccagatgatcggcccagaccttctcggccagtgtcgttcccatagtgattcctccaaaaaattccgcgcgaggtattgtgttcgcgccttgttcgtggtattagcctatgtgcttgcgatgggcccggccatgagcatgccggatattgagatacggtcaaatgatggcctcaatatgactcggacccgactcgaacatgacctagtcatgactcggttccgctccagacatgtctcttcggcatccacgaacgccctttcaacttcatggccaccctgtgagacacttccccaatttgccatttcactatgtgagatggcataatcgcccttattatgactgattcccgggaagaaccattgaacaacagcttgaccgagtccgagccggttgaagacaccaccgccaaggacgatggggaaatccattccggcgttggcgtccttgataaaaccgtaaagattcttgacgcactggaatccggcccgtctacgctgggccagcttgtggccgccaccggtctcgctcgaccgaccgcacatcgtttggctattgcactggaacgccaccgtttcgtactgcgcgaccagcatggccgattcgtactcggctcccgtttcgccgaacttgccgccgcagcaggcgaggatcgtctgctgaccgccgccggcccgatcctgcagaccctgctcgatcgcactggcgagtctgcgcagatttaccgccgccaaggcgatcagcgcgtgtgcatcgccgctgtggaacgcacctccggcctacgtgattccattccggtgggtgccatgctgtcgatggaagccggttccgccgcccagattcttctggcttgggaggattccgaccgtctgcaccagggattgcgccacgccaagttcaccgccaccaagctggccgccgtacgcaagcgcggctggtccgagtccgtgaacgaacgcgaagagggcgtgtgctcgatttccgctccgatccgcaacgcctccggccaggtcatcgccgccatctcgatttccggcccgaccggccgcatgggtgccgcccccggacgccgctatgcgccgctggtgatggccgccggcaagtacctcaccgaagcactggtcaaagccgttcgctgaaacataccagtcaatccaaccgatagcccaaccggcagaaatcccgcgtcacaacgaaagagacgcgggatttctgggctataggaacaagagtgtggtgttcgcgcaggatgggcaagatcgggtagccggcggtggcgatggtgacggacggtccgaacatcgtgtagtcgccgatccatatctccgcgtcgtcgaccatgctcatgaacgcgttgatgtagatgactttgccgaggtgtacgcgacggcatccgttgctcgcatgcaatggcgtttcgatgtgcacgccgtcgccgacttcggcgcacatgtctttgagcagttcggcgcgccgctcccgttcggtgggtttggtctggttgtattcccatagtttgttctgccatgcgagctgtccgtccatgatggccgggtcgtcgtagtggtaaggcaatcccgcatccctgcgcgccgtattgtccatgtcgtagtcccttccgtatcggttcatcggtctcggcccatcccatcgtcctttgttcgggccggaacgcacacggcctttctcaccagcatgaggccgcccgcgctgaccgattcccatcgcaacgtcgccgcacgcccccacctcgcgcgccgtccgacacggtacggagcgttcccgatgcggtacagaccagaccggcaatggccacaggacgttccctctgacgagacgatgccgtaggcatcatgcaggtaatagcgagccgacaaaacgcgcgcagcgcgggttccctctgacgagggagctgtcggcgaagccgactgagggagagaccgcggccaaaggccgcaaaaacaccgcatcggccgcaggccgattcctatgaagacaaacacgccatgaatccgcacagtgtaggatagttgacaacacgagacgctataaggcaaggtgctcaatgacgacacaacccgatggaacatatgagatgatcatcacggccgactcgattcagtcgaatgagcccgataccgattcctataccgacccttccttcttcgccaacatgggaagtgcgtatacccccgaagacgtcaagttcaagcctgcggacggcgaaccaatcgaacgaaatcgtaacaagggagaacgccggatctcatgtcagacactgccacgtctgacctgtcaggtattcgaagataagcttctcgaattgccgtacgacaagcgcgagtccttccccatctgtcggtacggtctggataagccgctaatcaccggcatcttccccgatgaggaacgtttcagaagcggctgcaagaactcaatcgaatacgtgcgttattggcgcggaacggatgtacagatgtatctctactgctggaacatcttctcgacgctattcttcgttcaggagtgtctgaaacgcttcggcaaaccgaatgacgccttcatcttgcggtatcgtcgtaagacctcccaagaagcctcgaatgctgacgcttcggtagaagaagaaaaaggttacgcttcacccgatgatgagaagtcccctgtctacaacaataagtattcgcagacactgttggattccaagaacatcatcttccgtggcgctcccggaaccggtaaaacctatcttgcccgccaaatcgccgccgatatcgtcagcgacggcaagcgcggcgattggtccaagcttgatgatgaacagcgcagacgcatcggtttcgtccaatttcatcccagctacgactacacggatttcgtggagggcatccgccccgataccgaggagacggatgcgacgggaactcacggcttctccatccaggacggcatattcaagcgtttccttgacaaggctcgggacaacgtcgaacagtcccggctttccaaggaggaacggagggaaccatccgttcgggaacgtctggacgcctactttgattctcttgatttcgacgacaatcagttcagaatctcgactggtaagcctttccaagtaaccaacgtcaccgaacatcatgttcttgtgtacgctccccacggcatcaaacaggaattaagaatacgcgtccaagaccttctggcgcttatgcaatccagcacccctccaacaaatggtgaagacgtgcatcatattctcgagcgaaagcgtcgacagcgggaggactcctatgcattcgccttgctacaggaaatccaaaagcacaagccttcgtcggcttcacgagcatccgaaaaggttcttcggaaacccttcgtgttcatcatcgacgagatcaaccgaggtgaaatctccaagatattcggcgagctgttcttctccatcgaccctggttatcgcggccctgccggcaatgtgaccacccagtacggtcatgagctgtatgtgccggacaatgtctatatcatcggcacgatgaacgacatcgatcgatccgtcgacacctttgatttcgcgatgcgccgacggttccgcttcatcgaggtcaaggccgaagacgggttggacatgcttgaagaacttggaggcttgtcggaggaagccgagagccgcttgacgaaactgaatgagaccatatcctcccccgatatcgatttgggttcggattaccatgtcggccctgcgtatttcctgaatctttccaaatccgaatccacggcgaaagcgttcgatgacctttggcgtgatttcctgcaaccgctattgcacgattacgtgcgcggcatgtataacgaaacagaaatcatggagaagctgaaagcggcatatgaagatgcttcggattcgccgcagccagcggaacggtcggtatgagtaccgtatcgatcaaagacaactcccgcattgaggcaaccacgctggctcccgtcaaggatatcgtcgcggctgtgtccgatcgttccatagcccggctttcgcaagaaggtctgctggtgttcccgcagtcgattcaggattctccggacttggacgaatgccagatggtattggaaaaggacagtggaggctaccgctcagggaatctgatggggtaccttggctatcaagacgaacagttggtcatcgattcacgttttgcctcatccgcaggggatttcttcctgcaatacatgatgtatcgtgtactgaatattcccaacctgtcaagcctgagtattcaatccgatttatcgacgagactgttccaattccatgtattcatgtttccatactgtttacggggagctttaagacaagggatttatcggacatacattcagcacaagtacaatgacagccacatccgtggaagaattgatattccacggcatatcaccactaatattcctttcaccggcaatatcgcatatgatgtgcgcgagcttactgcagacaatcctctcacacagctgattcgtcacacaatggaatatatagcccttcaaccgtacggttccacgctattaggcaatatccgcaaggaggtacgttacataatcgaatgtactccctcatatcgtcgcgcaaaccgcagcaccgttctggaatacaatctcagacatccggtcaatcatgcgtattttacgcaataccgcatgctgcaacaattatgcatcatcattcttagcaatcagcgtcacgcgttcaacggtcaggaaaaccgacttcatggcattctcttcgacggctcctggctatgggaggaatacgtcgattccctgattggcgatagcttcttccatccgcgaaacaaattgaaagaaggaaaacaacacctgttcgaaggtggcacaggccctatctatcctgatttcatcagccgttccaaacaacatcccatcattgcggacgccaagtacaagcctatatccaatattcacaaagaagattactggcagattctggcatatatgtaccggtttgattccaaactcggcatcttcctctaccccgatgcgaagcaaacctcacgcaaggagctgcacatgctgcaaggaacgacgttccacggagacgtcaaagcacgggaggacatcatcgtggccaaactcggactgtcgattcccgatacggccgtcgactatgccgatttcatatcccgcatgtcaccatgcgagaaagcgtttcgaaccggattgctcaacaccttcaacacgtattgacgccgtaagtcgaacattctattccacgcgcctgcatggcgcgggatgatgaggaagcggtacaagccgcgaggaaggagccgacatgttattgcgaccatcgattcgaatcgtcgttccccgacgagacacacgacatatctcgaacgcctaagacacccaatacgtatgaaacgtttggagctccccaagttcaagcatcggaacaggacgaccgcctgttcgtcatgttccatgggtacggcaatgacgagcgtgagatgatccgcatcatcgacgctgtctacgccgccgcgagtgctcgcgcatgggcgacgccgtcgtctccctgctcgactcccccatgttcgcaggccgccgcaagatcctcgtcgggttctcccagggcggctatatgtcgtatcgcatggtgctcgagaatccgcacgtgttcgacgcggcgatcctgatgagcccgtcgttcaagggcgaggagtcgacggacctcaccggtttcgactcccccacctatttcctgctcttgtacggctcgcgggaccgcacgattccacctgcggaccagcagaccgcgcgtcgcgtgctcgaggccaccggccggctcgaataccgcgagtatcctggcatgggtcagccatcgtcgacgaggagatcggcgacatccgcgccttcctcggtctctagccggttccggacggaccgcccggttccgctcggtccgtccaccccgccatccgaccatccgtcacacacgtcacgcacccgtcaccgcccgcaatcggtgtcggcggcacgcgtcgccgccgtcacacgccgaggctgcgtccgatgacgccgaggaacgtttcggcaccggcacgcacgttctacggttgcacaggtttcccgaattgcgggtactccaggccgtgcaggtgatttcgacgtgaacggttcccgccgcgtagactgttttctccggaccaggcgaacctcctgcgtcgcaccccgaatccgtccgcaacggctggcatcgccatgccggaccttgatccaatcacacccgcacggcatggcgcacgggcccttccggggcgcacttgcgccggcggaccgccgcaatgccgccccaaccgcacaggagcaccgccatgcacgcccatgcgccggcgctccggccgtcatgcagatcggtcggatcgggggcgggaacgggcatgctcacacggtggccggagaccaggagccgatgggagttgatgccgtatggcgtacaggtcatcagcgtcagccgatcctgcccgggaacgatgcgcagctgtgaggtatcggtcggttcgatcacggtgatgcgatcgacctcgtaggccagggtcctgttcatcgttgagatgtatatgaaatcgccttcgcgcatttcatccaatctggtgaacatctgcgcctgcaccatgccgcgatggccggtgatgaccgcatgggtgtcgttgccgccgaccggcaggcttgtgccatacagatgcccggagccaagggacagttgcttgtctccggtgccgtggtagatgggaagatccactgagatcttcggtatggacacgcggcccatgatgccgtgaccttcgttgagcagcctgccgtagcgttgatcctgcgccgactgggaggacaggcgttccccattactgaacgggtcggcctgggctcccagcaccggctgcccggatcggacgagaccgcggttgtaggcacgcgccgcccgcagtttgtcgtcgatccggctttccggccatagtcgcacctgctgttcgacggaagacgccgacgcggacatggacgtctgcgacgcatactgcatcagcagcggaaccaccgtgcataccaccgccacggcgatcaaaatccccgcgacggcgtacatcacacgcaatcgccgctgcatacgggcatgcgcccggtattctttggcaacgtcgaccagctgctcgaacgaaggtgccaccggcgtcattcggccctatgttcaggccgcgaagctacgcttcgttttgcgggcccgaacgatgatgatcgaagcaccgccgatgcacagcaccgccacgacgccgaggatggccatgcccatggcaccggtcagcggcagctgggtgatgcttttgacgttgcggtacacgtaaccgcgatcgccattgctcagcagcccactggcgggaatgctcatgtcggtgatcgactccaactggatcgtcccctggacgttcttcatcgtgaccttcagtttggctgcggagccggaccaatagccattcggcaccttggtctccttgaggtaataggtgccggcattcagcttgaaattgctgaaatcgacacgaccgccatcgccggacgtggccttgacctctacgcccgtgccatcgtgcagaatctgcgtgaagctctcgtcggagtacacggtgaattcggcgcccgacaaaccggtcttttccacaccgaccttggtgaaatggaagccgccgcgcgtggtcgtcgtggaaccggtcttggcgtccgcaccggacgccagatccacgacgccctggttgttcgacacgctgcagccatcggcaagtggggtgccgacgagcatgttgttgaagcccgcatactcaacggtggtatcgcccgtgtccttgatctgctgcttgggcatcgtggcatcggaaatcacatacaggccgggactgggcatggtgagcgtcatggtcttgtttgcgtcgtcgactttcacctgtgccacgccaagcgcggtgccggtgacgcccggcttgtccgcatacctgcggataagcatagagttctgagtgttggcgagccagttcatcggatcgccatgctgcgcctcgctttcatacagcggatcgcccgtattggcatgcagatctttcaccgcctgcagaatggcctccttcgattcctccaccgtctcaagatgcaccgagccgccggacgcgccatcaccgatcctgtagtcggcgactttcgccacgctgaacgtacgattgcccgaggaggtctttccgttccatgtcttgaacgcgtccgcatccttgcccttcaccgtgatggtcttgctcgtggccgtgcaagacgcggaagactgcgcagcacccggcgcacccgcctcttcggccatggcgctggccggtgcggtcatggccgcgaacagtgtggccgccgcagcgactcccgccatccatgattttgctttcattgttctcctccttatggaatatatggatgaatccatattggtcatacggaacggttcccgtatgaacgttttctgatatgcgcggcgattgccaacaccgccaacgcccctccggacgccaccatgccgacaatcgtcaccacccacgtggcacgacgccccgcggagggcagcgcggaaaccggttgcggccgattggtcagacgattgtccgtaacaccggaccaatcaccccgtccgtgcagtacggctttcgccttgggatcctcctggcgaatcgtgaattcggcccaggtacggtcgctgtcgggcaaccggtatccgccgggcgcggtgatctccgtcagccggtaggtaccccagtcgagattgtcgatggtcagtttgccgacggctggatccttgtctccggtgccggcacaggcggcatcaccgtcgcccacgcaatcggcgaagttatagagggaatcgttgaccttgttccacgtaccgtcatcgttgcgtcgttcaagccgccacgtggtgccggacagatattcctcgtgatggtcggcatccaccttgctccacgacaccgagccggtgatcttcttgtctcgaatcgtcaccgtatagccaccggtccattgatgcaccgacgcatgcggactgccatccgcgttcgtcgggccgaaatacgcgcctccgccgcaattcgtcagatagaaatcggtctgctcgtcgttaatctcatagccgagcggcgcttggagctctttgatccgatacgccgtgccgcactgcaacccttgggttttgccgacgacgatcatgcctttctcgtccgtcaccgccgtaatgggcgtgggcttgctcgacgcatagtcatggccgtcccattcgagcagttcgaatttggcgccggccagatcccggtagccggacgcatcatcatcggttttatgcaacagcatcgtcgatgtctgcacgatgacgccgctactgctgatggccgcgccgttcgtattgaatgcgccggcatcggaccatggcgagttggcgaattgcgcggtgttcgccacgtcgaatccggcggagcctttgaacccgtactggtagctgatggtcaccggcgtggaatcgggaacgtacaccgtcaatacgccgccgagtttggcatcgttttcctgatatacgatcgcatccgaggatggttggtacgttttgccggccgggcagg

SEQ ID NO: 659 - DNA, 15331 bp, Unknown
  R14_15m  MAG No. k141_13384
acaggtggaacgagtcaccttcgaagtacgatgaatataccatcccatctttgacggattctgctcagtcacatacactcccacctgcggatgctcttcactgctcggagtctgtgcagtaaagcctgcatcactaatggttttttcagcagtctcatcaaatgcatacatggagaagtggcggccttcggccatgctgcccatgagctggacgaccttggtgagtttagtcaaatcaacattgctgaacatactaccgactgtttgttctgcgactttagcaaatagggcgtcctgcatggagactgggtaatcgacatacaccttgttcaacaaaaactcagcagtgttatctcccgtaagcaccgttccatcaggaatagtgacattaccactgattttcgtaagttcctgcaaaaatacaggatcaaccatgagcacgccgtccaactgagtattgctcccccacggcgtgcgctgccaaatcgcgcgcataccttcggcactgcgtgaagtatcagggtatacggccaaatctcgtatatcgaacgacatgttcaatggtccccactgccggaagatgcgctgctcgtctcccgtaggatcaccagcaccatatggaatatattcaccattcgaacggaaatcgccaatattgattttgccgttgtcagtagttaccacacctacggaaccgatcagaccgccggacgaacgttcctccgaagtggtcatagccatcaacgcatacgtgcgcggctgatcggaaccgaggaagttcggcagaatctggaacgtgccggatagctgattgaccttgtccgccatcttggtcagctgcgtattgccggcggcataggcgttcttcaccatgccgatatgggccttcggcagctgctgatacttctgcacctgctgctgcagtgactggttcgcggtggcaatattcttctgggcttccagaatcggctgcagattcagctgaccgtcgcctgagctgagctgtgcgctcttcagcgtggaaagcacgtccatgaactgcggcaccgaatcactgaccagcgaatcccccaccgaagtcataccctgcactgtggtgatgtcaccgccgtacaccggcgccttcgaggcgatgttccacagcgtgccgtgcgcaatctcgttcgcagccgcggtctcggtctttgcctggctgatctgctggctcaccgtatcgaggttgtcgaggttactgaggtcggttacaccgcccagcagctgcatcgcctgttcctcatgcgcctttacctgcttggcttcggaatacagcttcaaaccgaagaatccgctcacgcctagcagcaccacaagtagcgccagaatcaacaccactcacggccagatgcggtgccttctgcgtggaatacttgttgcgtgacttgccctatgaacgctcatactaacttccaaactggtcttattgacttgtaacctcttgcaataaccaaccgcctattatgccccggtcttgtgcacaaagcgtgttcgtcccccgcttctgcacatattccgaaccgactggaccacccctgggtatagcgtattggggtgctttgagaggctgctcggccaagcacgcgaagacgacggtcgccgaatacatcgaatacgcattgatatgcgaggcgcatatatcactgaacagatacgccaccgacaccgccaaggcaacaggccgagcaacagaagtgggggagtgcgtgaacggagctcggggaatcaaaaatcgtcgcggcgaactgcagcgggtgctgagccgcgaggaatcatatgtagacggcaaactcagccgggcggcgttcatctccatcgcgatattgacctttattaccttcgtgggcaacttcacgcagttgcagctgagttccgcgctgccgattatcgtttccgaattccacatctccgtaaccaccgggcagtggctcacctccgtgttccagctggtcatgggcgtcatggtgccgctgaccgcgttcctgacccgtcgtttctccacccgccagatcgtgatctgctcgatggcggtgttcacggtcggctccctgctggcatggttggggccaaacttcgtatgggtgctggtcgggcgcgtgctcgaagctgccggcacgggcgtgatgtggccggtgctgcagatcaccgtgttctcgatctacccgctgtcccgacgcggctttgccatgggcacggtgggcatggccatgagcgtggctccggcaatcggccccaccttgggcggctggcagaccgacgccaacggctggcgttcaatcttcctgaccatgaccatcattggcgtagtctcgctgctggcggccatgttcggactgcataatttcggctcgcatgacccgtctgcccgcgcggactttttctcggtgagcctgtcggtgattggctttggcgggctgatgttcggcttcaccaattcggaggcctacgggttcgccgcaccggtaacgtgggggcccatggcagtgggcctgattggcattgtctggttcgtgctgcgtaacctgcgcgccggcaagcgctatcgtgaggccgtagccaaggacaagtcggcactcccccagccgccgctgctggacttggaagtgctgaagaaccgttcgttcaccgtcggcaccattaccgcgtcgctggcatttttcgccttcagttcgattctggtcatcatgccgctctacatccagaccgaccgtgggtattctgccacgatgagtggtctgatcatgctgccgggcgctatcggtcagtgcatctcccagttcttcggcggccgtgcgatggatcgattcggcgcacgacccgtggctttgttcggttcgattgtgttgacccttggcaccttgggcatgtcgctggtggcgatggatacgtggatctggtgggtatcgatctgccagttcatccgtcagatcggcatgggtttcctgctgatgccgattaccacgtggtccctgaattgcctgaacgggccgagcgaagtgtccgccggatcatcggtgacgaataccgcgcgtcagattgcgggcgctgtgggcgcacccgtgttggtgattctgatggaaacgtttgccgctttgcataagcagggcggcgcctccgccgtcgccgcttcgattttcggcattcaatggacgctgcgcatctccgcaatgatctgtctggcaatggtgttgatggtgttcttcggcgtcaagggcgacggtgccggtcgtacgcgagacattatttccctgcgttcgctgcgcgaacggcgtgcgcggcgtatggctgcgaactgacggcagattcaaccattctcaacataataagaaaccccggtttccaacaccggggcttcttattatgttgtgctatcgcaggatttcagctggagtctattacgccctgcccatcagcgtcaggacaatcagcagcacgttgagcgccacaatcagcgccacgacgatcataaagatcacgtgcttgacggttccatcagcccacttgcccatgagttccttgttatgcgtgtaccgcatcagcggaatcacggcgaacgggatgccgatggaaagcaccacctggccgatgaccagcgcctgagtcgggtccttggcgaaccacagcacaatcagtgccggcaccagcgtgaccacgcggcaggcccacatcggggcgttgacgtgcagcagaccgtgcatgatctccgagccggcgtacgtgccgaccgatgtggagctcagcgacgaagccagcaggccgatggagaagatcgtgccgatcaccgggccgagcacctgcgtgatcgcccgctgcgcgccgtcgatggagtccgtgccagacatgccatgcagcgagttggcggcgagcaccagcatcgccagattcacggtgccggccagcaacagcgcccaggccacatcgattttcgagcctctcagctgcgttttgattgacggcttttcgccgcctgcgtaatggtcgttcaccagcgtggagtgcaggtagatggcgtgcggcatcacggtggcgcccagaatcgaggcggccatcaacaccgagtcggcgccttggaagcgtggaatcatgcctttgaccacttcgccggggttcggcggggctacgaacaggcctgcgatgaagccgaatgtgataatcagcagcatcacgatgatgatgcgctcgaatgtggtctgtgtcttgccgccttggaaccacagcatcaccgtggagattacgccaatcgccaaaccgccgatgaacagtggaaatccgaacagcaggttcagggcgatggcgccgccgatcacctcggccagatcggtggcgatggcgatgacctcggcctgcatgaagaacatgaagcggccggcatcgctcatacgctcgcccagcagttccggcagggatttgttggtcacgatgccgagtttggcggactgatactggataagcacgctcatggcgttggcgagcatcagcacccataccaacaggtagccgtatcgtgcgccggacgtgatgttggccgccacattaccaggatcgacgtaggccacggccgccacgaacgcggggccaaggatgctggccagcgcatggtcatgcggcttcttattgttgttcgtccctgctccggccccggttccgactccggcaagctggcgttccttctcgatttccggtgtttcctgttcgatgtctgccacagcgttcgtcatagcggttgccgcagtggtatctgccacggtgtgtgttactgccatattgtttgtacctgttcccttcataccgcgcacagttatagcgcaggcatgtttcccgcgtcaacagacggacaatctgcggacgattgatggatgaccggcggactggcagctggcatctcccgccatctcgctcatgaaatgtgaaaaaccgccgaaaactcgctcatgaaatgtgccagacggtagaaaactcgctcatgaaagtgtaaaatcattgatatagcagtaattcggaaaggggctcctcatgtatctcaaacgcaaagccgatgcctatctcaatgcatggaaatccgacccgaatcgctccccgctaatcatcaagggccctcgtcaagtaggcaagacagagactatcgattactttgccgcacacaactaccgttcggtagtggaaatcaacttcgttgaggaaccgaaatatcgtgcaatcactgcggacggttatggcgcgaataccatcgtccgcaatatttccctgatcgacccagccaaaaagttcattccgggcgatacgctcatctttttcgacgaaatccaggcccatcctgatatcgccactgcactgaagttctttaaaatcgacggcaaatatgatgtgatttgcagcggttcaatgttgggcatcagctataagcaaatcgaaagcaatagcgtgggatataagaccgactacgaaatgcgatcgttggacttcgaagaatttctgtgggctcgcggatacgatgaggccgtcatcgaaagcatgttcacccacctgtgtgatgctacgccattctctgaagtggaaatgaacgtcttctccacggcatttatggattactgcgtgcttggcggcatgcctgcggttgtcgcctcccatatacgcactggcacgttcgagggaacactgcaattgcagcgccagcttattttggactaccaggaggatatccgcaaatacgcgcaaggacccgatcaggcacgaattctcaacgtgttcaaccatattcccgtgcaactcgccaaggaaaacaagaagttccaaatcagcaaggttgccagcggagcgcgtttcaaagactatcgaggatgcgtggaatggcttgaaacctcgggaatggtgaatatctgccgatgtatgtcctatcctgaactgccgttgaaaggcaattatgacgaaaacaagttcaagatatatttcggcgataccggtctgttcgtagcgatgcttgacgacgaggccagtgatgatctgcgggccaatcgtaatcttggtgtctataagggtgctatgtacgagagcatcgtctctgaagcgctacggaaatccggctatgacctgtactactacaaaaaagaggattccacactggaacaggatttcttcgtccgcacgcgcgaatggctggtgccggtggaggtgaaatcgaaaaaaggcaccgccaaatccatgcggacgctaatcgcttcggattcttatccggaaattcagttcggcgtgaaactatccgccggcaatatcggtagcagcgaacacgtgttcaccgcaccatacttcaccacatttttgctccgacggctcctgcgcgcttatgacgaggggcaggcacctatgctcaacaatcctgagcggtagcccctattcgtctgcgggcacggcctggcccgggcaggtatggaggacggcgagcatggcgtccttttcttgggaggtgacggtgagctggtacttgtctttgacgccaatctggcgggccacgtagtcgcaacggtagtcggcgttggtgggtagccagtaggcggcggaagccgaacccttctcctgattggccggaccgtcgacggccagcaggttataggggtcattgccgaattcatggcgtttggcagtggaccagtcgtgcgcaccggattgccaagcgttttcaagggccaccacatggtcgatctgcactttggcgctggtggcgcggccacgtacgaaatggatggtctgggcggtgtacggatcggccagtgtgccggactcgaccacacaggaaccggcgtatttgtaggtgatgtccgtgagatcgcgggcgagcacgtcgtcgcgtacgtcgcagccattgccgtcgacgtcggtggtgcggaaaccgaaggaatcgcggtcgtagccggaggagctttggttgtcgtctacggcaagcgcgttcaaagtgtcggcggctgaaccggtggcagtgtagccaccggtgattttggccacgtcggagctgacctgcggcagtaacaggccgatggtcacgccgattgctacggcgagaacgatgagaatcagcacgcgctccagcggtccagaggcgttgaaacgacggcggaagtgggcgttacgacgtgccatcaatcacgcataggtgaaggtgagggggtcgtggccggcgcgggtggggccgtcgagggcgtcgatggcagcgtgttcatcggcggtcagggcgaagccgaacaggtcgagattctccctctgacggtcggcatgcacggacttggggatgatgatcgtgccgttttcgatgtgccagcgcagaatcacctgggccgggctgacctcatgggcggcggcgatcttctcgatggtgccgtcgccggcgttgaggtcggcgccacgcgccatcggcgagtaggcctccacggcgatgccgtgcttcttgcagaacgccaccacttcgcgctgctgccacgtggggtgcagctcaatctgattgacggccggccatgcgccggtctccccgtgcagacgcttcagatcggcgggcatgaagttgcatacgccgagcgtgcgtgccatgccttcgtcgcgcagcttgacgaacgccttccaggtgtcggtgctgcgccagtcgaacggcgtgggccaatggatcatgtacatgtccacgtaatcgagctggaggagtttcagggagttgtcgaatgccttgagcgcggagtcgtagccctgctcagagtcgcgcaacttggtggtgacccacagggtctcgcgcttggcgccggtgttgtatccggaagcggcgagcgcacgacccacgccggcctcgttgttgtatccggcggcgccatcgatgtggcggtatccggcttccagcgcagattcgacgacaggggccacgccctcgtcatcgatacgtagcatgccaaggccgacctgcggaatggaatggccgtctttcaaggcgatgtccggcacgttggcgggattgatgtgtccgttggtcatggcttgtgatgctccttcatgtactgcaactacacgccactgtacacggttatgcaggcgatgtgcgggtgctgcaaccaaacggcatgattgcgcccggccttccgtgtgggagagccgggcgcaaccatgacaacatcacgctctactcctgcgaccggccctcgccctattgttcccgggcgcgaatttgccccggtacaggcgtcaatcgattgacgtttgcaccggggcagaaatcgttgtcccggtacgcaatttcgggccattttcgagaaccaggacaagacaatccccaaagtccacataccccgacaaacagaatcggcggaatacagccaatcccgaaatcaacatactgtcccggttctcacgtagaacgattgacgtgcaaaccggggcaacgggaattgtcccggtacgcgaaaaacacccgttttcgcaaaccaggacagtgatttctgtcctggtacccacatcaaacgattgatgcacgaaccgggacagaatcgcatcgctgcgccgagacagacgcatctgacagccgacaaccgataaacgacagccgacagatggcatctggcagccggttgccggctgccggcaaccgcatcataatgccgcatcagtctctatcaggagcgcttacgacgcaaagcaagcgagaccccgccggccacgccgagaacgacaaccgcaagacccacggcagtcaccgcgctaccggtattgctcagcacaccagtgatcttgtcgccattcgcaccgttggtcttatcgccctcgcccgtatcgggattgatagtagccccgccattacccgcaccgtccgagccgttgccggaaccaccttcggcccgagcggtaaccgcaaccgtataggtttcggtgacattcggattcgacttgagcgttacggtaaccttcgccgcatcagcgggagcggagaaatcgtaatcgagcgtgaactggtcggcggaaagcgtcacgttgcccatgcctgcggaatagttgcccacgaccttgagatcatggtcggcatcgatggcatcgcccacctgataggtggttttgcttggcgtgacggtcaggctggagacctccttttgggcgaggccggcaatggcatcggcaacaagcttgatcacatcgttcacgtcctgctcggtgtaggtgctgccggcaagcagcacgtcagcggcggcaagcgcctgatcgagtttggcgagcgactcgttggtgtactcatcgcgattgattttcccggcttcggccacggccttgtccaggttctccgtggatggcttcaccggagtttcggtctttttgacgagtgagaccttgtccacattgccccatgcgtcggcaggcaggttgcccgtgatggtgatggtcgctgtgccatcagcacccacggtgacaggcacggtggcggtatcgaacttaacccaaccgttgagttccagcgcatcggacgtggtcttgccacccgttgtggcggagagggccacaccatcggtaatagcggcgttgtccgctgccgcgccttggctcatggcggtcagcacgtattcgccaggctcgagtccggtgatggtctgcgtggcggagaaactgtaggcatcggatgcccaaaacttcagcgcgcgcttgccgtcggcggcgttgccactgtcttcggtgatggacgcaccggtgccggcaatggtccagttcttatcgttctcagcgttctcgaagctgccgtccgttacgtaatccttggcgggagtggcggtgacggtgacggtcacgtcgtggccagcgttggtggtgccggtgatggtgtatgtgcctgcgccacgaatccagtcaagcgcagcggattgccaggtcacggtttcggtctcgtccaccccatcctgatagtgtgcggccacctcactcggcaattgcgctttgatcgcgtcgatggaatccgagtcagtcgcggtaatctccactggatctatcttggtgaacacatgatcggtgacggcaccggtgtgaatgtacttgaacgtcggcagagaggcgagcgccttgccatcgaaatcgaacaaagcttggttatcgacacctgagccgccccagtacaggccggcgtcattgggatcgtattcgccggccgcttcagtggcccagccgccaccgtacttgttccacgtatccaccagttcggcgttatccttgccgccggtgcccacgggcacccatgcgggctcccagtagaacacacccaggccgtcgttttcgccatcgccatcattgtcgccgatattgttcacggcctcggcgaccgcgcgaatctcatcggcctggccttgcgggctgatgtcgtatttcttgaggttatcggcggttactttactgggcactgtgttggaatcgtcgtcgccatcatccaaggtgtatgcccacgacgtttccgccatggaacaccggcaacaacgtgctcgcgtggcatggcgtgtactggcgacagtcaccacggcgaccccgccatggaacgtggcacaaccatgcgggggacgctctatgtgcattcagtcatgctgccgatgctctttaacttgcatatccacgggggcggcacgaggcaattcggccgcctttacccgtacatccatggggcggcgaaaatcccatggggcggtaacttgcccatggggcggtcggtaaaattttaccttccgcagaatagagccattttcagctaccgccccatgagggattcaccgccccatgaggaaatcaccgccccatgggacatctatataacaacgacttcgtacagcaacaccagcattacagcaatgtcgttcagcgtgtggaggcgcgggcgatgacctgggattcggtggtgagcagttcggacttggtgatgctgccgtcgatgcgtccgaggatgcgatccactgccgtgggagccgtccagtcaaggcgggaatccatggtggtcagcggaatctgcaggtagggggcttcctcgttgttatcgaagccgatgacctgcacctgcacgggcacctcataaccagcggtgcgcagagcggtcaatgcgccgatggccaactgatcgttcaaggcaatcacaccgtcgaatggcacgccggaatcaatgagccgctgggtcacacgggcaccggctccgatggtccaatcctgatcggtgttgccaatcagctgcggatccaaggagagcccacgcctacgggtctcttcgatgatgccgcgcagacgcagctgcgcgttgccttctacggcattcagcaatgcatcttcgtcgtaaacgtcacgggcaccgatcactgcaagtctggtggaaccgcggtcatacaggtagcctgcggccatggcggctgcggatacatcgtctggggtcacgtgatccacaatgccccacgtggtacgcgcgccaacgatgaccagcggaaaatcaaccttcagatcatcgggcgaaatgttttccacctcgctcatggaaaggatcatgccatcggacaccgtggagttgaacttcttcagcagatcgcgcgcgcctttcgcggagccttccgcatacgtggtgacgtatacggaatagtcgcgctgacgggcggcctcgatggtgcggttggcgagctcggccagatatggcggaatcagcgaaggcacggcgagggtgatgaagccggtgtgatcgcggttgaggttgcgggcggccacgttgactcggtagtcgaggtccttaatgaccgactcgaccttggcacgggtctcatctgtcatacgcccggagccattgatcacgttcgacgcagttttgagcgatacaccggcggcctgagcgacatcgcgtagcgtcactcgacgcttggctgttttctcgtcgctcatgccgcgctcctccatccggacaacattgccattctaacgcggtctagcaggacgttttagcgataagaatggcgttacggttcagcgtatatccgacggcatccgtctcgcaacggtgggcgatgatgggcttgccttccacaccgttgatggcgacgggctggtttgagcggttgaggtagaaatcgaagcgggtggagccgtctgcggatcggcggatggtgtgcaggatgcggggatctgtggtgggataggttggagtttgaccactctcagtcggctgcgccgacaactcctgccatcgggagccaagtgctttgagcaactgggcaatgtcgtgacggttgaggtcgcagcccacgtagatggcggtaccgttgccataggggcggctggtgatggcgggggtgcgctccagctcccagtcggcggcggactcacctgcgtaagaggcaagcactgtggtgtccgcggctacggaagtcacgtcgttctgccacaggcgggtcgtcagaccattggacaggctgatttcgctgggctcgccttcggcttcttcaccgaggatgttgaattcttcggagcggatgccgagcatgtcgcgtaggagcccgttgccggcgccggggtagccgccgaggccgatgtggaagtgctcgtcgatcaggccggcggcatagccgacgatgacggttccgccggccttcgcgaagtcggcgatacggagaacgtcttcgtcggacaggctgagcacggtgggcagcacgatggttttgtagccggtccagtcgtaggcgagcggcaccacgtccgcgcgcagcccggcatccaggaagccgcggtaccagtcgcgcacgtcgtgccagtggttgagtttcatgctgggcagggtttcggagcgtgtggcccattcggattccgcgctgaacaggatcgccgtgccggcacgctcgagctcagtgccctgcagcccggcgtcggagagggtcttcagcgccttaccgagctcgcatacgccgcggaagaccttggaatcggcgcccgcgtggggcagcatggcggagtggaacgcctcggcgcccgacttggattgccgccattggaaaaagcagatggcgtcggcgcccatggccacgtgggccagggagtcgcgcatgagttcgccggcccgtttgcgtgtgttcagcggcttccactgcacggctgaggtggagtgctccatcacgtaccacggcttgcccagcgcgagggagtccatgagcgcgtccgagcaggcgagttcgtccaggtgggattcgccctcatggaagtagtgatcgttggacacgaagtccacctcatccgcccatttggcgtagttcatgacgcactggtcggtggagaccatgaagttcgtggtgaacggcttgtcggggcagatctgctcgatggcgtcgcgttcggctttgtagaagtcgagcagcatgtcgttgccgaaccgctcgtaatccaactgctgcgacgggttgaccatggcgtcgccgcccatgtgacgtggcagcagcacctcgtcgaaactgttcacgtgctgcgaccagaaggccgtgccccacgcctcgttcaacgcgtcgatggtaccgtacttggcctcgcaccacgtgcggaacgcggccaaggcgttgtcggagtagtcgtagcggttgttccagccgtattcgttgcccatgtgccaggcggtcacatacgggttgtccttgtagtgttcggcaagtttgcggcacaggcgcagcgcgtattccttgaacaccgggcttgtgggctgccacgactggcgtgagcccgcgttgacggtatgaccataccggtctaccggcagcacctctggatgggattcgtacagccacagcggcgcggcggctgtggcggaggccaagtccacggcgatgccggctctgccgagcctgtcgatcacatggtcgagccactcgaacgtgaacgcgccctcgaccggctcgatcttgtcccagctgaaaattgccagcgatacgacgttcacgccggcctcacccatgagacggatatcctcgtccagcgtctcctcgggccactggtccgggttgtagtcgccgccgaacgcgatgccgcggccggattccgtcagcagggacggccacctaaatgctctatgagtagtcatattaatcaaatcctttattgtatcggctcatggccggtgctgtgtttgccggttttgggctttggctcccctcagtctcactgcgttcgacagcgtcatcggcgctttgatcaaggcgtgaatgctgcgttgcgttactgcattgccatgttgccatgttaccgcgttattgcatcgctacgttgccacgttgccacatcacattgcattgccgcattgctgcgttgccgcatcacatatcgcaacacaaacgcagcaacgcaatgacgaccggagatggcatcgccgccacccgcgaggaaccgcaatgcaacgcggtaacgtaacgcaatgcgatgcgattcccgcgtagttacaggcagttacagattgagtaccgcatcagcaatgcgcatggcggattcgcggtgggagaccagcaccacagccgcgccgcgctccttgtctgcatgctgctcacccacggccatagcgtgaatggaacgtagaataatagcctcgttcaaagcatccaaacggctggtcggctcgtcgaaaagcaccagatcagcattgcgcaggaacacacgagccaaaccgatacgctggcgttcaccttcggatagacggtcgcccgactcgcctacctgagtatcaaggccatcgggcagggaatcaatgagatcaagcacggaggccttggcgagagcctgacgcaaacgagcatcgagaccgtcagctgctgccacctgaacggcatcgccctctgccgattgcgccgccaactgctgctgtcgggaatcaacggtcttggcacccacttccccattgcctgcaacatttgcagcttcaacctcggactcaggcaaagcaatcagcagattgtctcggatagagccatcaaacaggtgggtttcctggctcatcatggcctgaatacgtcggcgagcatgcacatcgacctcgggcaacggcgtgccggacaacgtcacctgaccgcgctgcggatcccagtagcgcagcagcagcttgagcatggtggacttgcctcggccggacggcccctggatacccagcacgccatgctgcggcacgtcaagcgagaagtcggacaggacttcatgctcccccgcatatgcaaaggtgacgtcatcaagacgcatgcccatatactcctgcggcacaacagtgccgttctcggtcacagcgggcacctcgtccatcagtccgaacagtcggcta

SEQ ID NO: 660 - DNA, 25586 bp, Unknown
  R14_15m  MAG No. k141_13515
atccagaacgtcaaacgacgggcgagaggcttccgcgacatggactacttcgccaccatgatctacctgacctgcggcagactcgacctcaaagccgtcaccaccacttgaccatcacccaccacaaacagcgaatagcctttgtattttctcagtttccatacggttttttcgtttggtttcttgcttagttttccgtctggctttttgtgcgcttttcaaatgctgtacacttcgcgcgtcgtttcgcgcgttgctttggcgatttccgccaacgaacggtcgagataatcggcgagcgcctgcagagtgtagggaatcatgtatggtgcattagtgcggccgcggtatggcatcggacttaagtagggggcgtcggtctcgaccatgacatggctcatgccgacgagtttcgcggattcgcggataccgtcgttgcctttgtagctggatgtgccggaaaggcttaaataccaaccgttttcgcgggcgatttcacccatttcgacgtcgccggagtaactgtggaacacagtacgttcgggggcaccgtcggcgaggagtgtttcgatgacttccttgtgggagtcgcggtcgtgaatctgcatgggcagattgagctccttggcgagggcgatatgcgcacgaaacgcctcacattgcagctctttggcaccttcaccagtgcggaacaagtccatgccggtttcgccgatggccacgacttgattagggtaggtagtggcgagacggtgaacttcggccatggcatcgtcaaaggggatgtcgtgccagggcttgtatttgatgggcaggccgtcaggtccgggtacgccgcgatgaccatgcaatacggattcgttggggtggatggcgattgcggcgtgcacggttcccgggtgttcgcgggccatgtcgatggcggtcatgagattgggcagctcgcaaccgcagtcgattacgccttcgacgccgacatcctgggcttgtttcagcagttcgtcaacactgtagacaggcacttcgccctggcctttttccatggcttcgtggctcatggcttgcgagaaaggcacgacggatgcgacgtgggtgtggttgtcgatgacgtgcgcgtcttcgggaagtggctgtggggccggcgcccagttgcgattgcgatgatgcttgctcatggcttccagattacgcttcctgcgatggccagcattgctcgtatccgactccggtgagtcgttcgaccacggcacgggttttgtcggtgacgtcggctttgctgccgccgtgctgcagtcgtgcgatctcgtcaagcagaatggcgtcggtttccttgctgatcgccatccgttgcgatgcgatccagccgacaatcatggcgacggcgaaccagccgagcaacatggcgccgatgacgatgtgtgccgcgaatggctgcgtgccgtgttgggagtcgaatcccgttgcggcgagcacgaggccgacgccgatggacagcagtccgctgcacagctggcgtgcgaaggtctgcgtgccgaggaacgtggctgagcggtatcgtccggtgacgatgtggtccacatccgccatgtaggggaacacttgccatggcaggtatccgcaaagggatttgaacgagaagaaccacagcgcgccgatgacggtgaacaccgtccatgccggtcgtggcatgacgcctgcgcacagccagctggcgagcagccaggccacgccaatcaaacagccggcgaaattgatggcgtagaggcggcgggggccgatagctacgaccgcccagccgaatgccggcatcagtggtagggagatcacggcgcaggtgagcagcatcgatccgaaggctgcggaggagccccaatcgtagatggcgaagaacaggaacagctgtccgaacaggtccattgagaccattaccatgacgtatacgaccaggtggcggcggaattcggcgatacgcagcgtggacaggtattcgcgcagcatgacggcggcgcgatgcgtccacgtccggatgacggaacaggtctgtccggcgggccggccggcgttccgatggacggagccctgtgcgccacgggagagcgtctcgtatacgccgaatccggcctcccgcggcgtcatctcccatgtggagtgccagcagatgacaatcgccagcgagaacatggccgtcactacgaacgtgaatcccatgtatccaccgggatggtcctcccccaccgtggccagcacaatgccgccgaccagcggaatcagcgtgcccgaagcggtggcgaggaacagcctcacggtggacagcgtggtgcgttcgctgaaatcggttgtcatttcgccgggaagtgtgctgtacgatgtgccgaacagctgcgcgagcatgacccacaccacgtagaccaagcagtacagcgctaccggaagccccggaatccatagcaggaagccgaccagcaccgccggcgccacgacggcgagcaccagtcggcggcgaccgaaccgacgacctacacggaagcggtagagattatcgcacagcacgccgaagccgagggccgcgaacgcgctcagaatggcgctcatgccgatcacgccttgcgtcagaccgatgtccatgccgcagaaacgattccagaacagcgcaaggtaggtggccacaagcgcgccttggccaccgccgtacagatcgcccatgccgtatccgatggccgacatgaacgtgaccttgcgccgtgttccagattgtttcacagtgcgtttcacgatgattcaccccgtgtgatttcgctatttgagcgcgatgacggtgaacgaccacgccggcgccgcataggtgccgtccatcagatcgagcggagtattgaccggcttggtcggcgattcctcgccgacctgtccggcatacggatcgttgccggccaggatggtggccgttgccgtcgctgcggattgcgcggagacgtcgagtccggcgaggatctgactcaggtctacatccaccggttcgtccatggcgttgaccacgcgcacgtaggtttctcctgccttggcgttgcgcgatacggtgacagtgcgcctcggctcgtccttgacctccgtgccgtccgcgatcagcgttccatcgatgtacagcttcatggcctggccgcggccggtaacatcggcgtgcacctgccaggtggtgcccggcaacacttcgttcatggagacttcggtgccggcgagcgcgtaggctgtgccgtcgcggaccacgcggacgctgtggcctcggccgaatgagacgatgttgtggtttttgccgtcgatgtcgccgcagatgagatccatgccccatttgccttcgtagtagacgacggtggcatcgatgctgtaggcgtccgtgtgcaggtcgagcggggtgtcgatggttctgccgtcgtaggacacgtcaccgaggttgaccgtttctccggacgcggtggtgacggtgaggttgttgaagtcggctttggcgttgcctgcgatgcgcagtctcactgtgtcgggcagggtgcggcgcagcgtggatgggccttcgacggcgacgggccaggcggtgtcggccgtggtggtggcatacatttgctgtacccagtagctgtagggatggtaggcgcgttcgttgtcgaagtagataaggtccgggttccagctgtggtggctgttcttggcgaacagcggggcataggaggccatggccaccacgtcgccgttgagttccatgcgtcccatgaaggccgcttcggataggccgttgatcagttgggtgttccaggagccgtattcgccgaggtaaaccttcgggcccttgcggtccgtgtggtcgtagtggtcaaggttgtggaaccaccagctggatgactggtaggagtgttcgtcgacgatcggcaggcccgcttcgcgcgcgtatttccaaccttcctcatagtccttgccgctgggggatggtccgacggtgccgacgacgacgatgtccgggtatgcggctttgacggcatcgaagatctgttggaagcggtttttgaacacgtcgtcgatgaggtcttcattgccgatgccgaggtattcgaggccgaacggttcagggtggcccatggcggcgcgcttggcgccccattcggtgtcggtgccgccgttgcagaattcgatgaggtgcagcacttcatcgatgtaggtgggcatgtcctcctgagccactggcaccgggccttggctggtgttctggcagctcacaccggcaggtagcaccggcagcggcttggcaccgatggtttcgcacaggcacaggtattcgtagtagccgatgcggaacgactggtggtatccccagaggttgaagttgtgcggacggtgttcgactggtccgatggtgcggtcccagtggtacatgttgtccatgccgaggccgtgggtgatgcagccgccggggaatcgcatgaatcgtggtttaaggtcggcgagtgccttcaccaggtccggacggaagtgtttgagcccgtggtaggtggtgcgcggctccaaggtgatgaaatcgagatcgatgacgccttctcctccgaaggtcagacgcaacgtgccctgcgtggacacgctcgcaccggctttgccatcttcttcgccgctttccggaacggtcagagatgcctggcatgtcgtccatgccgaggccgtgacggtgatggtggtttcgctgatgatgctgccgtcgtcgccgtgtagcgagaccgtcactggcatcgcgcttcctgatcgtacgcgcatccatgcggtgaaatcgtaggtttctccggcatggaataccatgccgtcccagccggtgttgtccagtgcggccggagcctgttcgatttccaccgtcgcgtaatgcgggttttcgacggcgaccgggtcgatgtcatggatgcagaacgcggcgaacgagccgtccggcacgattttgcgccagaaactgtagttgctccattctgcggaatcggcgcgattgtattcgaaggcgccgttctgcacgaggtcggcgttgagaccgccgtcgccggaatagctgatgtcttcgaagaagatgccccacaggtcggtgctgatggcgcgcacgcccgctttgtcgagcgttgcgatgagtttgtcggtcattgatgttcctttgtggatggttgttgttggatgtgccgccgttcgccagattggctcagtctggctcagtcgagcgcgaaccagaggcagccgtgcgcggggatgatgccgcggatgacgcggtcctcgccttcgccttcgatgcggatgtctggttggatgtcgtcgggcgcttgcgggacgtcggcccacaggtcggtgagtgtccagtccttgttgcgttggtcgatgccgacgaagctttgcagttggatgttgcctttgagctcgtatggctcgctgcctgtccagaagatcgcgccgtagtgtccgtgcttgtgcgccgatgtggtgccgtcggcccagtcggccgcgtcggcggtccatacggcaaggtcgccgagatagctgtcttcctcccaccagcgtccgaagatccgctcgtagacgatttcgcggttgttcaccgatcctgcggtcacttcgcgcagggccgggttggcgagcagtgcgatggtgtcggcgctgctggtgggcaggtcgccgccaaccatcagcggggaccggcccatgctccacagggtgagcagcgttttctgctcgtcgcgggtcagtttcgattggcggtcgtcgccgcgttcggcgcgcaggccgatgtgtccgagcggcagcatgtcggcgtcggcccagtggccggtgcgttgcatcggcgcccatcgagcgagccgggggaactgctggtagatgtcttcccaacggtcccagaggtcgtcggagatgcgccacatctgtgagacgccgcgtaggaaatcgacgtgggtgctggccacccagccgcccggggacagcgatagcgtaatcggccggccgtaggcggcttccgcacgttcgatggcgtggtggtatgcctcgatctcctccgggaagaacggcgtctgcatgtcgtcgaccttgaggaaatcgaggccccaggaggcgaacaggtcgacctgcgcgttataccaagcctgcgcgccggcgtcgccgcgcttgagaccgtagttgtcgtggttccatacgcaggtgtgctcggtgtcggccacgtccctcgcgtgcagcgtggtgcctttgaccggcaggttctcatgcacggcctgccgtgggatgccgcgcatcacgtgcacgccgagcttgaggccaagcctgtgcaccgcttcggcgagcgggccgaatcccttgccgtcggccgcgcttgggaagcgctgctcgtcgggaatctggcggccgtaggcgtcgatgcacagtggcgtgccgtcggagtagccgtgcgcgtgggcgttgggatcgaaccagccggcatcgatgaccaaggtgtcccagccggcgtctttgagatgcccggccataaagcgtgcgttggccaggacctcttcttcggtgatggtggtgccgtaggagtcccagctgttccagcccatcggcgggcgccaggctttgaccggcgcggacgtgtccattgggcggttgtcggttgagtcgacggaaacggtggtcgggatcgtcatcgaacctctcttcgttcagggccgctatggcgctgcctcagcaagagccgaacgccatcacgcggaccacatatatgtatcgttacatattctaacgcaaatccaaccggacgcaatcggcacaacatgtcggtgagtctctgtgttttcaacgattttccagaatcagaaagtatgatatcgttacatattaatcgtgtttttcaaggagcggcatatgaccagcagcacaccgacgctacgcaacgtggccgcggaagcgggcgtctcccccatgaccgcgtcgaacgcgctgcgcggcaagccgggcgtcagggaatcgacccgcgccaaagtgctcgccgcggctaagaaactcaattaccgtatcaatctgacggccagcatgctcaagtcgggccgcagcaacatcatccacgtcatcgtcaacgaattcgattcgccgttctattcgaagctcacgcaggcgttgagcaacgagatcgtgtcccgcgggctcatcccgttcatcgagcagacgcagtattcgccggacgccgccgagcatgcactaagcagcaacccgttctccggacagctgttcgatggcgagatcctgcacgccacgggcttgggcacgaacgtgccgctggccaaactcaacggcggcaggccgttcgtgctgctggacgcctgcgaggagatgccgaccgtcgacgccgtgaacttccccaacgaggaggccgaacgcgcggcgatgcagcatctcatcgaccgcggatgccgcaatatcgcgatcgtcggccaccggttcgccccccgcgccgatctggcgcatgcccagaacgcgttcgctctgcgattgcgcggcgcatgcggagcgctgtccgacgccggactgccctatgacgagtcgatggtgttcgaagccggggatgtggccaatggcatcatcgccgggcatgcgattgcggaacgtattctcgccgcacggagcggacatggtggcaccgagttcgacggcgcgtgctgcgccaacgatttcgcggcgttcggcgtgatacgcgggctcgcggaccgcggactgcgcgtgccgcaggacgtgaaggtgatcggattcgacggcgtgacctccggctcgtacacgacgccggcgttgagcaccatccaggtcgatttcacgcagcttgcgaaattctcggtcgatatgctgtccgaacgtatcgaccatggaacagacgaggcgttgccgccaagacgggccatcatcggctaccagctggtggaccgggaatctaccgcggtctgagcggcgcccggcagcggcgatccgccccggcaggcggcggccgcgacgaatccccctcaatcggaatcaatcatcatcattcatcaaggaatctctaggagcatcatgagcatcgacacccaggcctatctgttcgtgcatttcatcggcgaggagcgcatccccaccgacgagcagctgtacttcgcgctgagccgcgacggcgtgcattggaaggatctgcgtccggccggcagtccggcgctgacgtggctgggcggcgagaagggcgtgcgcgacccgcatatcgtgcgcgacccgcgcggcggattccacattgtggccaccgatttgagcatccattaccgtggcggctgggggccagacgacggcgcggacacgaacggttcgaccggcctggtgatctgggattcccccgacttggtccattggagcgagcctcgcctcgtggacgtggcctcgaagattccaggcgcgggcatggcctgggctccggaggcgaattgggatccggatcgcgggcagtggatcgtgttctggtccacgaagagcaacgcggacggctccgcggatccgttagccaacgagctcggcgacccgacgaacgtgtattatgcgacgaccgttgatttcaagacgttctccgatccggtcaagtggatcgaccgcaggaacgtgatcatcgattcgaccatgctgcgcgacgacgacggctggtggtaccgcgcgtccaaggattcggagatcaccatcgaacgcacccgcaacccgtatgcggtgacctacgaggtgctgcgcaccgacgatccgaacgcatggtcgtatgtgggcacgctcactgacatcttcggcaacggccgatattccatgcattatctggagggaccggaactgttccgttacaacgaggcggacgtaaaggacgtcaacgggcggccgatgccgttcggcctcatgtgcgaccagtacgcggaatccaagggctacctgtcgttccgctccgcctcgctggcctcgcgcgatccggccgattggcagcgcgccgacgatatcgatttcggcgcgctgaagaagcgccacggcgcgattctgccgattacagccgccgaatacgacgccgtcgaaaccgctttcgccctgtaggcgtcgcgatcgtacggttatcgcgacgtccacgtcgcactgccggttcccttacgtcattcttttgactcgtcatgcatattccgccgttccagagcgatggaacggcggaatgccaacgaaaatctcttttgcctgccatttgcttttcttttgattctagaatcaaaagaaaagcgagacgccaagccgacggggaatcgcacgcgtctactcgaagcgaaggtaggcgatgaacgaggccggcacgtccttgttcttggtgacgttgccgaaaccgaggataacccctttatcaggtagacccttcgtcgaggtccacgtggccgatcgcgacaaatcgaagccgacggccttgtcgatgtccgacaccggctctcccttggcgttgaccaaggaatccttgatacgttcgagctcggcggcatccatgacttcggagggcttggtgatttcgccgcgccgattgacctcggcaaaggtcttggcgtcggatgcgatcatgttgacctgccccgcgggcaccatggcgagcagcttggtggagtcatcctgcgcgttcccacctgccgcatcacccaaggagattgaggcatccatgctgaccaagcggccgtccgtaataccttccgattgggcgaaaccggcgccgagcgaatccagttggtccgagcaacggctcatgttgacgccttcgaaagacagcaccgggtctggcgccttgatggcgtacgaaatgccgaacgaggcggcgatgccgacggccagaaccgcaacgatggcatatgtcaggaaattatccttgaaatacggccatttttcgctcgccggcagttctcggaatgtcttgagcttcgactgcttcgcatagacgttggtctcggacagttcggagaccgccgccttctgctcgtcagacagcacgaaatcgtccctgcgttggttgtcggtcataggttcccgccttcgtcactcgtcgtactcacccgcgtaggaacaccgtcatctcgttctcgccacggttggcccatgcgaagtatgggatcagcgtggccttcgtcgccttgcgttcggcgggacgccaatcatggtacaacgtggaggtctgcgcgtcgtcttccatttcgcgccaggcgggaatcgtcagcgtggtcatcggcatatcgacggcgtccacttcgccgagcccccgctcgtcctgtgcggcggcgccggcatggaagacgatgcgatcgacggccacgcaggacggatcggacgcgatgcgcgcggtgtcggcgtgcagcagatgcaggttcgcaccattgtcaacgccttccgcgcagtaggccagcggcccgcgcacgaacgccaccttgccggcgtcctcgcgcacgagcggattcgcgccgaccatgcggaccggcatcgggaaatcgaaatcgacgatgtctccgtcatgccatgtgccggtcaggtacaggtatccgttcctgacggcacgggagatgtcgtcgcggccgcgcacgatgaccgcatcggaagcgctttcgccaccggcccaggctggcaggcggaaggcgatcgtgaaaaccgcgtccttggatgcgtcggaagcagaatcgcctgcatcaaagcccaccgcgacggatcccttgccggaccaaggcatatcggacgtgacgtcaaggcgcacatcggcgccggaaagcctggcatggacgccgccgcccatatacagatgcatatacagggtggatgagtcgtcgccgatcgtgtaggcgtactgctgcacgtcctccacgatgcgtgcgatgttcggcgggcagcaggcgcagccgaaccacttctggcgcaccggctttacgtgcgccttgcgttcatcgcgatggcatgcctcgggcaccacttcgagcgggttcacgtagaagaagcttttgccatcgagtgccatgccggcgagcgtggtgttgtacagcgccgattccatgacgtccgcatattcggatttcggctggatctccagcatgcggcgcgcgaagaacgcgagcgcgatggcggcgcagctttccgagtaggcggtgtcgttcggcaggtcgtagtcgaaggagaaggactcccccatgtgggtggcgccgatgccgccggtgatgtagagcttccggtcgatgatgttgcgccatagtcgttcgcaggatgccagtaggtcggggtcgccggtcagtcgtgccacgtcggcggatccggcgtagaagtaggcggcgcggacggcgtggccgagggcctctgtttgttccgtgatcggtttgtcggcttggtagtaggcgtagttctgttcgcgtggctcgtagttgcggccgtcctcttgggcgcggcgtcggtcttcgagttcgaagtagagcggttgccggccgcgttggcgtacgaagtattcggcgaggtcggcatagcgttgttcgccggtggtttcggcgagtttgacgagtgccatttcggcgatttcgtgaccgggataaccgtgcagtttgccgtcggtggcgccgaatcgggaatcgatgtagtcggcgaaacggcaagccgcgtcgagcagtttgcgtttgccggtggcttggtagtaggcgatcgcgccttcggtcaggtggccgaagcagtacagttcgtgatggtccttcaggttggtgaagtgccggtccatgccgttgaggatgtagtaggtgtccaggtagccgttgtcgagttgcgccgcgcagacgatgtcgatggcggcgtcggcggttgcctcgagttcggcgtccggatggtgggtcagggagtatccgaccgcttcgatccatttggagaagtcggtgtcctggaatacgaagccgtagaacttgtcgggatcggagtgtgccggatcgtccggcagggcttcgaagcctcgaaacgtgtatttcggcggcacgaaggccttaccttccctgcggtgctcggcgttctgcgcagcggcggctttgaagttgtgcatgcagtagctgggtgcggcgccgggcacgttgtcgttgagggcgttccactggaacgggatcacctgggtgcgtacgagttcctgccgcgatgcccagaatgggtcggtgatcgtcgcgtccttcaacgcgatgggatgactatgttgcgtcatgctcattcccttcctgattgtctatttcgattttcggcggtgcgtttcagtaatggatcggagcgacttcttccggacatgcgtcgtatggtggctttcgtcccattgccacgtcgtacattccgacatggcaccggcgcaccgcctgagccatttccggatattcctgggaacatacatccacgagtccgatttgatagttttcgccatcaaaacgtcccaaggcgctttggtcgttgtactggaagtaatgcgcgccgacaaaataccggcttcgcaaagcctgctcgacgtagtatcggtaagctttcccgcgatcctcctgcgtgcgcacaccacgaatgccatgcgcgttcaatccccggtcgagggcaccgtggtggaattcgccgaccatgaccggcatattcagcgtttttcccagctcatcgacctgatgataacaggtcatctgatagctgttgatggagaacacgtcgtagcaatcggatcccgcgagcaatgtgggatcggtgatgtacgcgtatcgcatgccaagattcagatggtgcgggtcgactcggcgcaaagcttctgcgggaatcctgacgtatctgtcgatcatgaggatactgaagtcacgcaaatcgtgcatgctgccagacatctgccgcacgcaacggtatcgggggcacgcgattaggtcttcgaaacactcgatgccggaatcgtcgggaatccgccatgcctgtttccatgcctgcgcatcgccatggtaccgatccaccaaccatgcgaccaaggcctctttggaggccagacgctcgggattggcgagcatttcctcggcaaggttcagatcatatacgaacgcccaattgggttcgttacgcatgaagtagccgatcatattgcgatcgtcacgccaatctttcaggccctgtgcgtatacgtcggcattgcgttcgtattccgtcgagaacacatcggggaaatcacggaacaccatggttttggtgcggggatattcccgcagcgtatcggcgggcagcacataggggatgcccgcagtgcgcatcagctcgtggtccgaccaattgccgatggtgttcatgccccagtcgtggaaatgccgcagtacgatccgtttccacgcgtcccatgccgaagcgccgaatgcgtgacgtagattggccatggcgtaatcgtatgagcattcgaaaccgcaatacgtgttcggagcgctgcggattgagaaatccggatcgccaatccgttcattccgacgcgccgcatccaccagttcccgtacatgccggtcaacccaaggcaataccggatcgactctggtgtcgatgccgggattgacacagtcggcgccgacggagatgaatgcgttgccgtcagggtcgagcagccagaatcgtccgtcatcccccggttcacgccatacacggaaccatccggtcgcctcggcatgcacatcttgacatccgccataggaatcccggtttagcaatgctggcaggccggccataccgcccgcaccggatggcatcggttcggccaatcgatgcaacgcctcatcgcaggcggcacggttggtggtctttcccggccattggcgtggcttccattgtcccatctcatcgataagcgcatgcacgggcggatccgcgtgcgcgatgacgtccgcccattgcaccggccacaccttcaaacgtctgccatcgcaactcgcatcagacgataggacaatgctcgagacatccgctttgcgtagaggtttgccgaaaatcgtcatcttcagacggccaggggtgcgcggagcgaacaacgtctggccgtccagccaccgcaaatcgaaatacacggtggtctccacgcccggcaacagtccgaacagcgcgtacatcgtcggatccgcgccacgttcgcgctgccccgcctcgtagaattccaaccgcaagcacatggagtactcgtcgcatccccgcaaccgcaatgcgagaaactccgcttgccgaaacagttcggcggccggcatggtcttgcgatcgaagatctccgccagcgccttgcctgcggagcatgtcaatgtccgcccgccatcaaccatattgtcgttcataagtgcccttgcccgtcccgtctcagccgatgtttccgtccgccttggacagccgttcatattcggcacgcgtcagggaaagaaccccgccatgcttggtgtgcggcgccatgaagaaatcggtggaacgaaggtagtcaaagccgcggtcgggatcggaactgaccataggtctgtagccgatggatgggatcacatccacatacagataccacttgtcttcgctgtgcgaggcgaacagggccggaccctccactccaccgggatggccgttctccgtccaatcgacgccaatgttctcctgcagcaccgtccattcggtttccggcttccaccattgcacggcatccgtcgcatccagccagatattggcctgaggaccgttgtctttggtggcgcggtatgtgcgcacggtgccgtccggcaaggttctttgcagcatggtggtgtcgatggtcgggtgccccctgtcgatgaacactccaccgaatgagaaggtctcgtttgtgaagtctgtggtcacgccccacatgaccctgtcgtacacgtcgggattcgtgtggtcgacatcatcatcggagaacagggtgcttgaccaatacaccacgaaagctccacgaccgcccgcatggccttccggataatagtcgggcacccacaatgcctcaggggcccacgccatgcccagctgcgcgtgcgtgccatccgcacgtttgctcatgtcaagcatgcgcggagcgctccaatgcaccagatcgtcggattcccagatgatcaggttcgtgctgccgtgatgcgagaacttgtaccaatcggctccggaatcggaaccgtgtccatcggagaacaccatcagatccgtggcgaggatgtacaccttgccggtttgcgggttacgcaccaagtatgggtcgcgcacgcccctcgtgcccaacggcgatgtcagtatcggcttgccgccgttcaaaggattccaatgctcgggattatccccatcggacaaatcgaggtagattcgttccgcatacgcattcgggtcctcgataaagtggaccagcagatagccgaatggctggctttctttagattccatggattctcccaatgtccagattctttctacatcgttgtatagttgcttcacaaagtattatcccacgaatcccgccactgcaggacggcccgtcgatcgtcgatgccgatcggcagggtgaccaacggggaattgcccagatcatccggattccaacgatcgccgatgtacaggaaacaaccggcgtgccattggtccgcgccatcgagtggcacgatgatgtcgcattgcgactggtaggtgtgtgagccttccggggtgaacggggtgaaatcgctccatggaccatgcagatccgtcgccgtcgcgaacatattgtcgttgcaatcccaacccgtcagacaggaaccgaaccagtagtagacgccgtcttttttaatcaggatcgggctttcatagccggcccagtaattcgtgccccgcaggcaaatcacatcttcgacgatggacaggtaatcatcggaaagacgatagatgtgcgtgtcgtgaggccgatcctcgctcaaaatgtacccgactccatcctcatcttggaaaacaccgatgtcgcgcgattcataaccgcggaactgcatcgtgttcagaaactcgaatggtccggtcggcgcgtccgagatcgcggtgccgatatgcgcataagcgtaatcgcctttgccgtcgacatgcagatacatcacatactttcccgtctgtgggcatcgcatgaccttcggacgctcgatgatacgctccggaccggtgatggaaccgtcttccccgacttccagcaccgtcccctcattgcgccacgtcacgaaatccgtggttgaatagcaggccacgccctggaacaggttgccgttgtttttgatctcgccatacgcataccaacgatcgccgaaccgctgcacgccaatgccgtgcagctgcgcgacctcgccattggtgtcgcggaacagctgagctccttgcatgattgccataatccgattcccttcttatctgtgtgtttatttcgggctggtcgatcgtcaacgatcgaccgagcctccaagcatgattccgcgcaacgtgcctccgcgttcccgcgtcgattcggcgtacagcatcaggtcgccttcgccatggggcaccacgaacagatcgccgcgccctccagcgaaaaccgtacccggcaacggtcccaacacgacgcgtcccaagcaatactcatcagtgaacgccgtcagctgcagaccctcgccatcaaaacgcacgatggtgttatttgagtactcactaccccgaatggacgcgccgggaacacgtatccaccgcccttcgccaccgggaacaagcaccggaagcgatgcacggacatacgtcgcccgcgcgcatgatgcacgcagttccttcagtccttgggattcgcaggtccaaccggtcaattcatcgcctaccagcaatgcaatgcgtccggcatcctcaccccacatgcgattcacgacgatggacagctcactgccgtcaggcacttctcccagccacagcgtcggagccagcggcgtgatgatgccgatggtccgaccgcccacacgcacttcgcaacgcgtctgcccatgctcgatatgaaggcaggcggaggccccgcccagcgacagcgtacgcgtatacaccaaagcatgaggccaggccgtcgtgctacgcgaaccgaaaccgcagcgcggcactggagcgtcgccaagcaccaaaccgttttcacgcaaccgttcggcgttgtccggatccgtacggttatagccgacgcgccatcccgaaccaatatccaatacccgttcaatgctcattgcgccgcacatgccgcgcttgccattcaaccgcaaggcgttcaatctggtgtcatcgaaattcgaatgaccccagatacgtgtggtgacgacgatatctttggtatcgtcggcaacgggctcattgaaaggaatccacgcatcgacgccgccgcaggcctgccaatcagtgcctgaattcccgcatcgcacgttcacggtatcggcggcattatggagcaccactcccaaagcgccgcgcatgttcgtcgccgcgcggtaccggccggcaccggaatacacgcccatgtcctccaatggcagcgcgtcgtgcaagacgtcgccgtcgcagagggtccacgacggccaatctaaggaaatggccacgctacggacgctgctgtgtggagcgcagccgagcaccacatgatgttcgggctgggtgaaagtgatgcgccatgacgattgcccctggccgatcgtcgccgtgccatgatccccttgaaccacaatatcgccgttcaccatatgcgcagtcaatgcatcagtatggatatggatatcgtccgccttgatgccatgcgcgggacggataatcgctccaaaacgccctggtgccatagtcggtgccgacaacgtaagcgtgtggccgctttcatccaactcaatcaattcaccggaagtcgcacgaagcatcatgccgtcgcccaatggcagacccgcaacgaccatcgctccggcaccggccggcaaggtcagagctggatatccaccatcagacagggcatcgtcgggcgcatcgccgatgcgaatatccgcagcgtcatcggacacgttggtgaatgtcagcagacgtccgccaccatgcagatccaatgatccgacggcaacgccgacgcgcgtctcgtcaaatcggtcgccttcagccgaatcaagatggattcccgtcaatcggtcatcggatatcgtcgccgaagccagccgctcgcccaatgcgtcgatgatggagcaaagccgacgcgcgtcatcggcatcgggacgctcctgccccgtagggtcgatcacaccgccaaaatcataatcatgggtcatgtacgcttcgacgcgaccccaattattcaccgaagtaccgtaatcgaaatcccatccggaaacctgcaggaacggtccgacgaaacgcgctccattgcctaccagacgacgcagcgtacggtgccaacgattggtttcggtaaccaccaacggcacgtcataggtatccgccgcccggcggtagtaccggacctgtgcgtcgacgtccacatcgttatcgcccggatacagattcacggctggagacacgtcttcagccgtgccgccggcccgaagcatatcaccttggccggcacaggcgattataggaacgtccacaccgtatgaacgcatcatcgaagcgagcgcaccaatatatttccccggctcatggcaggcgtaaaagtcgagttcgttatccgcctggacaagaatgacgacgccgccatcatcggcatcggcaccgcgatactgctggcgcgcgatgatcggcatgattttgccataccattttctgacttcgccaaggaacgcatcatcatattgacgaacatgcgttttcccattcgtagacacccacgcggggatggcaccgccatcccattccgagcagatgtacgggcccgggcgaaccagcgcgtagagccccacctcgtgcgtcaatctgaggaattcctcaatatcatgctgaccttcaaaattccatatatccggttcggtttcatgaaaattccaagggatatacacatcgatggcgtgatatccgatgctcttgacggcttggagcctttgtttccactgttcccgcggcacacggaacgggaacagggaagcgcacatcaacacacgaggccggccgtcgatcagcagacggttatggtcgaaagccacgaatcgagacatcatttttccttaaaaatgcatcgataaaggtcatagagatccattggtataaggaaggcccgtgcaggcattgacagaagcttgcacaggcctcccaatcatgcggggaacagtagaagaaccgtcccgcatccattcgcaggcgatcagcccttgacggcaccgatcatgacgcccttgttgaagtacttctgcaggaacgggtagatgacgagcagaggcagggtggagacgatgatcacgccatatttgatctgatcggcaagttgctgctgctgcatggcgttctgcccgccggaactcgaaccaagctggttggtctggttcgcgagcaagatgtcacgaagcacgttttgcaacggctgcagaccactttcacggatatagataaggccggtgaagtagtcgttccagtggccaacaaagtaatacagaccaataaccgcgatgatggcggagctcagcggaataaccactttgaaaaaatatccgaagtagctaagaccgtcgatctgggccgcatcatgcagatcctctggaatggatgtttcgaagaacgaccgagcgattatcaggttccacacgctcaccgcccccggcaggatgaacacgagcgggttgtccagcaggccaagggccttgaacagcaggtagttcggtaccagaccgccggcgaaatacatggtgaaggtgaacaggaatagaatcacacggcgcggcttgaactcgatgcgagccagagcaaatgctgccggcaatgtgacgatgaggttcagcgctgtaccaaacacggtgtagagaatcgtgtttgtgtagccggtccagatacgcgaatcctggaaaaccctgatgtagccggcaacggtgaagccttttggccaaatggtgacgttgcccgcggaaacctgcatctggtccgagaacgaagcgacgacgatgaaccacagcgggtaaatcaccaccgctacggttgccgcgatgagcacccagatgacgatatcgacaatccaatcaccgacacttttctgctgatgcatgtgcttgttccacggaatctcatcggcgctcgttttaggcgcaacagatggggaaacgcttgcattagtcataatcaattcctccttgcgattccctcattagaagatgctcgtatcggatacgcgcttcgaaatccagttggcgataatcaggaacgcgaagttgataaccgtgttgaacaggccgattgccgtgccataactgaactggaacgattgaataccgattttgtaggtgtacgtcgagatgacttcagatcccggcatgttcatggcattctgcatcagccataccttttcaaagccgacgttcagaacggaacccatgttcatgatgagcagaatcacacaggtcggcatgatggtaggaatatcgacataacgaatcagctgcagacgtccggcaccatccatcttcgcggcctcatagagactcaggtcaacagaagagagcgccgccagatagatgatggcgttccagccgacgtgctgccagacttcggaaatccagtaaataggagcaatggcgtttgcattgtcgagaatgctctggcttcccaggaaacgccccagcagaccggtcttcggagtaaggaagatgttcagcatggccacaatcaccacggtggaaatgaagtggggcatgtaggtgatggtctgcacgaagcccttgatcttctgcgagccgatctggttgatgagcagtgccagtacgataggggccaaaaaaccgaggaccagagttcctaggctgatcttgaaggtgttgatcatggtcgatgcgaacatcggcgacttgaagaactgctcgaaatactggaacccgacgaatttgccgccggtcaggcccttcgccggaacgaattcgcgaaacgcgagctggatgccgtacataggcacataggcgaacagtccgacgaaaatcatcgcgggcaaagccatcacccaaagctgccaataatgcttgaaatgccagccgatgcgcttgggaagcggccaagatttgcggacggcgttattgtcgatcacaccgttttcatcaactacagaaatggacttgctggacaccattatcctccttacaccatagcggaagcccgatgtggacggggacgaatccccgcccacatggccctctggcttacttgacgtacttgttgtacgccttctgccagatttcggtgttctggtcgatgttgtacttcttcaggttctcctggaaggcgttccactgggaatcgtcctcaacaccaccttggctcagccacttggacacaaccgggatggcgtagttgaacagcgcagtgttgttgttcgccacggtgttctggtcggattcgccgatgcggacgtaaatcggcatcagatccttggtgtggtcgtagtgggagtactgctccttgtacggcttatcagcgttagcaacatggtccatgccgcggtcgccttcgacggtgacgtcatcggaaacccagccggccagacgatcttcgagagccggaatcttggacgcatcctgggccttgtggaacttctcggtcaccttgtaggagtgggctccggtcttcttcacatagccatcggagaacgagccgaagagctgctgaatcgaatacttctcggagtagagcaggttgatcaccttcaggcaggcatctttgttggcggcgttcgcggacatcgacatgtggtagtcctcgtaacggttggcctcgctggagccatcccagacggtgtcttcggcggacacgccatccgcagacggaatcggaatggaaatgtactgattcgcaagatcggaaccgtaggaaccgaaagcggattcatcccagccgaacaccataccgaccttggcggtcttgccatcggactggttgcgcgcgttgtacttgtcgtccttgacggtcacccagtcagacggcgcccagccgttcttgaccatctcgtggtagaactcgatgacctgacggaactgcttggtctgcatccagttggcgaccttgccgttcttcacgtagatgccctgctgggacggaccggagttgaagtgggtggcaatgccagtggaattcatcatcaggaacgggctccaccaatcaccgatcttaccggtattcatctcgcgcgggttgaaggcgatctcatcggcctggccattgccgttcggatcctgggtcttgaatgcctgcatgaccttgcgcaggtcatcccaggtcttcggcaccgagaggcccagcttgtcaagccaggtcttgttgatcatgaaatgctggccggaggcaaggaagcccttggtacgactggatggcaacacagtcacttttccgtcgacggtgacgagcttcttagcggtaggctgttccttgaagaacttcttgacattcggcagcttgtccagatcgttgccaagctgctcaaaagctgaagagtttcgagcggcatcatccgggttgaaagcgcgaatattcaaatcggaaatctcaccagcggcaagggatgcgttcttctgctgaccccactgatcgtcggagacttccttccattgaatggagcaatcacaatccgcctcgagatccttggtccacgacatatcggccatcttggtttggttagagttctttacaaccagaatggtaacgatcggcttgccattggaatcggtggtggccttgctgcttccgcaagctgccaacgagccaagcatcgccaatgcactgatagcggcacccaccttgactgccgtctttctacttagcattagtccagtcctttccctggtcctttccgataaagagcgccagttgcccttccacggcattccctttaatgccattgcttatcgggttgctacctcccttccgagaaatcgcaacgattcgattatctatcagaattccttgcaagtcaaatccacccgacacacgtgtgaaacccagaaaatacctgtagtttaacgttttactttgcacaaaagccgaaaaaaatatcgcaacgattcgattttcccaaatttgtggctatagtaggatggtaaatgatattgcaacgcagcaaggagaacaacccatggtcacgcttaaagatgtggcaaacaaggcaggcgtttccatgtcaacagcgtcggcagcaatacgcgggaaagacatcgtcaagccggaaaccacgcagcgcgtgctcgaagccgcgaatcggctcagctaccgcaccaatctttccgcgcgggccttgcgatccggcaagtccgacatcttcaccatgatcgttcccgatctggaaacccagtactatgccaaactggcgaactccatggctaaagctctggcgtccgaacaaaagcgccttatcgtgcagatatcacaatacgacaaagacaaggaacgcgagctcgtccgccagatcacgccatcgacctgcgatggcgtgttcatttgctccacgcaaagcagcggcgcggacattcatgccgtggcaggcagcattcccgtgctcatgttcgatgatatgagcaacgacatcgaagcgtattatgattccatcgagacacccagccagaccggcatgtatgcaatcatcaaacacctggtggaatgcggacgacgcaaaatcggcatcgtcggcaccacaacgtcgaatatccgtaaaatatcattgtcgactacgctacgacaaaatcgttgcatctatgcgtatcaagcgatgcaatcatatggactcgatacttcgaaggcatacatccaatcggattggggcgtgggagccggcatccaaatcgcacacgacctcgtcaggcaaggcatgtgctatgacgcgctctgctgcatgaatgacgaacttgccttaggcgtgcttcgcggattggccgaatgcggcgtgcatgttcccgatgacgtcgcggtgacgggattcgatggagtgcccaccggatcgtataccatgccgacattgtcaacggtagcagtggatttcaatagcatggcacgcaccgcggtcgccatgatgcaggatcagatagaacgggacgatgccgatcacgttgagtccatgccacgccacgtgattgtcggattccaattgctcaaacgtgaatccacactgggacgaaacatttcgacggcatccatcaataagaatccttccgcaaaaacttccgctgatagaacatccaccaccaaggaagcatgatttcatgaaacgcgttgctgtgacctatgaatatttctgccgcatcatcctcatgattctcgtggcacacgtggccttcatagcacacacgctgctcgggctcgtcatcggcggattcttcccatccgtcgcggcgacctacgccacataccgcacatggctcatcgatgtgaaagaccggtcctggaccatcaaacagacatggacgaccttccataaggcgtggaaggcggagctcaagagtgcgaacgccttcggctggccgcaattcgcggtctgggcactgctgatctgggagtactggctcgtgcagaacaacgacatgggcgtcgccggccttgtggtctccggagttctgcttctactgaatctcttctacggccttttcgttttcatcagctgggcggtacacgccaacttcgacgaatcgccgtattggacgctacgcacgtcaatcgccatggtcatcgccagaccgatgtgcagtctcatggtcttcctgctattcctcgtcaccgtatgggcatacgccgcatggccgggactgcttatggcattcggcgtggccgttccgatttacgccactatgatggccgtgtattcatggggacgtttgcccggcatggatgtgcatgtgcttgagccgaacgaaaaggacgcggcagccgccatacacaaacagtgaaattcaatctgaatgaaattgggcttggatcgatgaattcgatccaagcccaatttcattcaacaccaaatcggcactcacaccttgattatcgcgtactgcgattcgtagagccgatagtaggcaccatggcgggcgagcagtgcggcatgactgccctgctccacgatctgtccgtgatcgatgtagcagatctcgtccgcgttctcgatcgtcgacaggcggtgcgcgatgatgaagctcgtgcgccccttgagcagatgctgcaggccggcctgcatcgcctcctcggtgcgcgtgtcgatgttgctcgtcgcctcgtccaggattaggatacgcgggtcggcgagcagcacgcgcgcgaaggcgatgagctggcgctggccggccgacagggtcgatccgcgctcctccaccaccgtgtcgtacccgtcgggcagttccatgatgaactcgtgcgcgtgcacggcc

SEQ ID NO: 661 - DNA, 12791 bp, Unknown
  R14_15m  MAG No. k141_14189
catgaacaaccaggatacaacgcttcaagatccacaagcgatccacgatcctcggtggttttgcatatcgatcctgatgcttttgattatgcgatcggacgggtcgaaaatgtcggtgtggacgctgccgactattgtggtagccaagagaagcgatccgtttccgaggtgagattcgggaacggtccgactctcggcagtgatttatctacgcagacaagccaaaggagcctcgccatgattctcgtcaccaccaccccgtccgtcgacggatacaccatcaccaactaccagggcatcgtcttcggcgaagtggtatccggtgtgaacatgttcaaggatcttggcgcgggcctgcgtaacatgttcggcggccgcagccagggctatgaggaagagctgatgcgtgcccgcaacgaggccatcgccgagatgcagcagcgtgcggaggcgatgggcgcgcacgccgtggtcggcgtggacatcgactacgaggtgctcggcgccgacaacggtatgctgatggtcaccgcgtccggcaccgccgtgcagatcgcgcgtacggcctgagcctgccgagcttgggcccgagctcgtccaccgagccgggctttgtcggttatcgtgacgcattacactgacgctcatgaccatacgaatcgaagcatacgaccggttgcccgacgcggcccgcgccatccgcgagcaggtgttcatccgcgaacgcgactggcggccggaattcgatgaatgggatgccgcgtccgtgcatctgctggcgttcgattcggataatgatgcgcccaatcgccctggctcgtccgcgcaattggcctcacgcagccagcccattcagcccagccagaatcaccccgtagcgacctgtcggttctacgcggaccccgatcatcccgaccagcccgggcgatacatcatcgcgcgactggcggtgctgcccgaggcgcaaggcaggcacatcggctcgcggctgctggccgacgccgaacgccgcatcgcgcaagccggcggaaccatggccgccgtgcactcggagaacgaccactacaagttctacgaacagcgcggctaccggctcactgacgaggtctatgaaggcggccgtcacggctggctggtcaagaacctatctcgtaacgtatgaaggcccgcctcggtgctgggcgagcgaacctacagcgcgcagacaatcagataaatcgccacgacgtggcaggcatacccgatgaccgtgcccaagtgaaacacctcgtgaaactcgaaccagccgggcacggggttgggtctgcgcaacgcgaagcatacagcgccggcgatgtacgcggcgcctccgcacgcgatgagcacggtcggcgccgggcctactgcgggagccgtccagagctgcggaataagcgttaccggggccagtcccaacacgacgtatacggtggtgaacacccagttcggcgtccgcagccagacgatatgcagtatcgtgccaatcgccgcggtcgtccagattaccgtgagatatggccggcgaatcgccgggctgagcgcgaacagcacgggtgtgttggtgccggcgatgatgaggaagatgttcgaataatcgatgccgcacagcacgcgagtcaccttcgcgctgcgccatggcacgacgtgcagcagcgcgctgttgccgaacagcagcatggccgaggcgccgtacaccgcgcaggccgctttgaccgagccggccggcgcgatgcagatgagtacgatggacgccgcgatgcacagcggcagggtggcgaggtgaagccatccgcgcagtcgcggcttgcgattgccgaatgcatccacggggacgatctggcgcttgatcgccttcagtgcggccttggcttggcggtagcgcgattgcgcggccctgtatcgggccgatgcacggtccagtgcggtggggttggcgtttgcgctggatttttgactcgcggttgcggaaggcgcaactgttgcggcggaagccatggttcgtccagatggcgtgctgatggaaacgctcatactgatcacctcgctatggccggcgacgctctcccgaccactaacctacgctaccgtaacctagtataggcccgcgcaataatcaaggttgatttcgtaatgcttacagttcttccgtggtgcggtattcggtggtgcggttgcggaatacatcgccgagtctgtgaactcgtattatgcgtgtctgctgggtccgacttgtgtcggttcctgatttcggattgctgcgaatgatgctcccaacgccgccccgccagttgccggattcgtacggctcggccgttcggccgagctggtcgtcggtgactccagatacttcgttggtttcgtctcggttcatgatgttatgtaatgctagtttatggcggatggaaagttgaggaaagttaaatctgcttcatgggcttctctctgatctgtatttgtcccggttcatatgtcaatcgtttgacctgtcgaccggggcagaatccgctgtcccggtcggcgatttcggcttgttttcgtgaaccgggacactccggtttcctcaactcatatcgtctggcagacggaatcggcggaataaggccgattctggaattggcacgttgtcccggttttcgcataaatcgattgacatttataccggggcaacaaaaattgtcccggtttgcaaagatcgcccgaaatcgcgaaccgggacagcggattctggcctggcttgaacgtcaaacgattgatgcgggtaccgggacattttccgccacgaaagttgggccataagtctcaagtcctaaagccccccctgaaaaacggcgcttgcccggacaaagcaaaagggctggaaccttccgattccagccctttagttgctggtgcgagtggggggagttgaacccccacgagcatacactcactgccacctgaagacagcgcgtctaccattccgccacactcgcagacaatcgactaacttacacccggctgggtaatcatgcaatcttcggcgtgtcgcatgggaggcagggatatatcgcttgtgggtctcctgcgggcgccgtgatctttgagggtggcggcactcccctcagtcacttcgtgacagctcgtccgcaattaaggacgggccttgcctgcaacctgctggttcgactatcgtctcaccttcgactacaaacagcccactgggctgtttgcttaacgtctcagcctcagcgaggggagcagagagaagttcggcacaagccgcaacgaaggagaaaaactcacaaccctggccggcgctcgccgttgccgtagaagtgggccaacgcttcgtcgcggaactcatcaaagtatccgccgtcgatcgaggcgcggatgtcgtccagcagtttcacgaagaaatgctcgttatgaatcgtggccagtgtgaacccgttgaactcgcgggcgcgcagcaggtggtcgacgtacgcgcgcgaataatgctggcatgtgtagcagtcgcatccctcctccagcggcccgaaatcgaacttatgctgggcgcgcttgatgttgtaccggccggcgcgcgtgtagatcgcgccgttgcgggcgcagcgcgcgggggccacgcagtcgaaggtgtcgccgccgttctccacgcacgcgaagatatcgtccacggaggcgatgcccagcacatggcgcgggcggttctccggcatcgcgtcgcagatccacgcgcaggtgtctccaatgatgcgcttctcgattgcgccgccgattcccacgccgtcgaagtccagcgaggcgatctgcgaggccgcgcgccggcgtagatcctcgtaattcgcgccctgcaccacgccatacagcgcctgatagggcttgcccagccgctcagccgtcagccgctggtgctcgtccacgcatcggcgggcccagcggaaggtgcgctccaccgagtcctcctggtaggagcgggtgttcatcagcgtggtgagttcgtcgaacgcgaacatgatgtctgcgccgattttgtgctggatgcccatcgaaatctcagcggagaaacgatgtgcgtcaccattcaaaggcgacttgaacgtcacgccgtcctcatccacccaggccatgcgctccttgcccttggcgatgatgtcgtccgacttcatgccggtcacgtccattgccagcgtcttcttgaagccgacgcccagcgacatcacttggaaaccgccagaatcggtgaacgtgggcccatcccagttcatgaaacgcgccaagccgccggccgcgtccagcacgtcctcgcccgggcgctcgaacaggtggaaggcgttggccagcaggcactgtgcgcctagatccttcatctgctcgggcagcacggccttcatcgcggcttgcgtgcccaccggcacgaaggcaggcgtgcgaatatcgccgtggggcgtgtgaatgatgccggtgcggccgtatcgggcaccgtctcgcccaagcccgctggccgtggatggcaggcgggtgatcgtttcgaaatggaaggcgctgcggtcgccgggctgtccgggctgtgcgcccaacggatgttcaagaaggctgatcgtcatatgttcactttaggcagaagggccagaaaagggccggaaattgtgaagaactcggtttcgaggggcggatttcgccgctcccgaacgtctacttccgcttcaaggggctcccggtcaagtaggccggctgcaaaaatggcggaatggcgttaaatgagggcccttgatactcggaattgaccgcgcgaacagccccttgaagtgcaagtagatgttcccgaaacaggaaatcagcccctcgaagccgagatgcccataagactctgcgatgattacgcatagactttcaatcaacgttcagaaaacctccagattgactgcctttactactgaggtagcacacgagaagtggcaatgggcaagtgcccgaatagccgccgaacagacgtgataggaatttaggaaaaggagcagcaatggctgacgaatttaacccgcagggcgtcgaccagaccccgcggaataacgaaaaccccaatagtactgccgataccggcaacgccgagccgaagaacccgtttgtgggtggcgactcggttgatgccggcaacgccagcgattccagcgagcagcaagccccggtttcctcggccgccctcgctgccgatcagcagcctacgcaagccgctaccgacactgccgccaccgagcccatcccggactacgcctccgccaagggcgagagcacggtggtctcctcctcgccggcttctccggcagcaccggccgcaggccagacctcggccacaactccgctgtatcgtccggccccggaatatggcgcttatggtccgaccccgactcaggcacagggccagcagggcggccaggccggcagcaatgcccagcccacgcagcaattcccgttcggtcagcctgcacagcaaaccccacagggccagcagggcaaccgcaatccctactacaccaataacccgcagccgcagggcaacggcaatccgttcaatccgcccacgcagccgcagcagaacaacggcaacccgtttgccagccagtccggtcagaatggccggaatggccagcagccccagcagggcggtctgttcggtttcggcactcccggtaccggtacgccgaacggtcaaggcccggcccagccgggacagcccggtcagcccggccccgccaagcagggcatgtccaagacggcgagcaacatcctcatcgccgtggtcgccgccgttctggctgcgggcctctgcctgggcctcggctacggcgccctcaccagcggcctgatcaccttgccgaccagcaattcgctgtccaacgtcagctcgaataagtccggctccgggtccgccaccgccaagagcggcgaagcccccgactggcagactgtcgccagcgatgtctccggctccgtggtctccatccagaccgcgttgagcaacggcaccgccaagggctccggcgccatcatcgacaccgaaggccacatcatcaccaacaaccacgtgatctccggtgcccagcagattcaggtgacgcttgccaacggcaacatgtattccgccacgctcgtcggcaccgacaccaccaccgatcttgcggtcatcaagctcgacaacccgccgagcgacctcaaggccgtgaaattcgccgattccgacaagctcgccgtcggcgagaacgtgatggccatcggcaacccgctcggctacgacgacaccgccaccaccggcatcgtctccgccctgaaccgcccggtgaccgtgaccgacgacaacaacaacgagatcgtcaccaacgccgtccagatcgacgcggccatcaaccccggcaactccggcggcccgaccttcaacgcggccggccaggtgatcggcatcaactcgtccatcgcctcgaccgccacctcatccgactccgcgggttcgatcggcatcggcttcgccatcccgtccaacctcgtcaagcgtgtggccgacgaaatcatcaaggacggtaaggtcaagcacgttgccctcggcgtggtcatcaagtccgacacggttgaagccgacggtgtgacccgcggcggcgcgaccatcaccaagtccagcgccactggcagcgcggtcgtctccggcggcccggccgacaaggccggcctcaaggagggcgacaccatcgtggccttcaacggcaacgcggtgaacaacaactactcgctgcttggttacgttcgtgccgcggctttgggagacaaggtgacgctgaccatcgtgcgcgacggcaagaccatggatgtggacgtgacgctcgatcaggaggagtcgtcggtgaacggttcgtccagctccgattccaacggcaacagccagaataagcagaacaaccagaacggcaacggccggaatggttacggcaatggcaacggcaacaacgatggcggcaccggtgatggcggcggcttctccgacccgttcggcctgtggtaaagctggttcagcgcgtcacacggcgttgagcggtaaccgttgaacgccgtgtcagataggcaaaggtccgcagcagtgagcaactcctgctgcgggcctttcgtatacgctattgtgccctgcgcccatgccgccaacgtagtttcgatatccggcatgtcgcgcaacgctcgttgatagggtaggtcaagcactgagttcgggcggcgctccgaacaaagcgcataattcaatacaaaactgaacatttctttacgccgtgtatcggaaggtcgcgcgggagccgagcaaagcgaagccccaggcaaagccgccggtgggttaacaaggcgtgaccgcagcgccgattgcgcgggccacgcttgccgtaccgcaatcgactccgtatacgagcgtaaggagcaatgatgggcgcactcatcagattcttcaccaaaattctcgacatctgcaagcttgtgccgatgcttccggtcgtcgtcatcgccgcaattccgctggctttactgggcgattggcgtccgtggggcaatgcgatggcgattccggtacttggcaatccgggcttcggccagtggctggttatcgcattggtgctgattatcgtgattgacactgtgcgcggcatgattgacgatttgcgccacgggcaggtcggggttgatgtgctggccgtggtcgcgatcctctccaccgtggccgtcgccgaatactgggcaagttgggcggtgacgctgatgattacgtccggcgaggccattgaggaatacgcccaagccaaggccgagcacagtttgaccgcgcttatggaagccgcgccgcagaccgcacacgtcgtcaacctgcctggtgtggggtgtgggtttgctaccgataagggcgattcgtccgatggcttccggcgtgtgggcttggcgtcggctgcggccgccgcgcaccgcttcgacacggtgccggtcgagcaggtgcagctgggcgatgtactcatggtgctgccgggcgaaactgtgccggttgacggtgagctgctgtccggcacggccacgctcgacctgagcaatatcaacggtgagccggtgccgcgtgaagtgttcgccggcgcccgcgtgatgtccggcgcggtgaacggctcgactgcattgaccatgcgtgccacccaggtggccgccgattcgcagtaccagcgcatcctcgagctcgtggcctccgcgcaggagtcgcgcccggccgtggtaaaaaccgccgaccgcttggctgtgccctttaccgtgctctcgctgatgattgccggcatcgcatgggcgatgtccggggtgccgacgcgattcgcccaggtgctggtgctggccacgccctgcccgctgctcatcgccgcaccggtggcgtacatcgccggaaccggacgcctcgccgcagccggcgtgcttatcaaagcgcaggacgtgttggaaaaccttggccgcgtcacgcaggtgttcttcgacaaaaccggtacgctcaccgtcaagcagccgcaggtcgtgcgcgtcgagatgctgcccggcgccgcaacccgtctcaacgaagaccatgtgctgatgatggccggcgtggtggaaagctactcggtgcacatcctgtccaaaggcattgccaaggctggcgtggaggcgatggcccgactgcgccagcggttcgaggatggtcagcgcctatgccccgagccggaggccagctggcccggccatggacgggagtatccggtcgtcaagaacatcaatgaagacgccggcaaaggcgtttccggcgaggtgaacggccacgcggtgcgcgttggccggctgtctttcgcggccgccggggaggatggattcctggcggtcggcgaggctgcccccctcagcccgcgaagcggccagctccccctaagagggggagctcagcaaaaagatgacctgcgcactcgctttggcctgctgcagccggatgagatggcgtcgtatgtgtccgttgacggccggctgatcgcgcgcatcgtgctgcgcgacgtgccgcgcgccaacgccaaggcagtgctcgccaaactgcatgagttgggcgtcaccgagctcgccatgcttaccggtgacaagcgggcttccgccaatatcattgccagcgaagtcggcattgacgaggttcacgccgaactgttcccggaggataaggtagccgcagtcagggccgctacaggagccggcaaaaccgtcacgatgatggttggtgacggtgtgaatgatgccccggtgctcgctgttgccgatatcggcgtggccatgaccgatggcacgtccaccgccgcttccgaaagcgctcaggtggtcattatgaatgacaatatcgccgccgtgccgcgcgccatcgccattgcacgccgcaccaagcgcgtgatgcttcaagccgtaatcgcgggccttgtgcttgccaccatcggcatgattgccgccgcgttcaaccttatcccggtcgtcgtcggtgccttcctccaggaggccatcgacgtggtgagcatcctctgggccctcactgccctaattgatcgggactgattaagaatatgaggcttctgctgtttttgtaggtcagttgactgaccgggatggtcgtatgtcgagtccaccgcatcgaaacataatcggggcgatacggttggtgacgtggcggaaacggaaatcccacccacgaaagcagcaatagcatcggagttattcattaggtcgatttgacgtttattaggtcggtccttggtcggagcggcccttgaaaccccgccgttccaagggatggcttcagcactctccgacctaatgaacgaagaaatgacctaatgaatgcaatcgaggtcgtaaagagccgttggaggtgacgtctttaatgcctcaagggattcactgattgcacagaattcctactgctctgcggcggctctttaccgtcggccttctagccaatcgaggggcggaggtgacgcggattccttgtgagacataactatgctcaacccgactggttacgtactgttgctcacacggtataccgagaacattgccaattaaagtgagatggcgggcgaaccggtcatgataggtttgtccggatttgatttctatgagcatacggttgttaggatcggtgaaatccaacaaatccacctcgaccttgctggcatcgcggtagaagaataattgtggctcctgattggcgttcaaatgctgtttcatggtttccgcaatgatgaggttttcaaatatatcgccgaacttgggatgcgcaaccagtgcttcgaccgtccgaatgcccaagagatgacacagcaagccagtgtcataaaaatagagtttcggcgttttgaccacctgtttgcgtgcgttcgtgtagaacggcatgagatggaatgcgatgtaacttgattccagaatcgacatccatgcctttacggttcgcggacttacatcaagttcattggcgatgttggtgtagtttatgagtgctccggaactgagtgcgcaaagagtcaagaatcggcggaattcagccaaattgcgtacatcaagatattcggaaacatcacgttcgatataagtgtcgatgtagttcgagaagaacagattgagcggcattctcgtgtcataaatgcgtggataaccgccttgcagcataaacgtatccgaagtaagggcctgatccgcctcgcatgcttcttggaatgagaacggcaataacttgaccaatagggaaacccataatctgacattagcagtgctcgtaggtttcccaaacgcacaaactatggcctaatacacagaattcccaccactcgccctctgttgcaacggaaggctttgcgttaggctagagcgcgtgactgaatctgtgaacactgaacttcgtattgctgtaatcggcgctggcccggccggcgtctattcctccgacatcttcctgcgccagctcaagaaactgggcgaagaactcggcctcggcaccaaggcccgcatcgacctgttcgagaagctgccggtaccgttcggtctggtgcgttacggtgtggccccggaccacccgtccatcaagttcatcgcctccgcgcttgagaagacgctcgacaacccgaacatccacctctattgcgacgtggaattcggcaaggacgtgactcttgacgacctgctcgcccgctacgacgccgtgctgttcgccaccggcgcggtcaaggacaagccgctgaacctgcccggtgctgaccttgaaggtgtgtacggtgccgccaagttcgtcgaatggtatgacggttaccccaccggtgcccgcgaatggccgcttacggccgagaacgtcgccgtgatcggcggcggcaacgtggccatggacgtggcccgcgaactcatgcgcaacgccgacgacctcaaggccaagaccgacattccggacaacgtgtacgagggcatcggccagaacaaggccaaggtgctgcacctgttcatccgccgtggcgtggcccaggccaagttcagcgtgcaggaactgcgcgagatggagaagctgcccggcgtgcagctcatcatcaacgaggacgacttcgacctggacgacgagaccatcgaggtggccggcaaggacaagctcacccgccagatggtcgaggaactgttcgccatccgcgagatggccgaagacatggaagatgacggcgacgtcgacttcgaaggcaatccggccgaccgcaagtattacgtgcacttcaactccgcacccacggaaatcctcggcgaggacggcaaggtcaaggccatccgcgtggaacgcaccgaaaccagtgccgacggcaagatgagccgcaccggcgagttcaccgactacccggttgaggccgtctaccacgccatcggctacaagccggccgaggctcccggcatcacctacgacgagcacggcgctcacctggccaacgccaatggcgatggccgcatcaccaccgaagcggacggcggcgaagtgcgcgaccgtctgtacgccactggctgggccaagcgcggcccggtgggcctgatcggctccaccaagtccgacgcacttgccatcgtgaccaacatgcttgaggatctggccaaggccgccgaaggtggtcgcgtggccgaggatcgcgaccccgaatccatcgaccgactgctggaaagccgcggcgtcaagccgattgacttcgctggctggaagaaggtcgacgccttcgagcgcgccgaaggcgccaaggagggccgcgagcacaagaaggtcatcgagcccgaccagatgcgtgagctcgctctggcctgattgactatcagctcatcgcaccggcaactgcaccagcagcaatcggcgcgattgatacatcgataaataagaacgccggttatacgccagcgttcttatttatataaaagccagtgtcatgccagtcgagcaggccgatgggccaaacgatccaagcagccaaagcaggccaaacaagcaaagcgtcccgatcagaccaaccggtaaagcggtaaagcggtaaaacaggccaagcaaccgcactgtcaagcatcgtcaatctcatgtaaacaggctattccgatccccgccaaccgcaccgtaagcaccgccaacccccatccgattcacccctcggcgcacatccagccaatattcaggcagtgattttagtgtgagcctcatggatgccaaagtacgggtgcac

SEQ ID NO: 662 - DNA, 8948 bp, Unknown
  R14_15m  MAG No. k141_14349
atcgatatcggcgaccagcgtggctgctccggtcagtttcacgtcgctgtcggtgacgtccacgcgcagggtgccgccacgtacggtgatatcccagtggctgatgccggtcttggcccgcagcacaacgcctgtggcgcacaggccggtgccacaggacagggtttcgccgcagccgcgttcgttgacgcgcatcgtggcttcacccacgccggtgttctgatcgatgtcgtcgacccgcacgaattccacgttctggtcggattcgatggtcgggctcaccacgggcttgatgaccagatccagcgcctcgaccaccggcagggacgcgaaggcgtcctcgattaccgcgaccacatgcgggttgcccatatccacgaacgtgccgcgcgccgagccctcagcgccggggatggtgacctcgtaggcgtcggtttcgccgatcttccactcccccatttcgacctggaacacgttggctccgtacggcctcatattgccgcgtggcgtcagaatcttgacgccggcacgggtgccgaggcggaacggctcggtggagtcggccacgccctcgcgctgagcgaacaaggtgatggcgcgtgtaccgttgccgcacatctccgccaacgatccatccgcattgcgatagtccatgaaccatttcgcgcccccggccagtacgtccgaaagctgatcatcgcttaaatcagacacgaaatcaggcctggtcaggcgaatcaggccgtcaccgccaatgccgaagtgacggtcgcacaggaatcggacctcatcggcggtgggctcgaatttgccggacttgtcgaggtacaccacgaaatcattgccggttgcgtgtgtcttggttactcgttgcggaagactcatggcttttcagagtactctagggagcgaaacaacaccgcaaaacaatcggctttgtgatcggtcgcggcaacatacggttgcaggcatggctatagggaggattcaggcatgagctcttcggctccaatcggcgtattcgattcgggtcttggcggtatttccgtggctcgccaaatcgccaaggatatgccggccgagcgtgtgctgtattttggcgattcggccaacgccccgtacggcgtcaagacgcctgagcaggtgagggccctgagtttcgatattgtcgaacggttcgtgcgtcaaggcatcaaggccgtggtcatcgcatgcaacaccgccacttccgccgcggtgaacgatctgcgcgaacactacgatattccgatcatcggcatggagccggccctgaaagtggcgtgcgaccgtggtgacgtgccttccgacccgcatcatattccccagagggtgattgtggcggccactcccctgactttgcgtgagcggaagttcgccaagctgatggatcgattcgattccaacaacacgattttcaaggagccttgccccgacttggtggagattgtggaatccgggcggctcggcgaccatgacctggtgatgcgcacgctgcacggctacttcgaccagtacgacatggagcacatcgactcggtggtgctgggctgcacgcatttcgtgttttaccgcgactacttccgcgagctgctgcccgaacgggctgctgtcatcgacggcaatgagggcaccgtgcgccatctgggcgtggtgctggagtccctgggcaaactggcgcccgaagacgcgaccggcggcgtggaactcgccaattccgatctgtccgaacgtgttacacggctttcacgcgacctgctgaatgcgtgatcggatgcatgatgatgaataggaggctgatatggcactgaagaccgcgatgattgatgtgggcggcgggttccgcgcgattttcggctgcggcgttatggaccgcatgctggaggacggcatcgacgtggacatgtgctatggcgtttccgccggcgcggccaacatgacctcgttcatcgcccgccagcacggccgcaaccacaccttctacaccagatacgcgttccgcaaggagtatgcgagcgcggaaagcttcttcaagaaccacaactttgccaatctcgactacatctatggcacgctgagcaatcacgatggcgagaatccggtggatttcgcggcgttcgaggccaatccgaccgggttcaccgtggtggcctgcaatgccgaagacggctcgaccaagtacttcgacaagtcacgcgtacgcttcgatgatttcgacatcatcaaggcctcgtccgccgtgccggtggcctgcgagccgtatgtggtggatggtgtgccgtatttcgatggcggcatcgccgatccgatcccggtacagaaggcgctggatgacggctatgatcgcgtgattctgattctgtcccgcttgcgtgacgaagtgcgcaagcagcagaaggatctggctccggcccgcatcctcgaacgctcccaccctgccgcagccgagaagctgcgtatgcgctacaagacctacaacgacgaactcgaactcgccaagcattacgaggcggaaggcaaagtgctgatcctcgcacccgaagacctgtatggtctcaacaccctgaagaagaatttcgagggcctggaaatgatgtatcgcaagggatatgcggcggccgaagccattccggcattccttcaggcatagcacaagcccaaaaaacaacgattctgccatagcccattacacaatggcgcaatgacgtcagaccccgtccggcgatggcacaatcgttgtttttccgtgtcataagcccatcaaacgcggtgaagcccctcactgggaggggcttcactgatacatacgccattatgcggtctagcggccacaagcaccgctatttgccggcggcaggtgcggcgtcgttcgtctcggccgcggtgagcatggccttggtgacctgctcgtagaggtcctggtaaccgccgggcgtggaggcgggcagcaccacggtcttggtgttcttcgattcggacaacgaacgcatcacgtcaagatactggttgaacagcaccacgttgttcacatcgttgatgtccatgcccacggcctgcagactcttgatctgatcgacgatgccattggcgatttcacggcggtagttggcctggccctcgccctgcagacgggtcttctcggcttcggcggcggcctgcgtctcgatctggatgcgctgggcttcggcacgctggcgggtggcttccttctcgcgctgggcggcgttgatggagtccatcgcgttcttgacctgcgggctcggatcgatggcggtgatcagcgtcttgaccacggtgaagccgaaacggctcatctcggcgccgacggttttctgcacgtcgaacgccacatcgtcctttcgggcgaaggcgtcgtccaaggtcagagcggggatggcggagcgcaacgcatcctccatgtagctcctgagctggccagccggatcgcgcagctcgtagtaggcggtggccacgtcgttcgggttcacgcggaactgggtggaggccacgacggtcacgaacacgttgtcaagagtcttggtttccagctgcacgttgagctggttgacgcgcatgttggtcttcatggcgatgcggtcgacgaacgggatacggatgtgaatgccggcgaactgaaccttcaggaacttgccgaagcgttcgatgatgtacgcctgctgctgcggaacgatgaacaatgcggcgcccagcagcacgataagaacgactaatagaattagcaccaacagcatggttccgcccaacatacttgcgatggtcatataaaactcctctcacaagggtcaagcacggcatatcgttgtgccgcgccccaacaccatccatgctaccatcgcacgcccgggaactgatagctctcacaggcaagtccaagaaagcgaacgtcagatttcatgttccgttcactccggcagccacatcttgtgcactaatgtttgaatcagccaagtcgcacgtcagaaacaacaaagtcgggcatttcaaccaaggaaacacccgacttgaatcaagcactgccgccatataaacacatcagaagtgttcgttgagcttcttctcgcagtaatcctgaagccatccaagcaacgtgcagaagagcaagtagatcaagcccacttcaatgtataggaccagcggctcgtagtaaatcgccacaatgcgctgggccgtcatgaacatttccaccacggtgatgttcgccgcgagagacgtgtccttgaccaatgcgatgaaggagttgaacaatgcagggaaggcggagcggaatgcttgcggcagaataatgcggcgcataatcgtcacatacggcatgttcgccgccaagccagcttcaagctgtcccttaggcacggcaagaatcgcaccacgcaatgtttcggcggcataggcgcccacattcagcgagaacgcgattaccgcggaaggcaatgccggaatcgtaatgccaacggacggcaatccaaagaagataacgaacaactgcaccagcaacggcgtaccacgaaacacccaaatgtagaaccacgcgatttgggaggccacaggtactttagccacacgcaccagcgccaccacaatcgccagtatcaaaccgagagcgaaggaaatcagcgtcagcggaatggtcacagtgataccgggaatcagtagcttggcaaaggaatctacgactattccccatactcgtgcgtccattggtcatcctttgttgtgtggtatatgttgcgtctgctcgtaatcttcacgaggccagctcatatttcccggctccccctaattacaggagagccgggaaacatgtcactcctgagagaagtcctcgccaaagtacttttcggagatcttggtcaatgtgccatccttctgcagcttgacaatggctttgttgacttccttgaccaagtcatcgctgcccttgcggaacggcaggtaggcggccggagtcttctcggacttggcggcaatcttgatgtccgcatccggcttctgcttcaggtagtcgagcgcagcaaggccatcgttcaatgacacatctgcacgaccggacgtgatggcatcgacctgctgaccgaaatcgttaacctgaacgatagtagcgcccttctcctgagcggtcttgttccagtttgaggtaccggtttcagcggcgcgaagccccttgacgtcatcgaacgaagtgacgttcttcgggttctccttggaggtaatgacgacaccgtaggagtaggtgtatggttcggagaaatcatacttggccttgcgctcgtcggtggcggaaatctgatcggcaaccgtatcgtacttcttggcatccacaccggcaagcagggagtcgaagctgccctcggcaaactcggccttgataccgacctccttggcaatggccttggccacctcgacatcgtaaccggtcagctcattggttttggagtcatggtaactgaacggagcataggtgccctcagtggcgaacacgattttgccggcctgcttgacctgctccaatgcactggagttggaagcggaagccgaaccgcatgcggcaaccgaaaccagcacggcgacaccggacagcaaagccgcagccttgcgaatcacttgattattgaacatgacaaacccctctcttgatattgtcacaattaattacaacagccgtgaaacgcctctaccgagtcaccggaatcatcagcacattgttggttgaagacaggaactcgacggtacgctcctcctgcggatgttcgaagatccgcttcggatcaccctgctcgaccacatggcctccttcgatgaacaccacatgattcgatgcctcataggcgaaccgcatctcatgggtgaccatcagcatggtcatgccttcgctaccgagttgcttgatgacccccagcaccccgttgaccatttccggatccaatgccgaagtgggctcgtcaagcaccaacagctcaggattcatagccacggcgcgggcgatgctcacacgctgctgttgcccgccggacagtgtgctcggataccgatcatgaaaatcggcaagtcccacacgatcgagttgctcaatagcgatcttgcgggcttcatcaggcttgattcccttggaatacaccaacggttcggtcacattctgcaatgccgtcttgttcaaaaacaggttgtagttctgaaacacgaacccgattttcgaacgcaccttgtgaatgtcggcagatttggtagtggtcaaatccacaagaccatcaccgaaatcgacggtaccggaatccgcgtgctcaaggaaatccagaatgcgcaacagtgtggatttaccggagcctgaggggccgatgacagtaaccacattttgtcgaggaatgtcaagatcaagcccatccagcacggtggtgtcggcaaagctcttgctcactcccctaatccgaatcatcccgatactcccttttcgctgctgttatgcacgtcaacgctcgttcgcgaagcacaatcccttaccgtagacgcgcttgctcacctgtgtttcggcgtggttatatccagtgcctatggagtgctattcacaccaatgaataacacatcggacgccgacgtattgttcgctcacagatgcagcagatcgtcaaactcgtacaactcttgtctttacttgatattcagctcgttgagcttgttcttgatatccacagccgacggttcgacctggaaagtgccatcaggatagagcaccacgggaatgtgctgctggccgctgatggccaccgcacgatcggccgccccatcctcggtttcgatgtcatgccacgtatattcggtgccaagctcctcaagcgtgttcttcgcctgcttgcaatcaccgcaccatgttgcgccatagacgtcaatagccatgtcctgttccttctttcgtaatacaacaacccaaattcacaacgccccaagaataacagcgcaggtttttctcagaacgaacaattatccgcatacgtaagcgatacacgtcagtatgcgttggcaatggcttggtcaaggtccgcaatcaaatcatcgacgttttccaatccgatggaaagtctgatgagattatcgctgactccggcggcgatgcgcgcatccaaaggaacctcgcgatgcgtgatgcgcgcaggatcgacaatcagcgaacgcgcgtctccgatgttcggcacataggagaatacctcggttccgtcgatgattcggcgcacattatcggcgctgccatccaccaggaacgacaggatctgaccgacaccgcgagggaaatacttgcctacaagctcgtattgcggcgtatatcccaatcctgaatagttgaccttcatcacatgcgctgcatgattcaaatgctctgcgatccgttgcgcggaggcaacctgctggctgacgcgctgaggcaatgtttccaaaccaatcaaggaaagatacgcattgaacgggctggccaccgcgccgaacgtgcgcagatatttgatgcggatgcgcttgatgaatgcctcgttgccgtatctttcggcaaaactgtgccattcaccgttgcgatcatcgctgatgacctgctgccgtgtggtgaattgggggaatctgccattcgcccagtcaagatgaccgccatcgataaccgcgccgccaatcgcattgccatggccggtaatacctttggtggtggaatgcacgacgatatccgcaccgaactcgataggccgcaacagatacggcgtgggcacggtgttgtctacgatcagggcgatgccgtgttcatgcgccagctgtgacagcggctcaatatcaaggatttccgtagaaggattggccacggtctccgcgaagatcgctcgcgtatccgggcctatcttcgattccacttcagccaagtcgttgatgtgctttacgaaatcggtatggatgccgaattgtggaagaaaatcaccgagtgcatccacgcttgctccgtacaagttgctgggagcgatgattctgccgccgccttcgcccacgcacatcagcgcataactgacggccgccatacctgagccgaccgccaccgcaccgataccgccctccaatgccgcaagacgcttttcgagcacatcaaccgtggggttggccacacgtgagtattcgaatccgtcgatgagtccgcctgcgagcgcatcaccacgctgcgcattctccaaatcgaatgcggcggaggcgtagatgggcggcaccgccgcatggccatagtccgcggggtcataccccgcatgaattgcccgcgtggcaaactcacctgttccggacgtgatactcataggtgtttccagccccccaattcatgtcggtaatagtcttcgatggagcgtgttgcgagcggtcaggcaaacgcttcttccgttaattgcgcgaacacatcgcagtcggcgtgacgtttgaggtattgttcgtaggcgatgtcgaacgcctggccaagatcctcaatcaggtcggcggcatcctcaatacccaaggaaaggcgcacaagctcgtcggtgatgcccaccttgaggcgttcttcgcgaggcagctcgaaatgggtcatgcggcagggcagctcggccagtgattcgacagcgccaagggagaccgccaatcggaagatgtgcaggttgttgagcacatccgcagggtccacgccaggcactacttcaaagctcagcacgccgccggcgcccttcagtcccttggcggcgagtcgctggtcaccggcccccggcaggcccgggtaatgaacggacttgaccagcggatgcgcgagcaggtaccgcgcgatggcattcgcattctcctgctgccggtccatgcgcagggccaatgtctggatgccgcggcgcaccgaatcgcattcagtgggcgccagtacccctccaagacggttc

SEQ ID NO: 663 - DNA, 12898 bp, Unknown
  R14_15m  MAG No. k141_14724
ggttacaacggtggctatcagggtggtggcgctggatactcccagcagcctgccgctcccgccaacccgtccgctcctgcggccgacccgtggagcaatgccggtgcatctgatgccggtagcttctccacgttcggcgcttcctccgatttcggcggcggcgacgattccgacccggagttctgatcagtacttacctcctcgctgccagcagcaatcaatatcaagatttataaggagaacatcatgtcacgtaagaggccgcaaccgccggtcaagccgttcaagaagaagccgaacccgctgaaggccgccaaggtcaccgagatcgattacaaggacgtcgcgctgctgcgcaagttcatttccgatcgcggcaagattcgttcccgtcgtatcaccggcgtgaccgtgcaggaacagcgcgagctctccaaggcgatcaagaacgcccgcgagatggccctgctgccgtacgccacctcgggtcgctgagctagggaggctttgaacaatggctgaaaccaaggttattctcaccaagaccgtgtccaacctgggccactccggtgacgttgtcgacgtgaaggccggctacgcccgcaactacctgttcccgcagggcctcgctttcgcgtggaccaagggtgctgaggctcagatcaccgctatgaagcgcgctcgtctggccaaggccgtcgccacccgcgaggacgccgtcgccgctaaggccgccatcgagggcaccaccgtcgagatcgccgccaaggtgtccgagtccggcaagctgttcggtggtatctccaacgaggccatcgccatcgctctgtccgacaaggccgcggtgaacccgaaggccatcgaggtcgagaccatcaagaccaccggcgacttccccgccaaggtggccctccacccggagatcaccgcttccttcttcgtgaaggtcgtggccgagtgagtcattccggcctagtgctggaatcacacagaccaagagtctgagcttaagcatcatcccccgtgcggttcgcgccgcatgggggatttttgtattagcaaaaacgccggaaataggcgcgacacgccgagagttgcatccgcttcaaatctgagtatatttaacacctgttgcaaggaacacttcaacatctaaccaagcccctgtagctcagttggttagagcagctgactcttaatcagcgtgtccagggttcgaatccctgcgggggcacagacaaccggaatcgaaagattccggttttttgttttttccagcatcagtccgtagctggtgcggaaaggccgtcttcgcgcgtgacggccggacgtgtaaggagcggcgtcatgtctcagatattcgcgttcaccgtatccgaccccgaaggcatgcacgcccgcccagctggccggttggttgccaaagcgcgggaatatgagtcgaacatcaccgttgcctacggcggcaaatccgtggatgccaagcgtatcttcggtgttatgggacttgatgttcaacaaggtgacgaggttacggttcgggtgcagggcaacgatgaagctgtcgctgccgcagagttcgagcgattcctcaaggagcacctgtaatgagaacgatacagggcgtcggcgtatccgctggcattgctatcggcacggtccgcgtgctcgccgccgccgatcatgctgtagaacgccgcgtaatcgacgatccgcaggctgagatggatcgattccgcgcggcccgtgacatggccgtcgctcagctcaagcaactgcgtgacaacgtcgccgctgagttcggcgaaaacaaggccgagctgttcgacgtccatcggcttatgctccaggacccggactatgcgggatgcgtcgaaggtttgattgcgcaagacaaggtgaacgccgaatttgcggtgaagagcgtcgccgaacagttcgccgccatgttcgctgcgatggatagctcgaccatgcaggctcgagccgctgatgtcgaggatgtttctcgccgcgtgatgaacgtgctgcaaggcaaacgcgatagcacggcgcaggatggcagtatacaaggcgatgctgtgcagaacggtactgtgcagaacgggattgcgcagaacggcgaaagccacatcatcttcgcccaagatcttgctcccagcgagaccgcgcagctcgaccgcgctaaggttttgggcctcgtgaccgccaagggctcagcgaactcgcacaccgcgattctggcgcgcacgatgggcctgcccgccatcaccggtatcggcgacgccttcgacccgactgatgacggtcacgttgccgtaatcgacggcgccagcggtgcggtgttcgtcgacccggacgaggccacgctgaccgagtgccagcgcaggaaggccgaagctgaggaacacctgagcctactacggaagctcaaaggcaagcccaccgaaaccaagtccggtcagcgggtccacctgtacgccaacatcggccggccctctgacgtagccgccgtgctggccaacgatgctgagggcatcggcttgttccgcagtgagttcctgtatctggaacgcgaggactggccgaccgaggaatttcagttcgatgcatacagacaagtcgcacaggagatgggcgaccgtccggtcatcatccgcacactcgacatcggcgcggacaaacaggtcgactacttcaatctggaccacgaggataaccccgcgcttggttaccgggcaatccgcatctgcctgacccgcccggagattttcaaagtccagttacgcgcattgttgcgcgcctcagcatacggcaatatcgccattatgctgcccatgatcacctcggtgcaggaggtgcgcgacgccaagcggattcttgaagaagccaaaagcgagctgcgcggcgagcacaccgacttcaacgagagtatccagatcggcgtcatgatcgagacgcctgcgtcggtcatcatggccgacgagctggccgccgaagtcgatttcttctccatcggcaccaacgacctgacccagtacacgctggcctgtgaccgtcagaccccgagtctcgaacgctttgccgacccgcattcaccagctgtgctgcgcatgatccagatgactatcgaggctgcccatcgtcatggcatctggtgcggcatctgcggcgagcttggcgcagacctgagcctgaccgatacgttcctgtgcctgggaatcgacgaactgtccgtctcgcccaccagcgtcctacccctgcgcaacgtcattcgcaaccactgagagtcaaggtcgcttcggctgattccggtggcttttttgggcattgcattcggctggacattcgacatcgcatcctgccagcatttcgtcgtggggcaaagtgtacaatcgccacgtttgctttcgcgcccagcgtaaatcgcgtcgccggctccgcgaacggatttccaatcacacagaatgccgtgaacagtcagccatgcctgttgcgcggcgaagagaaaagaagaagcagtggaatactctctctttaccaagctggccgccgagttcttcggcaccgccattctgatgatcttcggcaacggctccgtggccaacgtcgagctcaagaacaccaagggtcaccacgccggctggttgaacatcgccatgggctacggcttcggcgtcatgttcccggtgctcatgttcggtggcgtatccggcgctcatatcaacccggccatgacccttgctcaggccatcaacggcctgttcccctggaatgaagtgctgccgtacatcgtcgcccagctgctcggcgccctgcttggccagctcatcgtctacatcacttactacccgcactaccaggagaccgaggacgccgaggcgattctgggcaccttctgcaccactgacgcggacaacaagaaggtcaactacttcctcaacgagatgttcggcacgctcgtgctggtgttcggcgcactgtgctgcctgacgctgccgtggggcaaggccgacgacgccgcatcctccatcgtggtcggcttcattgtgtggggcctcgtgacctccatgggtggcccgaccggccctggcctgaacccggcccgtgatctcatgccgcgactgctgcacgccatcctgccgattccgaacaagggtacgtcccgctggggcgaagcctggatcccggttgtggccccgattgtcggtgccattatcggtgtctggctgtacgtgttcttcttcgccagctgattcgttgattgattcatgcatgcaaatggcctccgctcgttttgggcggaggccattgtcgttgaatcaggtaaacgcagaggctactgctccaggaacacctgcggggccttcatgaagttcgtggcacagtgttcgccgcagaagtaataggacttgccctcatactcgcgcgtgatcgcgtcggcgttcaccgccacggtcatgccgcacaccgggtcggtggcggtttcgccgtccgcgggggcggtgtggtgcatgtgcattcccatatccatagtgttctccttgttggttggattattggattggtcagatgcgtgattggtgtgattcagcgtggtgcgatcgtcgatgatgacggttggctcgtgaggcgcgttggatgtggcggagccggtgatgttggcggcgttggctgattcggccgatccggctgattcgacatccgccgtgctgctgcccgagccagcggtgccatcgacaacgcccgcgttgatgttcgacccatgcagcctgttcgcgttcagcaccaggcacactgagctcaacgccatcgccagacccgcgatcatcgggctcaacagccagccggtgaacgggtagagcacgccggcggccaccggaatgccgatgacgttgtaaccgaacgcccagcccagattctcccgaatgttgcgcatcgtggcgttggacaggttgatggtcttgatgacgccgcgcaaatcgccgctcatcaaggtcacgtccgccgactgcatcgccacgtccgtgccggtgccgatggcgatgccgagatccgcctgggccagtgcgggggcgtcgttgatgccgtcgcccaccatcgcaatcagagtgcgggattgcgcggccgtgcgggaggtgccgtccgcggacttgacggcggcctcgtcgcgttcgcgctgcagtttggcgatccagtaggccttgccgtccggcttgacctcgcagatcaccgtatcgatgccgacttcgcgggcgatgcgcccggctacctcggccttgtcgcccgatagcatcaccgtgcggatgccgcgtgcgcgcaacgccgcgatggcctcgcgcgagccttccttgactgtgtcctgctcgtagctcggcttgtcccagtcggcggccgcgtccaccacgccgcgcgtgatggtgccggtcttgtcgaacaccacggtgccgatgcgacgcgcctgttccagcgccttggcgctggtgaccagcacgccgttggtggcgcccaagcccagtgagaccgtcaccgacagcggcgtggccagtcccagcgcgcacgggcaggcgatgatcagcacgctgaccgcggtgaccagcgcatgcgccagttgcggcaccgggcccaacgacacccagatggcgaacgtccagatggcgatgatcatcaccgccggcacgaaataccgggcgatcttatcggccagctgctgcaccggcgccttggtcgcctgggcgcgggccaccatcgccgcgatctgcgagagtaccgtgtccgcgccgacttgggtggcgcgcatcacgcagtcgcccttgagcagcacggtggccccggttaccggatcgccgacggttttggaaaccggcttggattcgccggtgatcatcgattcgtcgatatgcgcctcgccggccacgatgatgccgtctgtgggcacgcgctcgccgttcttgacgaccagcaggtcgccggtggcgatggcgtcgatgtcggtgtccgtgaaatacgccggattgcgccattcgatgccgtccacattgtctgcggaagtggcgttgagtttgtgcgcggtgcgcgggcgcagtttgatgagcgactgcaccgccttgccggtgccttcgcgggccttggtttccagaaggcggccgaccagcaccaaggtgatgaccacgccaaccgattcgaaatacggttcgcgcgagccttccgggaacacccacggggcgatgcaggtcaccagcgaatacaggtaggcggccgaagtgcccagtgagaccagcgagttcatgtcgggggagcgatgcgccaacgcggggaagccgaccgtgtggatcggacgcccgcagtagaacatcaccggcgtgatcaggatggcctgcaaccacgggttcaccatccaatgcggcaccagcgtgggattggccatatgcagcatggtgacggcgaataccggcaacgtcagtaccgcgcccacaatcaccagcttcgtcagcgccttgatctcattggcgcgttcagccgcctcccggcgctccccctccgccgcatccacggcggtaggtgccgtatacgaagcatcaggatgaggaaggggcgtgttctcatccgagccgtcctctccctcaaccttcaacatcccatgcaccatattcatgccgcacgcaaacggatactcgcccggcggcaacgccggcagttccacgtcggtggtggcgttgcccggcagcatggcgtcaagtcccagatcagcaaacaccacatgcgaggtgcattcgccggtctcctgccggtcgaaggctagtgtgatcggcgtacccgcacgcatgctcaccacggcgggggagtacccgcccttgacagtgattgttgcggattggcgttcgccggaagcgtccatggccccggccgttgccttctgcgttccgaagaagaatcgcaggaccagccatgtcaatgcggccgccactatcagcgccgcgacggtcgagaagatgctgaactccataactgttccttcccattcctaatgcactgaataacagtgtataccctatacccctagagggtatataatggggtgtgttcagctgacggataagtatcaggggggtttgcgatgcatggttatgacgaagacaaggccaaggtcatcgcacgattacgccgtatcgaagggcaggtgcgcgccatcacgcagatggtggaggatgacaaatactgcatcgatattctgacgcagatttcggcgtcgaactcggcgctgaaatccgtggcgttattgctgctggacgatcatctcaaccattgcgtgcggcaggcgtcggtccagggcggcgaggtggccgatgaaaaacttgcggaggcttccgcggccattgcgcgtctcgtcaaatcgtgacgagttctgccgcatgatgacgcgcgctggcaaatcatgaaaggccgtctgacgctcggatacgacacagcataataacggttgatgctcgactgtgataaggccaagcgtccaatgtgggctgctgggcgtccgtttaacggcttgaaatcgtcgagttcggtaaaaatttaccgtcattcaccatcgatgacatactgggtaccatgtttgagcaaataggaaccgtgattatcgtcatcgtcgtgctagtggttggtgcagggcttggcctcttcgccggcttcgtgctggggcgccataagggtcaggagatggctcgaggcgtcaaaagcgaggagctggaggaggccaagacctcgctggagaatgcgcgattcgagaatgctgagctcagtgctcgcaatgctgccgcacaggctcagattgaaggcgtgaaccagcaattggctttcgccaagtcacaacttgcccaggcgcagcaggctgagcagattcgcattcagcaggaacgtgagcgtgcggctgcggaggcggaacggaagcgtcaggcggatgctcgggacgccgaggccaagcgtgctgaacaggaagcacgtttgaaagaacagagcaaggtgctcgaggcgcttgcgccagtggccaaaaatcttgataccttgcagaacaaggtcacgcagatcgaagagggccgcaagagggaaatgggcgcattgggagcccaactcaaggggctcaacgaccagcaggcccgtttggacaaggaaaccagttccctgtccgccgcattgcgcaacaacaaggtgcgtggcgcgtggggcgaggcccagctcaagaacattgtcgagtccgccggattgctggaacatgtcgatttcgacattcaggtggtggtcacggatgccgatggacgtacgttgcgcccggatatgatcgtgcatctgccgggaggcaagaccattccgattgatgccaaagtgccttatgccgattaccagcgtgcctgcgagatcccggacaccgccagccccgaggatattgcccgccgcgatgatttgctgcggtcccatgccaaggcgttgcgcgagcatgtacgtgctctcggcgaaaaggcctattggaatgcctttgatgtggcacccgattttgtggtggccttcatccccaatgaggcactattgcaggccgcgctcgaagccgatcccacactgatggatgatgcgttctctcgcaaagtggcgctcacctcgccggtcacgctgtgggccgtgctgaaatccgtggcctatgcctggcagcagcagtcgctcaccgatgacgccaagcagctgttcgatttgtcccgagaactttacgaacggttctccacgttgggtgattatgccatcaaattgggcacccagatcaccaagacagtcagcgcttacaacaagttcgcgtccagcttggaacgccgtgtgttgcccaccgctcgcaagctgcaaaaaatcgaaccgaccaagatcatcgaggaagtaccgatcatcgaatcagacaaaggcaatgtgagcgaactgtccgcccctgaagtggtgccggccgatgaaggtgatactcatctgactgcctcaggcgatagtctggagtcatgactgaatcaggattccgccccactggtaccccggacctcgccgtcgcgaagagccacaatgactttgccatgctggagccgcgtgaacagctagccaccttgctgagggagcatgtggtgggccgtccgttctccgaacttgccgcggtgacttttgaccaccgtgccgccaccgtcatgggccatgtactgattgacgctttggaagatgcgggctattcggttgatgacttcgatgctgttggtgccttgaccgcagcatctgtgcccatggtgtccgccatgatccaggccgccgcctctcgtggcgaggacctagacggattcgtgatggacttcgtctacccgtccatcaagggcccctccatcgaaggccgccgtgtggtgctgttggatgcttggctgtccgaaaagtcgtacgtgcagaccagctcgctggtcaccctgcgcaacggcaatgagctgagcctcgactttggcatagtggagcagctgggtgccaaggtcgtggccatcgcctcgctggtcggtggcggtgccaaagacatcaatgtggtcaacccctccaccggcgacgagcaaacgctccccttcatccaggtcttcgacgaatccgaactgcggtaaatccacctttgacttccctcgcataaagtcagccgggctgagccgcgaagttgactaagaggaaccggtgaatagcgttatcgaggagaaagattgcacgcacccaaccagatttctttggctgccaaagcttcaggtgaaccggaattccgtgaaatcggccttgggccgtggtctgagacccatcccggcgagcctcgtcccgacgatccgacttctccgaattatgacggtcgtttcgactcggtgctgttgaacgacggcgaccgccgcaacgtattggatcgttaccgctactggaccgtcgctgccattaaggccgatcttgacgctcgagggcgtcatgacttcgaagttgcggtggaaaactggacccacgatttcaacatcggttccatggtccgcaccgccaacgccttccaggccaagcgcgtacacattgtcggtccacataagtggaatcgcaagggcgcgttgatgaccgaactgtaccagcacgtcgaacaccacccctccatcgccgaactggtggaaagctggcatcatcgcatcgccggtgaaatcgcctatgaacgagccaaggccggtgccgccgccatccatgcgcatgatgtggctgtggatggagacaacaagcaccttcatgagctgctggccgaaatcgatgcttgtgatgcgcgcatcaaggagcttcaagccgcccgcgtcatcgccctcgatatcattcccggcgcagtgccgatggaaacctataccttccccaagcggtgcctgctgctcttcggtgcggaaggccccggattgagcgagaaggccctcgaattggccgacgatgtggtctacatctctcaattcggttccgtgcgctccattaatgcaggcgctgcggcggccgtggccatgcacgcatggattgcccaacacgccgtatcaggcgtgtagccatgcgccgacaatcctgccgcatctgcccaatatgggccacattagaggcatgatctacgccaccaaatccatcgccgcggcattaattcgcatttgccgccggcatcgtcggcatcctgctcgccgcaggcatcagcagctccgcgcagtccacactggccgaagccgttaaaccggactactggattcccgaatggtggcagtccggcctgattctcatcgcctgggctgccgccgcatggatcggcggtctcatcatcaccggaaaagcggatatcagatatcaaataacgcgggttactgctttggcggttctgccggttcggccatggtcctggcagtttgtcatggctatggctttggcggttctgcagtgaccatggttctggtgactctgaccccatggatttgaccaccgtggttcactgcgcttaaccagctcccatcactgttccagcatgaggtatgccggctgcccgcagcttattgagtaaaggatgttgttgcatcacctcctcataggtgaatcggacaatggtgtcgactttggcccggtacagtgccgtctcccgttctttctccgcctgaactgcaccacgaacacccttgcggtcattcatatccgggttcacatatttttcatagccatcgaattcgcccacgataagccgattctcaggtagccgccagaggaaatccacgcgatacagagcaccggtttgcgggtcggtgatgttttgttgcagttctggggctaataggccgcctgcgatgatggtgcctcgtccaagtgactcgccaccattctcactcgccggattggcataatgcagtaggcggaatatcggcgtgcaatcacgtcgcatagtgctgcacacattcagaatgtccgtgatggcgacgccgttgcgcagcgccgaatcgataatgggcagtgcaaatcggaagtcgacggacagcccgcaatccaccaccgttctggctttgctggtcaccgggagtccattggcatattctggcgtgctgcttgacgtgaagatgcgtttgacctttgcactgctggcgttggggcctcgtgatgttgtggcgagagtgatggtgccagcatgaagatgccattggtgttcaaaatcgtggatggccgctgccgtgaccccggcgaacacccaatccggatgtctgttatgaagagttcgtgcaatatgtctgatacgttcgtcgggttgcagcgaatcccagtattccgaagcggcgtacatgttggggaatacacgtttgagttcgcgcgcctgcacgcgccgagccagcgccgagcggtgtgccttggttgttccataagcgcactgttgcgttgcttcagccttcgtgatgagtatgtccactgctttgtgatgtttcatgattcgacggtatgccaatggtgaacacggtgtctatctgtctggggttatgtggttctagcttcggtgcctagatgtgtgtttttgcctgattatcaggcatctgaccgtattggactgattatgtggattcttttgggtgggtatgcaaaatgtggataactggcgaggtgcgcagggcgattgtcgttcatatgttcgatgtaggtgtgtttgggctcattgtgagcttattagggtggccatgcagatacttcagtggggcacatttgcggttgggccgtggcgttgcctcgctgcggggcgtctcagcggggcgttttattggttggaccgcggttttgttttgctgggatggctgagcggggcgtttcatcggtcagctcgcggttttgctctgctgcgagtcgtctcagtaaggtgaacttgcggtccggcaacggttttgccccgccgaagaagccagcagcggggcaaatgctcgaccggcttgagcttctgattcgctgaagggctccagtaggcgggaaaatgaggcttcccgacaactgcgtgtcacatacggctcatatagttatggccatgccaacattttcacgtgaagaaatcgtgcatttgggcgatctggcccgaatcgcgctcaccgatgaggaaatcacccgtctgcagggcgaactgaacgtcatcgcagactccatcaacaaggtccaggaagtcgcctccgacgatgtgccgccgaccgccaacccggttcctctggaagcctacctgcgcccggacgtcgccgaaaccccgctcacgcaggaagaggcgctcgccggtggcccgaagaccgaggctggcatgttcgtggcaccgcgaatcctgggaagcgaggagtaatcgatgagcaacgaa

SEQ ID NO: 664 - DNA, 2996 bp, Unknown
  R14_15m  MAG No. k141_15616
ctacctgcgcccggacgtcgccgaaaccccgctcacgcaggaagaggcgctcgccggtggcccgaagaccgaggctggcatgttcgtggcaccgcgaatcctgggaagcgaggagtaatcgatgagcaacgaaaccgcaactctcgtcaaactgtctgctgccgagcaggccgctgccatcaagaagggcgacgtcacctctcgtgagctcgtcgaagcccacctcaaggtgatcgaagccgccgagccgtccatcaaggccttcctgaaggtttccggcgatgtggctctcgagcaggccgacgccttcgacgccaagtccgccgaagacaaggccgccctgcctgagctggctggtgtgccgatcgccatcaaagacatgatcgtcaccaagggcattgagaccaccgccgcctccaagatcctcgagggctgggtgccgccgtacgacgccaccgtcatcgaaaagctcaaggccgccggcatgccgattctcggcaagaccaacctcgacgaattcgcccaaggctcctccaccgagcactccgcctaccaaaccacccacaacccgtgggataccgagcgcgtgcccggcggttccggtggtggctccgcctccgcggtcgccgcattcgaagccccgctcgccctcggcaccgacaccggcggttcgatccgtcagcccggcgccctgaccggcaccgtgggcgtcaaacccacctacggcggcgtctcccgtttcggggccatcgccatggcctcctcgctcgaccagatcggcccggtctcccgcaccgtgctcgactccgcactgctgcaggagatcatcggtggccacgacaagcgtgactccacctccatccccgaaggcccgcgtccgatggtcgccgccgcccgcgaaggcgccaagcgcgatctgaagggtatgaaggtcggcctcatcaaggaactcggcggcgacggcttccagcccggcgtcgaggcccgcttcaacgaggccgtcgacaagctcaaggagatgggtgccgaggtcgttgaggtctcggttccgcacatcggctactcgctgggcgcctactacatcatcatgccgtccgaggtcagctccaacctggcccgttacgatggcatgcgctacggcctgcgcgtgatgccgccgaccggcgtgcctcagaccgccgccaacatgatggcctacacccgtgaggccggcttcggcgacgaggtcaagcgccgtatcatcctcggtacctacgccctgtccgccggctactacgacgcctggtacggttcggcccagaaggtccgcacgctgatcatccgggacttccacaacgccttcgagaaggccgacgtactcgtggcccccaccagcccgtccaccgccttcaagttcggcgagaagatggacgacccgctggccatgtacatgaacgacatcgccaccattccggccaacctcgccggcgtgcctgccatgtccatcccggccggcctgtccgatgacggcctgcccgtcggcttccagttcatcgccccgcagcagcgcgacgaagtcatgtacaagccggctgcggccctcgaagccgcgctggaagacagctggaacggcccgatctggaacgacctcaagaccccgtggcttgacggtctaggcaagtgagcatcggaaggaaagaaacaacatcatggctgaaaaactgatgaagtacgccgatgccaccaagaagtacgatgtggtcttcggtctggaaacccatgtggagctgtccacgaacaccaagctgttctgcccggcccacatcgagttcggcggcgagccgaacaccgagctgaccccggtgagccttggcctgccgggctccctgccggtgatcaacaagaccgccgtcgattacgcgatcaagctgggcctggccctgcactgcgaaatcgccgagtggagccagttcgcccgcaagaactacttctacccggacatgccgcgtgactaccagatctcgcagtacgacaagcccaccaacggcaatggctacctggacgtcgaactggaagacggcaccgtgttccgtgtgccgatcgagcgcgcccacatcgaggacgacgccggcaagaacacccacgtgggtggcgccgacggccgtatcgagggcgccgatcattcgctggtcgactacaaccgtgccggtgtgccgctgatcgagatcgtcaccaagccgatcgagggcgcgggcgatcgcgctcccgaaatcgccggtgcctacatgcgcgccatccgcgacatcgtgcgcgcgctgaacatctcccatgcccgcatggagcagggcaacatgcgcgccgacgtgaacgtctcgctgcgtccgagcccggacgccccctacggcacccgttccgaaaccaagaacgtgaactcgttccgcggcatcgagaagaccatccagtacgagatccgccgccaggccgcccgtctggacgacggcaaggagattctgcaggagacccgccactgggatgaggcttcgcagaccaccgccggcggccgtctgaagtccgatgccgacgactaccgctacttcccggaccccgacctcgtcatgctccacatcaccaaggagcacatcgaggagatgaaggcccagatgccggaaatgccgcgtgagcgccgcaaccgcctcaagtctgagtggggcctgagtgatctgcagatgcgcgacatcctcaacgccgacgccctcgacctgattgaggaaaccgtcaaggccggtgccaaggccgccggtgcccgcaagtggtggctgggcgagctttcccgcgaagccaacgccaagggtatgtccctcgaagagctgccgatcaccccggccgatgtggccgaggtcgagaagctcatcgcctccggcaagctcaacgacaagctcgccaagcagaccgtcgaaggcgtgcttaagggcgaaggcactccggatgaagtcgtcaagaagcacgactacaagatc

SEQ ID NO: 665 - DNA, 4964 bp, Unknown
  R14_15m  MAG No. k141_15990
gagtcggacctgcatgctgcgttccactgcctgcgcgccgcccggcatggaccgcaccggcgcgccggcgatggtcgcatcagtcccgaggaagttgggcaggtgatcggcgaccagcaggtccacgacgtcgccggtcggcgcgctcatgcgggtcgtgtatccggtcagcgtacccggctgcgtctcgaaccctcgggcggcgaggacaccgcgcagtctggcgatgccgcggcggtccgtcatgagctcggcgagcaggtcggcgtcgatggtggggcgtgcggtcaatccgcccatgatggcgtgcagttggaccatcagcccgcccgtgagcagccatgactctgagatgttcgccgcggcgaccgcgtatacggtgctccatggatggcccgtgttggggatgtggattgtgggggtcattcctgctgctccttgcggtggtggtcgtcgatcagctgttggaaggttttcaggccggcacggcgttccctcgggtcgttggattcggccaggtcggccgcgcacacgccgagaggcatcgatccttcgccggcggggagattgtcggtgacgtggagtcgcacccggacgggtgtcacgccttgcttcagccgacattgacggacgatgtcatccagagcgctggcggtgacgtagccttccaccacgtctgtggcggccagctggaatgagtccgccaatgtgccggtggcggcggagggacggatgagggtttcgaccttggcgaggttggagtccctgcaccagtattcgaccatcattgcgcgccgtcgggtgagacgagtcagattctcggcatccatctgcctcaggtagcctttgagccggtaccgttgctgccggcccagccatggcgcatcgagtccgctgagcatgtatagcgccccgaacgccatgtctggtgaataagggcgcccgtccgccccttgccactgtgattggcggcgtacggaatcctccgtgaccagcgagccgcctcccgcggaaagagattcaagccggccggcagcgcgaagcgcgctgacccgtcgttcgctcactccgagtcggcgggcggcttcccgccgtgtgagcagcgtccgattcgttctgatagccatattcctattgtatacagaactattccggattgggaatagttctgtatacaccgggcaacagggcacctcaatccgtattcgtccatatgtggtcattgcgctgctttgatgaagtcttcggcgagttggttgacgatctggttgcggtgtcgggcgacgatgcgctggtagtgcttgatggcgaccttctcgctgacgtggccgagttcgtccatgacctcccgcaaggtgccgcccttgagcatgagcaaggtcgcgtgactcgccctcagggattggaaggtcaggtcggggcggccggctttctccctggctttgcggaactgggcttccagggtggtctggctcatcaccgaggctcgtctggggcggaagaccatggcttccgggtccgtccattcgcagtgcctgagcagatggtcgtgaatcaggggaacgagcccgtcggggatgggcacggtgcgccggctggagtcggtcttggtcctggcgatgcgtgtcgaaccacgatccgcatagcccctgttgacggaatggcgcacggtcaggcgtttggtcttcaggtcgatgtccttgatctgtaggccgcacagctcgccgcaacggaggcctccgacgagcgtggcgagtatcaccgccagtctcgtgtagtcgggcatgctctccgcgatcagcttgagttccagcggcgtgaccggtggaacgtcctccctggcggatcgtggtgctggcggtatgggcaggatgaacgggttgtcgcggatcaacggtggggagccgtccatgcccatcttcgtggcgctggcgaacgccgccttcagacgcatgcatgagcgacggaacgcccattgcccctcggggtgcggtgcgtcataccagcgtttgatgtccgtcggcgtgatctcggtcaggagcttgcccttgaagcccggcatgaagtgcgcgatgtcgagatacaggttccggcgcgtgccgccggctatcctctcgccgttcggcagccggtatccttccgcccaccgggtcacgtaatcctcgaacgagataaggctcgcgcgcttcctgcggcggcgttctgacggatggacccattcctggatgttcttgcggtccagttccaccagatgccgttcctcttcgagccactggtgcgcctcgtgctccatgtccggcttgaactgccgctggaccttcttgcccgggcgtttcgggtccgggtagcgcacctgccaggcgacgagattgcccgcggtatcgtagcgcggcgtcacggtgccgaacctgctccgccgctccgacgacggccccgtactgtccttcttcgtccttgcggacatgatgatgctccttgctgaatccaggatcgatggcacgcataacggcctcgaaaaaatgccaccaaaaatgccaccaagtggccgaatgggctctcggcgagccattgcacctaaaaatgcacctacggcaccttaggtattgcaatcattggggtttaggatgattcgatcactcgtcacaggtagtttcggccatcagccgcatgaagatgacgctaaggagcaacaccgctcgcgtgtctactggaaggaggcgggaatcgttgctatacctaaaattcagattgataataagtaaatatacatttgaaggatttgccgtttgctcttgaggcaattgcctttcgtatccccctagccttgtcgaacgtgaattccgtaccgaaaagctggtcaacgcgcacggtatcgcaatcaaagaagccatcgccacgcagcgaaaactgcatgcaatcacaagcgaaccaaatcggatgaccaccactgatctggtccacggcagccttcttgaacacgtcaagaggcacgttcacgaactccatatcacccgcctcagccacattggccgaaaaacgaatacgataccgcttgccaaacggacgactctccatcggcacattgcataacgtgaccagatcgttcacgtccaccggcacgtacttcttgcaaaactccatcggagtgatgccgaactcacgaatctgcggacgctcatccttaccggtcttcgcagccttttcagacgaaccatcccccgcggttttcttcttggcatcatccttgtcatcgctcatacgcgcaagaaaatcaaaacgctccggaggctcccccaacgcgatcgcacacatgcgatacaccgtagccatatcctcattctttaacgcacgcaactcatccaacgacgttccagccgtatgacggtcacgcaaatcggacgcgaactcacgtagcttcgtattcaaatactgcttgaacgcatccgaattcctcgaattagccgactccggataagcactcttcggcaccaaatcatacttgttcaccaaattggcaaacatctgccaccaaccaccatcatcggccggaccataattaatcgcctcgaacacacgactatccaacggctcatccaacgtggcaagcacattctccaaatacgtgttcgacttctccatcgcatcccagaaaaacaggtaggtttccgaaaactcgaaatcctccaaattccaacgatgcatcaactcataacgcaatgtattaagcgccgcaaacatccaacaacgccccgaactacgctgattggtgatactcccctgcttcagttcaatggagaaatcattctgcagtacgcgttcgcccttgtagtcggtagctgcggcaagtactccggatgatactgctgcattggcggccaccagattggcacggtcggcgttgaagtccgcggaatactgttttgagcagtgctgggtcgagtgctttgacgttactcatggttcatggtcctttcgatgtgttcgatttcggattctatgccgcgcaggcggcaacgcaggtcggattccacgtctacgccatcacattgcgctttgcggatgatggcgatgatttcgtctgcataaggatgacggacatcatgctgttcgtctgtctgttctgcgcttggattgaatgcggtttcgagctgattacgatactgcgatttgtgtactctcgatacgatttttgtagcacgcggcaatgcgccttgcgcatgggagatgccttcgagcacagacttacgatgcttctctttctgcttcatcgcttcccacagtttcagcgtatcttgcgcattttccggtgccggtacggaatcgtcggcagcatcgtccgtttgaaagacatgcggatggcgggtgatgagcttatctacgagacggttgcacacttcgtcgatgttgaacggatcctgcgtatccacggcgcacacttgcgcttggaaaacggattgcagcagcatgtcgccgagttcctcacgcatgttgtctcgatcgttcgtttccacagcgtcgatgtattcgtaggtttcttccaacagcggtttaagcagacttgtattggtctgctcgccgtcccaagggcatccgcctggttcgtgcaggatgcgtacgacttgcttgacacggtccaacgcgctaggtgcatcgcgtacagggtcaagtttcgaacagtgttcgaattcttcgggcaactgataatcatcatgtgcagcttcagtcatgccactgattgttctcgcatgtgccgaccatgcagctgcggctttggcatccgtaagcgtctcgtctctcgagataaacaaaccaaccgtatccgaaccatagccgcccaatcatccctcctcgttgcagaaagcaggtttttgcaaatctaccggtattggggagtcacccatgtcttacacgcatttttggcatttcacctccggaatacgacgggaatatcacacccttatata

SEQ ID NO: 666 - DNA, 6409 bp, Unknown
  R14_15m  MAG No. k141_16180
tcacttcttcgtgtaggtgtcgtaccacttctgccagatcttgacgttctcctgcaggccaaggctgtcgagctgcttgcagtaggcgtcccactcctcgtcaatgccacccttggacatccaagtagcagtcttctgcatggcgacgttggaaatctggttgtagttgctagccaacgtggtgttgtcgtccgcgtccgggttcacgtagtccggaatgtagtccttgacggggtcgaagttgctgcgctgcttctcataaaccttgctcgcctgatacagggcgtcgctaccggcatcacccttgatggtgacctcgtcgggaatccagccggcggggtaggacaggctcggggaggtgttcttcttgcgcatctcgatcagcttgtcgttgtccacggtgtactcatgctcaccggtcttggtcacggtcttgccgaaggagccgtagaactgctgcacggagtacttctcggagtacatcaggttgagcagcttcagcgtggcgtccttgttcgcggcatgcgcggagacggcggggccggcggcgtcgaattcgctggacgagccgtcccacacggtcttgtccggggagacgcccggggcggacggcaccgggatggtgatgtactggtccttcagatcgccgaaagtatcggaaatggagctgctgaacaccacaccggtcttcgcggtcttgccgtcgctggtctggtccgcgttgtaggcgtcatcgtccttggtggcccagtcggctgggatcaggccctcggagatgagcttgtggtagtacttgatgacttccttgtattcgtcggaggtcatgaagctcttgaccacgccgttcttggcgtagaagccgtatgtggacacgcccttgttgaagccggtcgggatgccggtggagttgagcagcagcatggggctgtgccaggtgtagtacaacgggtcgagcttcttgatgttcatcgggatctcatcggcctggccgttgccgttcggatcctgggtcttgaacgccttgagcacgttctccagctcgtcccacgtggtcggcacctgcagacccagcttgtcaagccaggccttgttgatcatcatgagctggcccgtgccggcattgttcttgccatgggcattggggagcgtgtacaggtggcccttggaatcggtattgagcttctgcgcgtccggcttctgcttaaagaacgccttgacgttcggcagcttgtcgagatcctggttcagatcctcgaacaggttggagaactgttccgcgtacacgaagctgaaggcatggaggctgatgtccggaatgtcgccggcgctcagcgtagtattgcgctgattcgcgaaatctccgttatcgacttcctgccattcgatcttgcagtcgcagtcggcctcgaggtccttggcccactgcatgttggcgatcttgtcctgattgggttccttcgcaaccagaacgctcacgatcggcttgccgtcggcggtcgtggtcggcttcttgtcgccgccgcatgcagccagcgaacccagcaaggccacggcgcacgtgatggcgcccgccttcaatgcggttcttcttctcattgtctctcctttgacatgatgatgtttgagtgcgcccgccacagctgtgaggcggacgcacccagtataagtctcgggagatattttgtcaacatccctaacatatatgaaacatcgacaccgttccgatatgtctcagcactccccctcaccagacggcggaaaatcgccgattccgttgacgttcagctggtcgctgagccagtcgagtgaaacacgagtgtacagaatgcgattattatcgccttcatacagcaggccataaccaccgccggccttgtggctcaatgcggcgatcaccgaataagacatcgaccccgtcgtgaaccgtcggccagcgctccaagtcttgccgtcatcaatcgaaacgcgcaccaggccatcgatcctgtccgagggcgacgaggaggaatacagcaagaccttggcctgcgccgacccttcgggggcatcggggaacgcgcgggcaatctgcgcgttgttctcgggatcgggcaactgcgtttcacgagtcaccggaccatacgtggcgccaccgtcccgggagatggcgacatagcggcaaccgtttccatcggaggaacgcgaattcagcatcacacgaccatcggaaagctccacgactttgttctcgtccatgtgatcgccgacgggagtgcccgcatgccaagtggcaccgtgatcgtcggaaaagaccgataccgcacggtaacggccgtcaaactccttgatggtgtactgctggatcagacgccccgcatgatcgccatacttgagctggatgccagcaccggaggaagcgaacctcgaaatccatgatttgctgttcgtgatatcggcggtgataatgcgcggctctctccacgtcacgccattgtcgacggaactggtgacggcggcctgcagcaccgcacgcgcagaggggtccacgcccgcctgggaggtgccgaaaccggcgtcataggatttgacgaagaacaggaacacctcccccgtctgccggtccaccacataggacggatcggaatacccgtacttgtcgacgccatcatgcccggcggccacaatatgctgcggctcgaacgaccgcccgccgtccttggaaatacgctgcacaatcgaattggcctgcggggcatcctggcagttatgaggccgcgcgtcgaatgccgcgaggacccagccgttaggtgcctcggcaagggccggaatccggtagcaggccacaccataatcgcctggagccgccagactcatcgctccgtcatggttcgcgccgcacacagtattgttcgtattcgccatcccgttctccgtcatattcagtcactcctgttcatcgccttgatgccgctcgacggacgcatcgacctgttccaccgtgcgcgcaagctcgaaaccgcatgcacgcaacacgttcgcaatggcttccacattgtcgccacgcagtgccaacaccggttcgggcatctggttggtgccgaacacgcccaacaacgccatcgcggtcttgaacgcgcccacgccggaaccgaatccctggacgccggacggcgccaggacgatccgcatcaacgaggcgagcttgttctgttccttgcgcaccgaatcccaatcaccgttctggtaggcgttccacatcgcaacatagccatatggatccacattggccaggccgggcacgctaccgtccgcaccggccatgtacgcgccatcgacgacgacttcctgaccggtcagcaacgtcagcggatgaccgttctcctcgttgtccccaaccagaaaacggaacgccacatcatcgttcgacgagtccttcaccccggccagcacgccatcacgccccaagcggatcagcagatcattgggcagcttggtatgcacgcatacggggatgtcgtatgcgaacaacggcacatcaggcaccgcggcgtgaatcaggcggaaatgcctctcgatctccgctacgcctcccaatgcgtagaacggcgctgtggccacgatggcggcggcccccatctcgcgggccgcacgagcgtgctcgatcacgcgattggtctccgtgtcgatgcaccccgccagcaccggcactcggccgccggcaatctcgatggccgcggccagtatctcacgacgtcgctcatccgtggagaacacgacttcgcttgaggatccgagaacgaaaagtccattgaccccggccccgatcatgcgctcaatcgagcgcctgtagctttccacatcgagacgatgatccgcggtcaacggagtgacgaccgggggaatgaccccacgaaactggttcatactgtgaatctccttgttgtatttgtgtttgtctggcacgtgagacaacaccgcattcgctccgcatgagcgagccgcacccaatcgttgatccgaattcctccagttcaacaattcgggtgcggctcacacctcggagtcgcaagcactgccttgcaacaggcttgcgctcacgacaccgtcacttcgtgtaggtgtcgtaccacttctgccagatcttgacgttctcctgcaggccaaggctgtcgagctgcttgcagtaggcatcccattccccgtcaatgccacccttggacatccaagtagcagtcttctgcatagtggtattgaaaatctcggcattattagtgttcagcttcgtcgtatcggaagggtccatattatccatattgacgtagtcgggaatatagtccttgacgggatcgaagtgactgcgctgctcctcgtacaccttgttcacttcaatcaattcatcggcgtgggtatcacccttgatagtagcttcatcaggaatccagcccaccaacaattccgataggccaggatactggttatcaccggtcaactggctcagtttgtcgttatccacggtgtactcatgctcaccggtcttggttattgccttgccgaacgagccaaggaactgctgcacggagtacttctcggagtagagcaggttggccagcttcagcgcggcgtccttgttcgcggcgtgggcggaaatcgacagtcccgcaagggacaactcactggaggagccgtcccacacagtctggtccggggaggcgcccggggcggacggcaccgggatggcgataataggccttgcctcgaccatcggctatcgcataaatccgccctttggagtcagtggacatcttcttggcatccggcttttgcttaaagaaggccttgacgttcggcagcttgtcaagatccttgctcaaatcctcgaacatatcgggatactggtaagcctcaacagcaccgtacccattcaggttcacatccgcgatatccccagaggccaaggtggcgttcttctgctgggcccaagcttctcgagtcacttcctgccactcgatcttgcaatcgcagtcggcttccaagtccttagcccactgcatgttggccatcttttcctgattggcgttcttcttgaccagaaccgtcacaatcggcttgccatcagcagtcgtagtcgacttcttgctgcccccacacacagacagcgaccccagcaaggctacggcgcataccgcagctcccgccaatgcaacggtctagatggaacgcagcacgtccgtcgcgcgctataccacgtgttggatgcggcccagttccgattgccggctgacctcataccatatcctcgcataccgttcggtccagcattccagttcatcggccaacttcgccgcatcaacgccgacctcatccggccgcgccacgtcatgcgcggccaacaacgccaacccgacacagttcagcaagcgctgaccgtcgatggccaacgaccaaaccgcagcggaggaggaatcaccagccatgtagaacagcgaggcgatatccttggccgcaacgcccctcccctcaagatgaccctcaacggtcgcgtcaacacagccgcagccaccgtcacaccttttcctacctttgttctccacaacggtcgtcatcaggtaccgtcaagcaaagttaagtttgttcatgctgaaagacaacagggaatgaacctgacgacaccgaatccatcgtccttacctcagcgtttcttttccaacggttcgatcacccgcacgtccatgcctggcattcttccccatgaatacacggccactatggtgaagaaaatcggcaccgccggcccgaacgccatcatcaggccgggccacgtgtagtaggaccacaccgtgacgaggaaaagagccaacacaacgaaactacacaatggacgggcaattatcattgcaaatgatgtgcgcaccgtccacagtaggctttcgctgaaattgacatgcacggaccagctgaggaacacgaacaggccgtacagcacgttgagtaccaatagcacgccggatatggcggttcccacatagcccaggtcgttgttctgcacgaaccagtattcccaaacgagcagcagccagatgattgtttgcggccatcccagctgattcgccgcgccgatctcctccagccatgcctgatggaacgtcgtccatgtacgtttgatggtccaggagcgatcttcgatgtcgagcagccactggcggaacaccgaatatgacgcggccacggaggggaacaatccaaccacaatcaggccaaacaatgtatgcagcacgaaggcgacattcactacagctaccatcatgataatccggcaaatgaattcataccccacagccagacgcttcatcatgttcctacctccttcagtcgggcaaccgtataaatcgctacaaaacaactggcagcatccactctcatagagccccca

SEQ ID NO: 667 - DNA, 12315 bp, Unknown
  R14_15m  MAG No. k141_16188
cgtgacaatgcgatttccaaggctcgcttcgagttccgttggctcgaccagttcaatctgtcctacgatccggacaccgccatcgccttccacgatgacaccctgcccgccgagccggccaagatggcgcacttctgctcgatgtgcggcccgaagttctgctcgatggccatctcccagaacatccgcaaggcattcggtggcgaggccgctcagcagcaaatcgtgaaggaggctgctgctggcatcgactccgaggcactggctaaggccaaggccaatgtcgataacgacgtggtgtccgccaacgtgctcagccccgaagaaatcctcgccggcatggatgcgatgagcgaaaagtacaccgcccaaggcggcaagctctactccaccgcccaggagtaaacctctctggctcccctctctgaggggagccaattattatgcccggtggtgtcttaattcgggacgacgctcgactcgctcgaaggcggtgacgaggtcggcagcacggatcgcgccgcggcggtccttggcggccaccagagcggcctcggtccagatggcgcacacttcggcgccgctccagccttcggtccgctgtgcgatatccaccaacggcagttcgccctcgattgacaacgaacgggcctgcacctgcagaatgcccaaacggtcgcgctcagacggcatcgggaaaggaatctgccagtcgaaacggcccggacgcaacaaagcgggatccacgtcctcaatacgattggtcgcagcgaccaccacaacattgcccttggactcgaaaccatccatcaacgtcagcaactgcgccaccaagcgcttgccgacgccattggtatcgttctcgcgcgaggacgcaatcgaatcgatctcatcaaagaagatgatggcgcgcttgtccgcctgcgcggcggcgaaaatcatgcgcagcgtttcctcactatcgcccacatacttgctcacgatggtcgggccggacaccagatagaactgcgcgtccgccacattggcgatgatgcgggccagatgcgttttgccggtgcccggagcaccggtgaagatcacgcccttgatgggcttggcaccgatcgcacgcatctgcgcactgttgcccagctgcgtttcgataagctccttggcgcgcgtgatcacctgctcataaccgccgaacgaatcgaaggtaagcgacggatcgctgcccggcgtgatgcggtactgcttgatgtcgtcatcgtgatcggattcgcctgggcggatggccgtgggccacagcactcgttcgatgccgaacaggtcggtgaactgcacggtgttgccgggcatgatcgaattcgggtaatcgccttcaagcagttcgaggccgtcggaagtctccaggaccacgccttcgttgagcgcacggcgcacgatgcccacacggggcttcaacggccacacatcatgcggcactttacgatagaaatccgtgccgacgagcaacacgtcgcccacatcgaacacctcctgacgcggaaatgtgagctgtgtggtgtgcccattaggcattacgccaaaatatgcggtgcgttcatcgtcaaaaccggtgatgcgtaccaagacgccgtcacggcgcagtacatcgttatcagccatgtcccctcccgaacatttcatgaatcaatcgcaatcagcaaaccctcccatctcaccacaggagcggcaaaacatcaaggaaaaccgctccgaaaaacatcatgggccccacttagaatgaacactatggcacagattgcaacatctacacttcccgctgttctcgcgatctccggctccgactcgtccggtggtgccggcatgcaggccgatctgaagaccatgctggcttgcggcgtgttcggcatgagcgccatcaccgcgctcaccgcacagaacaccaccggcgtgcgttccattcaggacaccaaaccggacattctcgccgaccagatcaacatggtgtttgaggatattccgccggtcgcggtgaaaatcggcatggtgtctgccactgacatcatcgacgtcattgctgaacgactcaccttccatcacgccacgaacatcgtgctcgacccggttatggtggccacttccggtgccaagctcatcagtgacgatgccattgcggccttgaccggcaagctgttcccgatggctacggtcgtgactccgaacattcccgaggccgaagtactgaccgatacgctgattcgcgatcaggaggatatggaggccgccgcccaccgcatcgtggagcgttacggctgtgccgcgctggtcaagggtggtcatggcaccgaggatgccaacgatgtgcttgccgagacggatggaaccgtgacctggtttgatggcgcgcgtatcaataatctgaacacgcacggcaccggatgcacgctgagctccgccatcgcctcgtatctggcgcttggcgacacgctgtccaaagccatcaagcatgcgaagaagtatctgaccggtgcgctgaagacccagctgaatctcggccacggctccggcccgatggatcatttctggaagtatcgctgacataagtgtggctgttaagctccccttgccaggggagcttaacactactgaaaaaggagaatcatggttcttgaccgtaatgccgttactcaggaagtgccgatcgacccggaaaccggcaaaccgtacctcaacaccgtggcagccatccaggtgtcggccaatggcgtgggctccgaggtttcaccatacgtggctcaggccgtcgaagtgattcgcgaatccgccctgccgcaggaaaccaacgccctgttcaccaacgtggaaggcaatctggacgacgtgctcaaggtggccggtgaggccgccaagaagctcgccgagcagggctaccgcacttctctggtgctgcacatggatatccgtcccggcttcaccggccagctgaccgaaaagcccaagctggtggatgagatcctcgccgacaagcaggcgaaatagcaaagcatcgcttccaccagcaagggcatgctttgttattacacgtttcatggggcggtaactcacccatagggcggtaaatatctcatggggcggtaaaaccctcatggggcggtaggcgaaaacggctctattctgcggaaaggcaaaatccgctaaccgccccatgggccaaataccgccccatgagtgttttaccgccccatgggaatcacggttttgccttctttcaacggggtaagagcgtaagtggggcatatataggagcgttacaaactctgttatcgttcacaatgtgaccgcaacgcggcgtgccacaagatcgaacctatagttaagccccatgtagtgagctatctcacaacgattggctcgctacgtggaattcaagacttggactgcaaacgtcgttcatcccacacaatgggagggcgaacggaacacgcagtccaatcaagagttcgctcgccgcaacatcattgagcagttgcacgcgggcaggttcgcaagaagagggctcaaatatgactgctgctgaacagcagatttccggcaatcccgcggctatggaaagcgcacaagcacgtaccaccgtgacggatcaagccaaggttcaggatattatctcgcgcgtggatcgcgcacatgaaaccccgatgttccatcgcatcgtggcgctggtcgccgctggcatgctgatggacagcatcgacgtatatattggcagcgccgttgcctccagcgcgttggccacacactggtccaccgttgcgcaaaattccacctttatgtccgcaggcttcctgggtctgctggtcggttcgctgctggccggcttcgtcggtgacctgaagggccgccgcgtggcttaccaaatcaacctgctgctgtttggcggcttcaccttcctcggcgcattcgccccgaacatggccgtgctgtccctgtgccgtctgggtgccggcctgggcctcggcgctgaaatcgtcaccggcttcgccatggtcaacgagttcgcaccgatgaaccgccgtggccactggtgcgcgattgtctcgctcgtggccaactgcggtgtgccgatcgctatgctgctgtgtgcatggatcatcccccgctggtcctggcgtccgctgttcgtggccatcggtctgggggccgccatcatctggtggctgcgccgcgacatccccgaatccccgcgttggctcgccgtgcacggccgttacgatgaggccgacgccatcgtcaagcagcttgaggccaacggctccgaactgatcgacgcagccgccaaggccgacaccagcgacacccgcaacgccggcggccgttcgctcggcatctgcctgcttgtagctgtggttgctgtggccgccacgaacgtgtgctcctacgccttcacttcttgggttccgacgattctggtcaagcgtggtattaacctgtccagctcgctgctcacctccacggcgatgatgctcggtgcccccggtcggctgcctgattggctctctgcttatcgaccgcatcggccgcaagcgcacgattgtgccggccttcctgttcactggcgtgttcggtttaatgtatgccttccagacctctaccgtgagcgcaattatcgttggcttcctgctcatgatgtgcctgtacgtgcttatggcttccgtggtggctgtgtacgctccggaactgttcgccaccaaggttcgcttccgttgcgtcggcttcgcgaacgccgtggccaagctgctcaatgtgttgatgcctatggtggtgggttggatgcttacctcgcttggtgccacgtccatctttgtggccatcagcgcaattgctattgcatcgatgctgattgtcggcttctttggcgcggagactgcgcagaagtcggttgggtgatcggtttcctcacagtggaataactgctgataatgtccattcggcgtcttgcgtggtgatatgcagggcgccgttttgttgttctagtaattgtcggtaacggttgagaccggtaccggtggataggtccgcactgccatccgcatccgaatccgatgacgtgcgggccgtgtcgatgcaggcgatgcggacggtgtccagtccgatgccaatcgtcattacatagcccgcttccgggtcggcatgtttggcgatgttgccgtacagttcctccagcagcccggcgatcaggccactccgaccggctgcgccatgagcaccggaaataatcgtctgaccttcaaagccaagctctgataatcggcggtcaccattgctcgcaacatcacgaatttgctcggctagcgggcaatcagcgtctgtgatgccacatgcaatgccagaagcggcatcaacggtcgaatcatgcggagtcactgcactgtgcgccgcttctcccctgccttcaataacatcaatgacctgatgcgtgcgatccaatgcgcccatagccacgctacgcagttcgcgtaattcttcttcagaaggggtcttgccatcggcaatatccttgtcgaatcgcaaaatcaggtatgccaaatcattggatacgtaatcgtgaatgtcctgagctgtgcgttcctgctgacggcggtgagccaactccgctcgaaccaagctgcgttcgtgattccatcgcgccgccatgccaccaagcatgaagccaataaacaacacggccactggcatcacaccatagagggcaatcgcaccaagaatcacttgcccagtgcgatgctcggcagaagaaccgctcgattcataggcgcttccggtgaagtcgcttcccgactgccctgcgctgtcagacccactggatgaagagccaccatcagcagcgccaccatcagcaacactaccgtttagggcactactactcgccgcgccatccgcagaaccgctcatcgtgtctgagccgccatcaagccaaggaatggccacgccaccacgcgacaacatccacaccacaacggcaatgccggcaaccgccagcgccaatcgcttatcggcgtatccggcaatacccaccgccaataacacggcgagcattgcacccgacggcatccagatcggactcatgcacaacactatccaagccaccgctaccgccacgcatccggtgaccggacgaaacgccatccaccccacaatggcaacgaatatgaactccgcaaggcagtccgccgccgagacactgtcagcagccaagcccgccatggtttccatcgtgcatatcaaggcaacaaccagtacggcaatcaacagccatgcattgcgaacaccgctatccagctcggccaatcggtgtcgtaacgctttcatagcagttcctttcctaccatccatgccgttgcacataccgcccatgccaactcttaaatctcatgccgtttcacgcagatcgatatggcatgagcgcgactgcgagcgccgagtttggcgagtgcgcggcgttcaaaagtcgccacagtggccacgctgatgcccaatcgctcggcgatttccttggtggtcgacccatccgcatacatacgcagggtgtcgcgttctttgccggaaagcgcgccacggtgcgcgtatgacgtatcttcgagcaccgcgtaggcggttgcggcatccatgaaggacagcgaattaccgctcccctcatctcccagtaccagctcattggtcgacaatccttgggctgcattgcgaatagcgagcgcaatgccgttcaaatcggttttaccaaccaaggcctgcgccccgcagcgagccgcctcgtcgtgaaatgacgcgagcgcgtatgaggtgacacccaccagcccaacctcgggtgttttggtacgaatcgcacgacagacttcggtaccgggcacgtcgcccatagacatatccgtaaccagcacgtcaggccgcttggtggggctcaggcatcggctgatggccacggcacccaaatcgcaggtccatatcacggcaaaatcgctggacatgcgctcgattagcgcgccgaacactttcagcgcatacgggtcattgtccacaatgccgatgcgtatgttgcggttgcgcgcttctcccattacattcaccccttcagtgtgcccgacgccgaactgctccgtcctgacatgtcatggtcactatgacaactatcattccacatttcctgcgcgatttacgatggaatcatcatcaatccttgacaaggcggtaaaggaggactgcaatgaaccgtgcacaagcactcagcaagctcaacaggagcgatatgcgcaatgccgccgccgagcgcgggacgcaacgaatattcgcgtggaaccgcgcgcattggattggcatggttgtactgatagcggtgttgttgctgctgcagtggagctcatcaatgtatctcatgcccgacgaggtccttgacagggctgccaaaaacctgttcgtatggttccccggtatggttctgcactggccattggtgttgggaatcaccagcctgatactcggttcgatacgatccggcagtctgtctttcccattggcgagcgcaatcatcggaccgctggcattcggctgtaccaatcttcgcttacggccggggttcccataccgttcctgggctcagtggtggaagctaatgcacgctgaaagcggccatcagctattggttcattcgttgatcggctcggccatgctgttgatctgttatacggccgttgcgttcatctgctatgcaatcggacgctacggtctgcgcgaattgtttgtggatccgaatccgcagacggcgagcggacgactgctcacatggattcgtcaggatgcgattcgcttcggctgctggctggcgacggcaatcatgtacggcttgctattggcgctgaccttacggggcggcatggctgcgatggccgccgcgttgctaatcaattttgtgattccgcccgccttgctggtcatcaacggcatctacgcgctacgcccggcctcactgacgtatccgtggaaaagcctgctgttcccgttggcgtgcacactggtacctgcgccgatgctcatggcgctcatcacggtgtatgaagacacgtgcccgataggaagtacctgcacgctgatcggcgaccgatacctctcctggggctcgatggatcaggtcttgcatttcgtcatcgtgttcgccgtggcgagcttcctcggattcggcgtggtgtgggccgtgcggtggattgtggctcgtcgcacaaaataagagagaccaaaatatactggaatcaggggcttcgtgcaatgatgcacgagccgatccaagcaaaggggctgaccatgagtgagaaactgatggaacagtaccggttgcgcaaacaacgcaaacgccgtaacgcttgtatcgccgccatcgtgacagtagtgcttgtccttgccgtcgccggcggcgtatggtggacggccggcgatggcagcgcactggttcgcaatatgttcaagccgaaggccacgcctgccacacagccggtagtcgacagcaccgcagccttcgcctaccgcaccgcaccggaattcctggcgatggaaaccggcgaccgagacaccggcaatgtgaactactcccctgcttcgatgtggatggcgttggccatcgccgcgcagggcgccaatggcacgacccgctcgcaactgaatgagctgctgggctccggttcgctggccgacagcgactaccaatcgctgctgagttcgatcaacgggcaatattcgggggcgaaatccgagatgagcgccgcgaactcgctgtggatcgataacgactactctcttgccagcgattaccaatccaccgtcaagaagatattcgaggccgaagtcaccacgctaccgttcgacgatcaggccgccgccaagatgtccgattggattgccaagcatacgaatggttcgctcaagccgaagatcacgctgcgtgaccgtgaagtcctgtccatcatcaacaccgtctatgcggatggccgctggaaggatccgttcgaagagcagtccaccggcgacggcaccttccacggcgaagccggagatgctcaggtgccgatgatgcaccggaccttcagccaaatgacttacagccatgatgagtacaacacttggcagcgggtggagattccattcgacaacagcggcaatctggccatcgtgctgccggccaaagggcatttcgacgagctggccggcaatgccgagaaactcggatgggcgttcggcacgtgttcgtcggcatcccctggcgaggacgcaatgggttgcaccgcggacagtctgcccggatggggcgtctccgtcaactcggccacggtgaacgtctcgctgccacgattcaccgtcgacagcatgttcgactcggaagccaccatcaaggcattcgaaaaactgggggtgaccgatgcgttcagtgcaggcgacgccgacttcaccaagatggtcgacaccgattcgcacggcgagaatctgtatatcggttcgattctgcaaggcacgcgcatcgaggtgaacgaggccggcgccaaggtcatgtccttcaccaaagccggcgcagacttcactagcgcgccggtggacaacatcgagttcacggtggatcgcccattcctgtattcgtacgtcaccccggacggcataccattattcatcggtgcggtgcgcaacctcggcggagtcggtggagaacactgatactttcccgacagtccgtcaattagggtgtatcgtttgacgcatggctacgatgaaggaaatcgcgaacaaggcgggggtttccgtctctacggtgtcgctggtgctcaacggacgcgacgaggggcgcgtaaagtccgaaattgcggacaatgtgcgcgccatcgccaccaagctcggctaccggtcgaatccgctggccagttcgctgcgtacaggcaagacgcacatcctcggtttcatcagtgaggaggtggccaccaccccgtacgccggcggtatgattctgggcgcgcagaccgccgcaagccagttcggctatatgctcatcaccgtgagcaccgacggtgagaacagcgagagcgaggaaatcgccgcactcaagcgatacggcaccgacggtttcctgtacgccaagatgtcgaaccgcatcacccatgcgccttcttcgctggccaagacgccactggtgttggtggatgccaccgactcgcttggcaaaatcccgagcgtggaaccggacgagttccaaatcggctacgacgccaccaccagattggttaaggccggatgcgcacgtatcgcctatgtgggttgctcggaaccgatgattgcgcaggatggtcgtttggaaggctatcaggcggcgctcagggacgcctgcctcgactatgacgatcgtctggtcgtcaatgtgctcaataacgggccggcactgaccgcagtcagcgatttgttcgacgccgagcatccggacggattcttctgcttcaacgatgcccgcgcctggtatgtgtacgaatgcgccgcacgccgaggactcacggtcggcaaggacatctccgtgatcggcgtggacaaccatcgcgtgttcgccgaaacgctggaaccgatgctcaccactgtggaactgccgcatttcgagatgggctactgggccgtggccaagctggtgtcaattatcgaaggacgctcgatggacgacgtctcacggccagcgaccaccgctcccctgccgccgatcgacgcgccgattccggcgaagatccactgcacgctgatcgaaaaggcctcggtgaagtaaccgaggcccacacgatttctcaaggcctccgtccagcacggaggcctttttgcatgtcgaacgggtacgacacgccgatgacgtcaatcgattgacgtaaatcgattgacgtcgcatagtaattactacacaacaacttctacaaaggcacagccgcccgagcaggagcgtcacataaccaataaccaaccaagtagtaatcaaaggatgattatggcaagtgcaaccaaatccgcatggaagaatccttcctatctgcagagctctttcggcatcttcatgttcttctgctcctggggcatctggtggtccttcctctcccgctggctcaccgacccgacccacggtctgggcatgacctccgcagagcagggccagatctactccattaactccttggcaaccctggtcatcatgttcgcctatggtgccatccaagatcagctgggcatcaagcgcaagctcgtgatcttcgtctccgccatcgcagcgctcgtcggcccgttcgtacagttcgtgtatgccccgatgctgactgccggcggcaccacccgtttcatcggcgtgctcatcggctccatcgtgctctcctcaggcttcatggccggctgctccctgttcgaagcgctcaccgaacgctactcccgtaagttcggcttcgaatacggccagtcccgcgcttggggctccttcggctacgccatcgtggcactgtgcgcaggtttcctgttcaatatcaacccgctgctgaacttctgggtcggctccatctgcggccttggcatgctgtgcgtctacgctttctgggttccggccaagcaaaaggaagagctcaagaaagaagccgatccgaacgcggctccaaccaacccatccttcaaagagatgatctccgttctgaagatgccgactctgtgggtgctcatcgtcttcatgctgttcaccaacaccttctacaccgtgttcgaccagcagatgttccctaactactacgcttccctcttcccgaccaccgaaatcggcaacgccacctacggcaccctgaactccttccaggtgttcctcgagtccgccatgatgggcgtcgttccgattatcatgaagaagatcggcgttcgtaactccctgctgctcggcgcaaccgtgatgttcctgcgtatcggcctgtgcggcgtgttccacgatccggtcagtgtctccatcgtcaaactgttccactccatcgaggttccgctgttctgcctaccggcattccgctacttcaccctgcacttcgacaccaaactgtcggcaaccctgtacatggtgggcttccagatcgcttcccaaatcggccaggtgatcttctccaccccgatgggcgccctgcatgacgccatgggcgaccgtccgaccttcttcaccatctccggcatcgtgctggccgccctaatctacggcttcttcgtgatcaagaaggacgaccaggaagtcggcggtgatccgttctacaccga

SEQ ID NO: 668 - DNA, 5262 bp, Unknown
  R14_15m  MAG No. k141_17607
agccgaccacgaaacaggacgcccagccctctacgacaacgctatcgacaccgactacacccactcaatcggcattcaaaaaggccaaatctaacccccgcgacacgccgagccagacacacattttgacccttaacccgccgacatgatggagaagatcggcagatcacggccgcgcgacttataggcgctttcgaattcgtcctgatgatcggagttggagcggccgtcggtcatgagcacgatggcggtggtgtattgcgaggcttccgactcgctgggcagctcgtcgagcgcgctcagcaggccttcatagatatcggtgccgccgctggcatcggtggcatcggcctcatgcagcaggtcgctggtgcttgtgccagtggccttgaccgggcggtggacctcggtttcaaacgggatgagaatgttcacgtcgccgctggcgggctcgatgtacgacttcttggcctggtccgggtcgagcgccgcgttcaggcctttgaccacgccgttcttgccctctccagacatcgaaccggagtaatcgaccacccaaatggtccagctgggtttcctgagcgcggtctggtagacgttgagcgcgctgtcgatcaccgtggcggaggtcatggagaacgtgagtttgccgtcgctgaccgcggcgaggatgtccgcggtggagacgggcttggtggcgccggtgtcgtcagcccagccgagtttgacggccttggatttggcgatgccgaacacgatcggcgtggtggaggtgctggccgcgtctttgacgatgtgcttggtgtctcccatcgaaatccacatcgaggaggcaggccagacggcgtcgtgatcctggccgccggccttgagcgcgttcataatctccagcgaacccatgtagtgcatcgtcacggctacgttggattggtcggccgctttctggatggcagtggcgacttccttgttctcggagccggaggcaatgctcagggtggcggtcggtttgccgccggacggctggaaggtctgcgtggtggcggacgtgccgttgccgtccgctgtgccgtcatcggaattattgaacgccgtgcaaccggtcaacgcgagcacgccggcacataccgcggccgcaaccgcggcggcggagagaagacattatgcccataattccatggctctcccgccatctaaagcgggtcgggccacaaggtgaccgcacggtgaacaatgggtgaagagctacatcagtacgcggcgcaggcaatcatggggtcgtcgtagaagccgaggatcttttcgaggtagggcttgtaggtgctgttgggcatggaaaagatttcgtggcgcgattcggggaagcgcacgatgttcgcctcgccgccgccgtccttgaccagttggacgaagtgattctgcggcttattgagtacccagatgtcgcgtccggactggaagagcagcaccggcgtctccacttcggcgcaggcggacggattcagtatggcccggttgagcttcaacgcctggcgcacccattcgaacgccgcgcagtaggtctggtattcgcggttctcgcaacgcagcttgaagtaccagcgttcacgcgcttcggaagcgccctcgttgccttccatcgagaattccggcatgaagtccgactgcccgaacacgcgcttcttgccgaagccgagtccgcacagcgcgccgaccagcacacgggccacgcccagcggcatgccggtggcgggggcgatcatcggggcggagagcaccgctttgtcgaacagggtggggtatcgctccaacacggccgcgccgatgccgccgcccatcgaatggcagaacaggttcagcggcatgccggccgcgtactgctggccgatggtttcggcgaagccggccagatcggccacgtagcgctgccagtcatcaatccacaccatgcagcgattgtccacgtcgcgcgcggacttgccgtggccgcgatgctcgagtacacacaccgagtagccggcgagcagaaaataccagacgagctcgtcgtatttctcggcgaactcggtgaagccgtggctgatgacgatggccccgcggaagatggcggtggcgccttgctcgcgaatcgcgtcgaatttggcggagtcgtagcacaggtagtgcagctggcccgagcggccgccggtgtccataatgccggacagcggctcgatcccggccgaacgttcggcggcggacggatcgaaccagccctcctcgcggcattgttcgagcgcgggcagcaccacgtcggtcatcgtttcggcgtacttgttttcgtcgatcatcgtcacctgcatggttcccatcttaggacaagcctcacgcccacacctcgcacccacacccacgacacaatcccgggaatgttgcgctaatcggacctatcgagacccacttcgcgaaacaatcccgggaatgcgtcgcaagactgcgcgccactgaccgcacaggcgcgtaggttgtgaggtatgagcgaaaccaatgatgtcaatgacgcaatcaagcatttcccacgcctcagggcgcgcacgctgcgcttcggctgcggcgcgccgcgctccgcacagaccgtgggcgacggctcgcgggccctgtttctgcgctccgacggccccgaggatctggtgaccgcactgtggctaagctggttcgacgagtccggcgaacaccatgagaccaagctggccgatccgcgcgaactgcttggcgcaaccgccgacagcgaggacgtgccggccgaggagaaggcccgccgcgagcgtgcgcgcgaaggcggcaccggcatcgtcggctactccgcagacgatgacggcaatcgcatcgtgttcaccatcaacggccgcctgttcctgaccgagatcgcctggaatgacgagaccggcgcacccgagccgcacacccgcgaactggccggcgaatggctcgatgaggacccggagatgtacacgccggtgctgaacccgcgcatcgccccggatggcgagcatgtgctgtacaccacgggcagctacctgatgctggtcgatatcggcggcgagctgggtgaccgcatcaccgcggtctacggcgtgagcgtggaggatgaggacggcaatccggccgaaaacacgtggaaaatcggtctggccgagttcgtggccggcgaggagatggaccgttacgacggtttctggtgggccccggattcgcagcatgtgctgttcgaatccttcgacaccgccgacgagccgacctggtacatcagcgatccggccgaccccgagaagccggccgccggccgccgttacccgcgcgcgctgacccgcaacgccgacgtgtatctgaccgtgatcgccctggcgttcgatgagaacgaccggtacgcgggcatcaccggcaacgccgatgtggattgggatcgtgaggcgtatgagtatgtggccgccgtgaactggcgtcgcggccacgatccgctggtgctggtgcagaaccgccgccagacccgcgaccaagtgctcgaggtggcggtcgcggcggatggggccgcgctgggcgccacgcgtgtgcttgaggagcatgcgaacgaccagtggatcgacttggttcacggcacgcccgcctacacgccggatggccggctggtgtgcccgctcaacgacatggccgcggacaccaaccgtctgacggtggacggccgcccgttcacgccggctggctggaacgtgcgcacggtgctcgccgtgaccgacgaggatgtgctggccgtggtgcagcgcgcgcccgaaatcgcgcctgaggtgccggacgcttgggccgatgcggccgccaccgagtccgtattcggcgaccacgacgcccgcagtttcgacgtggtgagtatcgattacaacggcacgatcacgccggtcacgaccgatcccggccagtggaccgcctcgcgcggcgagcgcggcatcgtggtctccggccgcgatatgcgttccgcccgcgcccagatgcggcatattctgggagaacagagcgccactatcgcgtccacggcggccgaacccggctttacaccgaacgtcacgtttacgcgactgggcgagcaccagctgtacacggcaatcatcgcgccgagcccggaaagcccgtacgcgcacgccgagaagctgccggtgctgatgaagccgtacggcgggcccggcttccagcaggtcatcgcctcgcagtccttctactgggagggccagtggtgggccgaccaaggcttcctggtggtcacggcagacggccgtggcaccaccggccgcggcccggcatgggaccgcgagatcttcgaggatatgaaggacgtaacgctggccgatcaggtcgaggccgtcaacgccctgcccgaggccgtcgcccggctcaacgccgatgtggaatcacgtgcggcacagccggctgcgggcgatcaggcagacgccgagaaccacccaccggcgcttcgcgccacctcccgccagcgggaggcgattcccatgccggacctcgacaaggtgtgcatgatcggctggtcgtacggcggcttcctgtccgcactggccgtgctggacgcgccgaacgtgttcaaggccgcatgcgccggcgccccgcccaccgactggacgctgtacgacacgcactacaccgagcgctatctgggcctcgacccggatgtctactaccgaaacggcatcgtgcaggacgcaccgaaactcgagcgcccgcttatgctgatccacggtttcgccgacgacaacgtcaccatcgcccacagcctgcgcctctcgcaagccctgatggcggcgggtcgcccgcacaccttcctgccgttgacgggcatcacccatatgaccaatgacgagaccgtggccgaaaacctgctcaccctccagcgcgatttcctgcgcgacgcgctggcctgacaaatcgataacacgcgcatcccacccgaggtgctccaccggtaaagcacctcgggtggtgcgccgcacccatttccgccctgaatttttggatattttgcactcatcgtcacgtgaaagaccggttttttgtctcatattcccatcaccgcgtaggatgggtgaagattagaaagggaggactatgagcgttctcgaccgttttgaaaaaagcgtggagggtgcagtcaacggagtattcgccaagtttggctccaaagacctgcagcctgtcgatctttccagcgccttggagcgcgagattgac

SEQ ID NO: 669 - DNA, 8209 bp, Unknown
  R14_15m  MAG No. k141_17899
caacgccaaccagctgccagcgctggaggccgaggccgccgccagtggcgacgccatgcaggcgcaagtgctgaaggacttcaagtccaagctcgaccgttttgccaagcgactcgacgacctcgaccgcatcagcgtggttaccttgcagaccgcgccgcagatcaaaatcatccagaacgcggaccagaccatcgtggacaagatcgacaccaccatctccaccacgattccggtgtggaagagtcagatggtgatcgcgctgggcctgtccaaccagcgcaaggttctcgacctgcagaacaaggccgacgatgtgaccaacaagctgctggcgcgtaacgcggccgccctgcacaagggtgcagtggacgcggaaaaggccaaccagcgttccgtggtggaaatcgacacgctggagaagatcaacgccgaactcatcgccaccctgaaggagaccgtgcagatccagaaggaaggcgaggccaaccgcgagaccgcccaggtcaagatgcgccaaatcgagtccgacctcaaaaacgccttgctcgaaaacgcccagcagatgtgagccgttcgcgcgccagcatgctcccgttggcggagtttgcgggaacgtgcaaccatgctcccgttggcagaggtatatgagtacgcctactggtgtgcgtatatatgctcccgctggcgggagctggcagccgtaagactggctgagggtggtcacggcgctcggctcggccggctttaccggcaactattcccgccgcaatttctctgtgggcataatcccggaatgattgccgcgctcgggaattgggtgaagtgaaggttaaaggttgagagcccgggagggttccggaaccggccacgataaccgctgctagccccgcgatacgggttggcggccggcagccaagccgattctctcctaatcaaggagtaccgattatggcaatgtttccggctttgatgaatgacacgatgttctcggatctgttcgatgatccgttctttgagggttggcgcaacacggacaacacgatgagtgccgtaatgcccgccaacatgatgactaccgatgtgcgcgagaccgacaagggttacgacgtcgacatcgatatgcctggctttaagaaggaagatatcaaccttgagctcaacaacggctatctgaccgtgtccgcctcgcgttgcagcgagcatgaggacaaggctccggccgctgaggacgaggcttccgacagcaagtgtgcttgcgcgtccgattcgggcaagtggctgcgtcgcgaacgctacatgggctcctgctcgcgtagcttctacgttggcgaggacgtgaaggagtccgacatccacgccagctaccggaacggcacgctgtgcatccaggttccgaagatgcaggcccagccgcaagtcgagtccaagcaccaaatcgcgattgagggctgacgatacttgattcgtcccgaagtcccgcttcgagtagctttgccccctctgacgagggggctcccgcgaagcgggtgggggagagataaatcgtaaccaaaccatgcttcccacgccgtctgccctacgctttcaacgccgactaacctgacagacggcgggaaacatagccaatgcaaatgccgggtagggatttaccctacccggcattttgctgtttcaatcaccgaaccccaccctgttcgcgcgccggtcgcgtgccgttctgccgctgtacacatccgatgggtagagtgacttcgaaacgatgcgagagaggcggacatatggcgaacggcgcacagaacgcaagcggcacaccggcaccggcggcaagccattccggcggccacgtcgtatccgcgcgcgccacgaccatcggcctgatggcaatcctgctgtggagcttcatggccggcaccgtgcgcatcgtctccgaaaacttcggcgccacgcttggctcggccctgatctacacggtcggcggcatcctgctgctgatgttccggcgcccggccccgattcgcgagttccccaagaaatacctgattatcggcggcctgttgttcgtattttacgaatcgtcgatatccctctcgctgggtctggcctccaccgacgcatcctcggtggaagtgagcctggtcaactatctgtggcccacgatgatggtgctgctgtcggcgggcgtatcccatcgcaagcacgcggtcgtcaaggtgctgccgggcgcgatcgtggccactgccggcgtggtgttggcggtcggcggtaattccgggctcgactggcatgcggccgtgcagcatatcgccgccaaccctttgccctatgcgctggcgttcgtgggcgcgctcgcttggtcggtgtacgcggtgttcacgccagccatgagtcatggggtggacggcacttcattgttcttcccctgcgtggccgtggcgttgtggattatccacttcgcgtccgggcaggggtggccggccgagcctccgagtctggtcgcatggctgtttgtgttgattgccgcggcggcgattggcggtggttatgcctgctggggctatggcattctgcatgggtctatggagcggcttgctattgcgtcctatgccacgccggtgctgtccaccggggccagtgcggtgttgctgggtttggcgctgtcgctgccgttttggtgtggcgcgctgctggtggccgtcggatcggtgctcaattacttggtcagtgcgcgcaaatagcggggtggctttgctcatggggcggtaataatcccatggggcggtaaaaccctcatggggcggtatcccaaaatggctttattctgccgtttcacaatttcttcaaaccgccccatgggccttttaccgccccatgggtaaattaccgcccgatgggcagcagcaacttactcgccgcggcgctcggacgggcggcgaatcgggtcaagcagcgtattcggatcggagatgccgaacatgctgcgcccgccggtggattcagggtgcttggcgagaacggccagcgaaatcgcccccggaatcataatgatcaccgaaagggccgccaatccccagttcacgaagaatccgagccccagtacgatggccaccacaaccaccaccgtgacgataatcgtcaacagtgctcgacgtgggttggtttccctggtccaagaggtgctggctgcgggttttgctgttgaactggccgcggcgtttgtggctgttgtgccatcagccgtgccggtcgtgggccttgccgtcgcgctcgtcgcggggtcagtaggggcgtcagacacgttatcggcgacattgccggtcgctgctggacgttgttcgtttgcgtgagtcatatccaccagcatattccctgcttccggctaaagctgggacaagcctgcgcaccgctaatccagcgctgacactggccttgagctgcggacgtccaggccggatgtgaacaggagctgaacggagtctggggaaaccatgagaactcgcgacaatttttgtgaaattgggtgacgctctatgaatcgcgcgctagtgttgcgtgagcttacaagacgaggagcctggagtgcggggggcgaaggatgaagaactccgtttggaaaacgttcatggaattgtcgctggtccgcggaatcgtgccgtggaccgtgttcggactgaccgcgatcgcggcaatcatactgattgttgggctggcattgagcaagaagcgcggcccggcagcagacggcctggcgccggacggcctggcgccggacggcgaatcgtcggcccaatcgcccgtcgacccagataaccagccggccaaccagcctacgaacgcggctgctacggcgtcatccgcagcttcgacggaagagacgtttatttcccatggcctgcgtacgccgcaacgtcgtcacttgcatccgctggccgccgcgctggccgccgccgcgctcgccggcgcgggcggactactggccacatggctgatgtccgacgtgttcatggtgttcggcgtatcgctgggctggccggtgatcctcaccgtcgcgggaggcttcgcgggcctcggcttcgtgctggccgccgccgtgacgttacggggggcccgtcgcgcgctggccgtcgtgctggtgccgctggtgctggcgtccaccgcgcttggcgtggactcgatctacggcgaataccagaccatcggcagtctcgtcggctatacgccataccccccgctcggttcggtcaccgtgcgcaaggcctcgatgagcgtcggcgagtggcgcgacaaggcgcgcaaggacgctctgccatccatgcccgactcgggcagggtgttcgtcgtcagcatcccgaacaccgaatccaagttcaaggcgcgcaaggcgatggtctacctgccgcccgccgcgctgtccgaccgcccgccggccctgccggtgatggagctgctcgccggtcagccgggcagtcccggccgcctcatcgacgccggcaacatcgccgccacgatgaacgcttacgccgccgaacatgacgggctggcgccgatcgtgctcgcacccgaccagaacggttcggccatgcacaacagcctgtgcgccgacaccacccgaggcaacgccgaaacctacctcaccaaggacgtggtgaactgggccagggcgacgctgccggtagccaagtcggcccgtatgtgggcgatgggcgggttctcgcaaggcggcacctgcaccacgcagctggtgccgcgtcaccccgacatctacggtgcgatgctgccggtggatggtgagctcgagccgaccgacggcagcgtcgagacgatggttcggcgatatttcgccggcgaccgcaaggcctacgacgggcaggtgccggtcaacgccatcgccgccaccggcacggccggccaggcgctgttcgccggcgccggcaaaggggatcggaagtcggtcgccaacatgcgcaccatcgccgcggccgcgcgcgcggccggcatgcagaccaccgaactggtcgtgcccggcgccgaccatgactggcatgcggtgcaggcggtctggaaccccggtctcgactggttcggcgcgcgaaccgggctgggcgaaatgacgaaatcgttggaggaatacccacaagtggaggtgttgcaatgagcgaagaacaacagcatgggaacgcgcggccggcggccatgccgcagacgcggcggcccttgcgggacgcggaaccctcgcggacgaagcccgccacgacctcccgcgccaccaaaccgcatacggcaaggtccagccatgcggcggaaagctggcgtgaactggccggtgacgtgcggcagtgggcggacgaccaccggctggccgtcaccgccacggcggcgctggtggcgctgaatctggtggcgtggctggtggccgcgatggccggattcgcgtttccgctgcggctcagcaccagcatggccgcattcaacgccggcaaactcatctgctcgctgttcctggcgcgcggcgtcatccaactcatggtcgacgccgtcctgtggctcgtcatgctgtcgatagccgaaccatggctcggccgtgtgcgcaccgtcgtcaccgcgctcgcctgcgcggccggcggcgtgctggcgggcctgaccctgtgcgcggcggccggatggatgttccaggactccctgttcgtctcccgcatgcggttcgcattgagcccgctggtgttgccggtcggcgcgctcatggcggccagcgcgttctgcagccacctatggcgcaggcgcatccgactcgtcggctatgtggcgatcctggtcacgttgctctacagcggcaaccccagcggctactgcatactcgccgccgcgctgatcggccatgccgccggccgtgtgatggccggtccgcccgcgcacgtcgaagccgaatggcactggctgcgcagcacctccttcgaggcgcggcgcatattcgcggccatcgccgtggtactggccctggggccggtcatcgccatcacctcccataaccatgcgggcccgctcagcacgatcggcctgctcatgagcccggtttccgtcgacgatggcatgctggccaaatgcctggccggtgacacgcacggcggatgcttcctgcagttcgatctgttgcgggcctcgatgcccggcgcggtgctgcgctcgttgctgcccaccgccgtgaccctggtgctggcgtggggcctgtatcgcggacgtcggttcgcggccatctgcaccgtggccatcaacctgttcacggtggccatcgccgtcgcctactatctggtcgtgccgctgagcttcgcgccggacggcatggcctccctgctgcagcacggcgcgatcgtggcctgcgtggcgaacgtcctgcccccgctgctgttcgccatcgccctgctggcggcgatgaaacacttcccgatccgcatcggctggtgcaggctggtcggcggcatcggcgccatcgtgctggcctggctggcgtgcgccgccatatacctgatatacggcatcgcccaacccgccaccttctcgccacgcgctacggcctcgtcgctgctggccgagctgccgggacgcttcctgcccatcggcttcctgagccatatgaagctgtcgttcgtgccgcgcactccgatggcctcgatcgtgtaccaaggcgtcggcctggtgttctggatcgtggtgctggccgtggtgatccactggatgggcgacgtgagcgaatcgaacgagcgagcccgggcgcgcgccgaacgtctggtcgaaaccggcggcgaatcgatgagcttcatgaccacgtgggaaggcaacagctactggctgtcccccacgggcagatcggccgtggcgtatcgcgtgctcaacggcatcgccctgacctgcaccggaccgttcggcgatccggcggaatggatggacgatctgaacggtttctcccagcactgtgcggaacgttcgctgtcgccggtgttctacggcgtgcatcgggaacagcgcgacgcgttgctggaagccggctggaactccatcgaggtcggcagcgaaatggtggtcgacccgcgcggctggaagacgaccggcaagaaatggcaggacgtgcgcaccgccatcaacaaggccaagcgcgacggcgtgaccgacgtgcagtccacattcctggaagcgtcgctcgatgtgcgcgaacagatcgaggacatctccgaggagtgggcgcagctcaaggcgctgccggaaatgaagttcacgctcggcggcgtcgaggaactgcgcgacccgcgcgtgcggctgctttacgccatcgacgtggacgggcgcgtgctgggcgtcaccagctggttgcccacctggcgcgacgggcgcatcgtcggctggacgttggatttcatgcgccatcgcaccgacagccccaacggcatcatggagttcctgatcgcgcgcatggccgagcggctgcgtgacgagggcgaagccgatcccacgcacgccgtggagttcatgagcctgtccgcggcgcccctggccggcatgaatcccgatcgggacaacgccggggaggacggggcaccggccagcgaaggcacgcaggtgctccaacacgcgctgcagatcgtggccgactggatggaacccgcctacggcttccactcgctgttcaacttcaagcgcaagttccagcccaccgaggcgccggtctacgtgtgctacccggacccggcggcgttgccgcagatcgggctcgcggtggtgcgcgcctacgtgcccagcgtgacgcccgccgaagtggccggcatgctcagcacgctgcggtcgtgaacggcgcgcgccgtcatggcgtagtaacgtgggacgcatgaacgaacggaacaacgagcgcggcgacggcaccgcgcaggtcgcatacttcgccggcggctgcttctggggtctggagcgctacttccagaacgtcgacggcgtcacggacaccacggtcggctacgcgcaatccaccgtcgaatcgccgacctacgagcaggtatgcgcgggcggcaccgatgcggccgagaccgtgaaagtcgagtttgacccggcacaggtcagcctgcggacgctgacattgctgttcctggaggtcatcgacccgttctccgtggaccagcagggcgaggaccgcggccggcagtaccgcaccggcatgttctacacg

SEQ ID NO: 670 - DNA, 24349 bp, Unknown
  R14_15m  MAG No. k141_18343
ccatcaaaccccaccaaaccaagggacagcccattgcgcatcgaccgtagcgtccgccccgaaccgtacactcacaggtggttttgtgattccatagcgtgcagccaaggcagtacgattgccggtttatccgcacgcacaggtacctacgccggttggtaaaccttacattccatacattgcaaccgaacgtttaggagcatgtatgcctgagcagcatattgataacgagaagattcccacacgtcttatcggcgcgattgtggctgtcggctcacttgccttcattggcattctgaccgaaaccgtgatgaccgtgcttttccccgcactgatgcgcgaattccatgtcgacacggccactgtgcaatggattaccacgatttatctgttggcggtggccgctaccatgcccatcagctcgtttttgaagcgccgattcgcactgaaaaccatttttcttgcggctgtgattctggccatcgttggctcgctgatcatgatcgtcgcccaagccttcccgctgctgattgtcgcccgcattattcagggcattggctcaggcgtggccacgccgttgatgatcaacatcattctggagcagtctcctcgttcgaaaatcggccgattgatgggcgtaggatcgctggtcattaccgtggctccggccatcggcccgaccgtcggcggcgcggtgaccacagtgctgccgtggcgcgcgattttcgtcatcgccattccgctggtgctaatcgcagcatgcatcggcatgaagtgcattgagcagaagacaccgaccgaggctgcctatcttgacccgattcagcttgggtccattgttgtcgcgttggtcggtctggtgctggcgctcaaccaaggtggcgtggccatcagtgcggcggtgtccggcaagtcagccacacgctccggcattatcgccattgtcagtctgattgtgggcctcgccttgttgatcgtgttcgccatgagttccaagcgtgccttctccccgctgctgcgccttggcattctcaaggatcccgccgtactgttacacgcctgcgcatatctgctgctgccattggtcgccatcggctacggctatgtcatcaccaatgtggcacagctctcgctcggcaccacggcatttgtggccggctctctggtgctgcccggagcactggtcggcgctgtctgtgccccgcttggcggctggttctacgataagttcggcgcggtcaagccgattctgattccgatcggcatcgctattttgggcccagtgcttatgctggtgttctcgatgcagcttacgcccgtgctgctcgccggattctatttcattttcggtctgttctattccatcggcaatgcgaatgtgatgaccagtggcctgtcggaggtctctcccgagttcaagccggacggcaacgccattttcaacacgtgtcttcagtttggcggcgctgccggtaccgcactgttctccacgattctttccgtggctcaggccggcgcaggagaagaaggcaccgctgagtttgctcacgccactgccgtcggcggcacatggacgtttgccacgatgacggttatctgcctgattggctggtgctgtctggccaccgcgttccgcattcgcgcctcacgccggcgcgcctaagaccgtcagtccgcggcccgcgacgcctcccgcccggattcgtcaccgtgcagtatcgggcgaatcttggcaagacgctggctgacttcgtgttcatagccgcgatcgttgggatggtagtactcggtgccacgcagctcttcgggcatatattcctgtggtgccacggcaccgggccaatcgtgcgcatacttgtagccctcgtggttgccccactctttcataagcttggtgggggcgttcctcaaatacagcggaacagcgccgatcttgccggtatccacgtccgcgagcgcctggttgatggcgttatagctggcgtttgatttgggcgcggtggccacggcaatcgtggcttcggccaaaataatacgtgcctcgggcatgccgaccagcgccacggcctgcgccgcggccacggtgacctgcaaaatctgcggggcggccatgccgacttcctcgctggcggcaatcatgatgcgacgggcgatgaagcgcggatcttcacccgctttcagcatgcgcgccagataatggatggcggcatccggatcggagccccgcatggatttgatgaatgcggaaatcacgtcgtaatggtcatcgccgtctttgtcgtagcgcacggtggcggtgtccattaccgtagccacgatttcggaggtgatgatgggtcggcgtgcgccctttttgcgggcttcgtcgccggtgaccgcgccagccgcggcctccagaatcgtgagactcttgcgtgcgtcgccaccggccatgcgcacgatatcggcgatggcttcgtccgtggctttgacctcgcccttgagaccgcggtcatcagtcagcgcgcgctgcaccagttcggtgagctgatcaggctccaatgactcaagcttgacgaccaccgaacgggagagcaacggtttgatgatggaaaagctcgggttctcggtggtggcgccgataaaggtcacgtcgcggttttcgacggcgggaagcagcgcatcctgctgggatttggagaagcgatgcacctcgtcgatgaacagtacggtttcccggccgcgtgacacgagccgttcgtaagcgcgggtgagtacgtcgcgcacgtctttgacgccggaggtcacggcggagagttcctcaaacacgcggccggattggccggccacgatggtggcgagcgtggtcttgccgacgcctggagggccgaacaggattacggagctcggcgcggtgagactgcctttgctggccggattggcgaggcggcgcagcggcgagccctggcccaacacctgcgtttggccaatcacctcgtccaaagtgcgtggacgcatgcgcaccgccaacggccgtgtcatcgactccggcgcatcagccgccccaaacaaatcgttctcactcataacgtcctatagtaccccagtgttcgaacagacgttcgagctgcaccttggcttccctcagagaggggagccaggaatcagttactcaccttgtagtcgtggaagactacttcgccggtgtcttgggtggcgtcaaggtccacgatgccttcgatggcccagtcgtggtcgccatcggaatcatcgataatctgacgcaccttccacgtatgctcgtcgttctcgtgcttgtcatccaacatgaacagttcgggcgagcgcgcttcggcgccgatgcccacgtactcgtgctcgtcgtagtagtcgtcgagcacatcttcccattcgtgcacgccggagccccagtccttgtcgagcgcgccgagcttgtccggctggtcaaggtccataagccgcacacggcggaacaaggcattgcgcaccagcacggtaagaccacgacggtcctcgaccaccgcgctttttgcgccgggcgcggccaaggatgccgcagcctcggattggtcagccgagtcaccggcgttctcccattcgtccaccagcgaggagtcgatggagcgcacgagcacgcgcagccacgagatgatgtcttcgagttgctcgtcacgcttttcgggcggcacggtgcgcgccagcgtgcggtaggcgtccgagaggtagcgcaacagggtgccttcggagcgggcgatgttgtatcgggtgatgtatccggtgaagtcggaggcggtttccaccatgtcgcgcaccacggatttcggcgatagccagtagtcgttggcccacggcacatcgtggcggtactgatcgaacgcggcttcgagcatgtcttccagtggcttcggatacgtaatctcctgcagcttatccatacgctcgtcatagtcgagtccgtcggccttcatatcggccatcgccttgtctcgggcctgacgctcctgggcacgcagcacctgcttggggtcttcgagcgtggcctcggccatggagatcacgtccagcgcataggtgtcggactcggggtcgagcagttcgagcgcggccagcaggaacggggagagcggctggtcgagggcgaagtcgtccggcatatcaagggtcatgtagtagtccttgccgccgtccttgcggtcctcggtttcgatgacttcggtatcgaacagggtttggaagatctcgtcggcccgctggtgcagatgctccttctggtcgggggtctgcgcggaatcgtcgatgagatcgtcgatacgggcacgggcgtcaccgccctgcgccacttcattgagcaccatcgaatgcgtgattttcaggtgcgggaccagggtttccggttcggcgtcgatgagcttgtcaaacgtgctctggttccaggtcacaaaaccttccggcgccttcttgcgcttgaccttcttgagtttcttcggatctcccccggccttggcgatggctttctggttttcgatttcatattcgggagcctcggcgatcaccagtccctcggtatcgaatcccatacgaccggctcgtccggcaatctggtggaattcgcgggcgcgcaggcggcgcatcttggtgccgtcgaacttggtcagggccgtgagcaccacggagtgaatcggcacattgatgccgacgcccaatgtatcggtgccgcaaatcaccggcagcagaccctgctgggcgagctgttcgaccaggcggcggtagcgaggcagcatgccggcatgatggatgccgacaccggtgcgcagcagtcgctgcagaatcttgccgaaggctgtggtgaacttgacgcctttgatggcttctgcgatggcttggcgctgttccttgctggatacaccggtggaggcgagcgcttgcgcggtctccaatgcggcgtcctgcgaaaagtggaccacgtaaatcggggtttcgccgttgcggaaggcgagttccacggttttttccatcgggtcgagcgtgtattcgtagctcaacggcaccggtcgcggcgcgtcggcgattacatccacgtccggggtgtcgttcagatcggagagcttgtcggcgatggcgtccacattgccgagtgtggcgctcatcagcaggaactgggtctgcggcagcgtgagcagtggcacctgccacgcccagccgcgctccggatcaccgtaataatggaattcgtccatcgccacgaggcccacatcggcatgggtgccttcgcgcaaagcctgattggcgaggatttcggcggtgcagcagatgatcggcgcgtccgcgttgatgtggctgtcgccggtgatcatgccgacattgtcgcggccgaacacttcgaccaagtcgaagaatttctccgacaccagcgccttgatcggagcggtgtaataggagcggcggccagtgcatagggcggcgaagtgcatgccgagcgccaccagcgatttgcccgaaccggtcggggtattcaaaatcacatggtcgccggccaagaggtccataatggcctcttcctgatgcggccacggctcgatgcccttgacgtcttccacccagccgaagaaccgttcgtagatgtcgtcggccgtaagattccgttcgcgtccgtcgccgtcccattcgggggccagccgccccagggatccgtattctttctcgtcagtcataatgctcagtctacctagtggcctattccgacggcacgagccgccctccgtcgctatgcgacgcctcccgccagcgggcggagccatgcgaagagctgtgccatgcgcttggctccgccaatgggaggatcgctcacgccaaccggcggcgcacctcgtcggggtccacctcgggttcgaggggaggccaggtcatgttcatgttcttcaaggtggtgcgcagcagttcggagaccacggctcgcgaataccagcggttatcggccggaacgaggtaccacggtgcggcggccgtgctggttttctcgaacacttcctgccaagcgaacatgtactcatcccatcggtcgcgggcctcgaggtcggagatatcgaatttccagaacttggtgggatcatccagcctcccaagaaagtgttttttctgttcttcctggcttaccacgaggaagatcttgaggatggcgcatccgctggcggccagttcacgttcgaaatcgttgatctggtcgtagcgggcacgccatacgtcttcgggataggtgccatagacgtgcggcatgaccacatcttcataatgggagcggtcgaatacggcaatccaccccggcttgggcaattcacgcttcacacgccagaggaagtcgtggtcgagctcctcggccgtaggcttgccgaagccatggtaatggatgcccatcgggtcgccttggctgaacacgtggcgcacaatgccgcccttgccagaggcatccatgccttgcagcacgatgagcagccgccgtgccgagcctttgacgccattcgcgtacatgagccgctggtatcgggcgatttcggaggagctgatcgaaatgaacttctcggcgtcctctttattgccgtcgaatccgggagtggaatcgccttcgacatcagtgacctgcatgccgtggtggaacataagacgttgagcgggcggcaacgaccatacggcgctgagcagttcactggatttcgccgcacgcgccagtcgttcaggcacgctggcactggagtcgatggtgtctatgcgatccaccgcgagctgtaataccttgtcgatccgtcgatcggttttggattcctttcccttgccgttcttgttgttctttcctgaggattttccggccgtaccccacttgccggcctcttcaggctcgttggttctgtcgtcgtccttggtcatgctcccgattgtacgtcttgtaactcaggagacctagcaacgtagcgacattcacatttcgcctgttactgcaaatctataggcatgcagtcgttcggaccgtaattgttggctttgcaccaattccaagcctcatccgtcgagtcgaagccctcaccggcaagaatcacatagtatttgtcggaattgctgctgtaggcgggccagtcacccgaccagataagcagtacgtttgaattcttgttgtgcatcgtgatgaattgcgcaagaatatcgcggtagttccaggtcttgccttcagcctccatacccttacgcttgctggacagctgtgcggtatacgtggaatagaacagctctgcggagtccttgtcgtgctcgacctgccaatccaatgccttgcttgcattattttcggcttcgtcatccgtaacgttgctgccgcttatcgcgcctggatcagacgatccccagcaatatcttctttccggcagacccaccggaacgcggctgcgcagcgccaccgttgcctggcgccgtcgacaatgtcgaagtaggtgcagtcgccgtgttgaaacttgggggcaacggcatcgaacccgctggcacctgctggggagcagccggtaccagcgtcgggccatccatcgactgaggacttgggcttggcgcagactgtgccatcggcgcaccgcattccgtgcagaatcggcttccctccggcatctccgttccgcaaacctggcacttcatactctctccgttctctctcgtccctatcggccaatcccccgcccgttttgcagtacataaagaagcggcaaacggcccgaaacatacctgagccatcaggaagacggcacgatctactacgagaaagagatcatcaccgaccggcaaatcgtcggcatcatgctgaagcatccgaccagcgcacgcggcttcaagcgctacttgcgcgccgcatcatgacgcttgaccacgatggtgacgccacccgcagcgaacagcgtcgccagaaccacaaccaacgcaaccgaggcaccggtattggccgtatgttcggtctgctgtggcttggtgctgccattggcattgacgctaccgctatggttgccgttatccttgtcgtccgtcccggtggacactccggtaacggcaacgggcagagcgaccatggtcttattggtcgcaccggtcacggtcaggctgatatcaccggtcttggttccggcgggaatcgtgaccttgagctcggcggtatcgccattcgcaacctgtgcttcgccgaccatctgctcgccgatggtggcggtcagcttcgtctcgtcaggcacgcccagcgaggtgagcgtgagcttcgagaagtgcagggtgaacgagccaccggccttgaccgcaccggtcgggataccggtgacggccactgcgcggcggtcgtagcgcggagcaaccggatcgttgtccttgagatagtcaatccaggcgtcgcggtccaccaaaccggtgtccttggtgttcgtgccttgggcgaaggcgcggaagttatcgccgccctccaacaggaagctgaacgaaccgatacggtagttgcgtttcagatccaaaggctcaccgttgacggtcaccgaggtgatgtgatggccttgcgcggcatccggatcatacgtgtagctcacgttgtgggacagtccgagttgcagatacgcgcgcgatggcgtgctgccgtccgcgttcgtctgccactgctgttccagcgcttccttgaactgcgcgccggtaagcgtggtggtccacaggttgttcaggaacggcagtacagcgttggcctgggcgtaggtgatattgccgtcggcatcgagcgtgcaggcgtcattggtgccggacttgcagaattcggcacgcagaccgccggggttgaccacaccgatttcggccgcgccgtggtcctcgcttttgagcgaatcgagcagcgcatcggccaccagattgcccatggtcgattcggaggcgcgatcgtcacgcttgccgtccttgaatgcggtggtgatatccgcagacaccttgccgaccttctcgccgcccttttcatcggccaccttaagggcctggtacacgatgtccctcaccttggcgacagtcgggttcgcggcggcgagcaggccatcgttgtattcggcgtaatcgttgtagtgcggatcatttttgtcggcgggctgcgaagccacctgcacggccgtgttgccggacttgtcgtaagacaccgcaccggtggccgtgttgtaggtgagcaccacttggccgatgttggcggcatagctaccggtctggatgatcggccggttgttgtgcgcgggatcggtgtacgagtacttcatgtgggtgtgtgcagtgaagatcacgttcactgccgcatcggtatcgtccacgatcttctggaatacggggctggcggccttctgctcgtcaagcgtgggcttggccgtggcgtcatcttcattggaggctgcaccctcatggtattcggccacaatcacgtcagcctcgccattggattcgtcgccgtcggtgagttgcttggccacacggttcacggcttccaccggatcgccgaattcgatgtccttgacaccaccgggagcaaccaatgtgccggtttcctgagtgaccgcaccgatgatgccgaccttcacgccgttcacttcctgaatactgtactcgggcagagccggggttgtggtgcccttcttgtacacgttggcaccgaggtaatcccattgggcgttgcgcgcgccctccttgccgatcacacgatcggtaaggtcggcatagccttgatcgaactcgtggttgcccaccgccgaagccttgacgcccaaagcattgagtacatcgatggtcggctggtcctgctgtaccgaagagttgaacagcgaagcaccgatattatcgccggcggacagcagcagtgatgagtcagggtattcgcccttgagctgctcgatggtggcggcgaacggcacggtgaggttcttgtcgatacggccgtggaaatcgttgaagttcagcagattgatggtggtgctggcgggaaccggctgattggttgccatatagcccatacgcaatgaatggccattggtcacgccgtcgtctgcccagaacaccggcttgtacaccttgccatttactaccttggtggcttcggtatcaggggtgatggcaaaaccttcggtgttctgcgtacggatttcatccggagtgtcggtcagcttggtcagctgcagcacaccgttcttgaattcgtaggtgccgattttggcaccggtgttcgcgtcattgtcgctttgggcgagcaactggttgtgctcggcgtcccaagtcagatcgcgcgggccatcatagccggtgttcactgcggactgcggcaggtcgatgtcggccaccggatgcaccaggtcctcatcattcacggtttgcagtgcgaaggcgtagatatgaccggttttctccagtgcggcgaagaacagaccgccgaaatcattgccgaaaccgtccgggtcgtaggtcattacgttcttcgggtcaaggttggattggaatccgttggcggtcaggaccgagtcgggaataaaggctatgccttccaccccaagattggcgtccgctccgtggcccagcgtcacgccgaactgcgtgagtgctgcggtgagattccactcgtgcgtagcggtcagctcttgcgctccgtcgccgttggcgtcggtggttttcgcggtcacgtcatactgcaggatggaaggccgcggcacattcttgttttcgttgtcgcgctcggcgccgatgaatatgcccttggatgaatctccgttgatcagcgtgatgccttcggagtccacaccgcccttgccgtccttgaagtgcagctgcttgccgcccttggtctgaccgttgttggtgaaggtccagccatcagtgggatcctgctgccatgtgccgttctggtagacgaacttgttgatggagccagggcccttatcagcggtgttgccgagcgtggggttcagatcgttgtcggccgcccacagcacgccttgcttgccgtctttaccggcttcatacaccagaccagacagattgccgtcagtgtggtcgccgccttgtcctttggcgccaaattcgccttcggcatccactgtggtcacatcggccaatcccgaccatgcgtccacggtcatggtctcgccggcgggcggagtcggagtcgggtcatcgaacacgttctgtgcaccgggcgtgggcgtatcggaaagcgcggaagtgccatcgtccttacgggaccacgactgactgtcgctcatcttcttcacgccggttgtatcggtattccatgacgtggaatccaccacatcgctatcggtaaagtcgccgctggtagtggtcagataggcttcgtcggcatcggaacccaggccgggctcggccttgtcggggtcgatgtatgccaccagatatccgccggctttgatgacggtgtccgtattcgttacttcgctggtgccgatggtgtagtgcttcttggctttcttgccgctgtcgtagatgccccagcccttcacgtcaacgtctgtggagccggtgttcttgagctcgacccaatcgcaacgcttgctatccgggtctccggcagctttcgtattgccggcatagacctcgttgatgattacggatggtttggcagccgtgttctgttcggcattggcctgctgctcgtccgcagccgcagcgggcacgccgatcagggcgatgctgctcagtgtcaccgcagcggtgagcagcgcgatggcgcgccgcgacatcgcggtgaaattgttggtgtggaacattactcccgttccttcctcgggttgtgccgccgcagcatgatgctcttcgacggatgacaccccgagagtatgagagagaaatgaagccgacaccgtatgaaggcaaactcggcagatctccaaactgaactttggctgaattaccgctgaagctggttcttggatttgcgtcgaaccgtccgtattccgccgacaatcgcgattacagcggtaccgatggctacgctgatcaacgccggtcgttgcgcggcatggagggtggcgagatccggtccggccgcaatggcgctgttttcacccgccgagccatcagacgccggatgattacccgcgtcggcgtactgggcattgaccacactcgggccggcaagcgccacctggtcggcggtctcgaccttggccacatcgccgtgcttatccaaggtgacgcgggcgcacagggctttggcccagttgatacgctgccagccgtcgctcgattgccatagggggtatccggaatccaaggcagtggctttcaaaatcgcgttgcgctgatcggcgtgcagttcgggataggccagtcgcagcacgtccgccgccccgcgcggtgccacgaaatcagcgccggactgggcggtgtcttgcgggaaggtgtaggtcaggcgtgcggtgtagacgcgcacggccgaggcctggtccgcgaccggctcggtggccaccgggtccagaaaatcgttggtgtagccgcccgaaccggaggccttggtgttggcgatgcaggcggcgagggtagtgccgtggccgtccgcggcgcagcgggacaccagatagtcccgcagctgccgggacgcgggcacgatggacgaagcgaattcgttatgccagtactgcccgttctgggcggatgcgccaatgcgcccgcccatgatgtcaagcggataatgcacgccgagcacgatgcggttgttgccggcctccgaagtgcgggccatgatttgcggcgcgagttcgggaatcatgccggccagcgcgataccccccgaataggcgccggtagtgtggccggaggggtaggaactgtttttctgcaagttcgagtagccgggcacgtgttcgagccatgagggtgattgcttgatgtcaagcgtggcgggcagtccggcgagatcgttagtgccgccgtagctgctttccgcacggttcagataggggcgcggatgcatggccgcacgttttgaggcgtaggtggaggccacgttaaaggagaagatatcggcgacggcgttgagtttcccggatttgagcccttcgctcatatatttgccaagcaccggaccgagcgcgtccggcatggattcctcggcttgcagatcggagtcgacgagcgcacgcttgcgttgggcgttcaggccatccttatcgagattttcggcggctttgtggttaatggccacggccaaatcttcgtcgagtttcattgtatcggcgtcgagcaccttgccaccgtgttcggcatcggtgggggcctgccaatagttcttttcgtagtcggagagcaatgccacccaatccgggttgggcagctggtcggcctgtgcgattgcaggcgtcacggctagcgtggccgccaacgccagcggcgcaatggtcgcaatagcaaaaacggaggataggtgccggaacatcttcatatgttccaacctatcctccgtgaaggctacgtagccggagcccagtcaaacactcagtaaattcttcgtgccggcttagcggcgattgagctggccgtcaggcctctggcttgtcctcaggcttttgagactcctggaattcgccggtttccgggtcaacctgtgactcgggctgggtggcgtcatatccctgttcgtaacgggtgcgccgccagttgcgaatcgaggcgttggtgccacggtgatgcacatggtatttgcgcggcgtaccgcccagcggcagctcttcgacctccttggccacagcgatctggttgacattggacgggtcgccggcggcgatcggcgccacgggctcgggttcggcgggtgcggccgtacgctgctgcatgcgcgagggcagccattcggcgagcctcgacaacagccagcaggcgacgaagtagatcaccgcggccatgaccagcgtctgcaggatgttgaagtacatcgagccgagtcggcgcgattcctgcagcaggtcggtatacatgatgatcgagcctagggcggtgtccttcaacaccacgaccagctgggtgacggcggccggcagcatggcgtagacggcctgcggcacctcgatctccatcagcgactgcgtttcggtcaggcccaaagcgagcgaggcctcacgctggccgcccggcagattgccgacgccggagcgcaccagttcggcgaccaccgaaccgttgtacagcaccaaggccagcaccacggcccaataggacgggctgggcaggcccgcgaacgcgaaccatcgccagaagaagatcatgagcagcagcacgggaaccgcacggcagaactcgacgatcacggcggagacgccacgtaccaacgggttcggcagcagtcggcccacgccgaacaccaagccgaacaccacggcacccaccacggccacgatggtggccttgatggtcatccacagtccgggcaggtagaagtcggtccacgcctctcgttcgacggcgggcttccacagctcccagctgagctggttctcgccgtccggcgggttgtgcaggcgcatgaggataaacacgagcaccaccgcgaacagaatgcccgcgatccagttgacgatgcgaatggtgcgccggcccttgggacctggcgcgtcgaacagcacggaattcgaagtatcggccatatccgtcacctccttacggcgagtttgttggacaggtacgtggtgagcatgccgatggggatgatcaggatcacgtagccgagcgcgaagatcaggaagatttggatgatcacgtcgggacggaattcgatcatctcgctcatcagcgaggatgtttcggtggccacggatgcggcggcggccacggtggagttcttgagcagggcgatcagcgtgttgccgagcggtgccacggagcctcggaaggcctgcggcagaatgatctcggtggcggactgcatgaagcccaagcccagcgctcgtgcggcctcggcctggccaatcggcacggtgttgatgcccgaacgcagagattcgcacacgaacgccgccgtgtacaggctcaggccggtgaccgcgagccagaagaagttcgtggtgaaggtgtcggagaagctgagcttcagctgcgcgtaggcacccagcaccatgaacaccatgatgatggtcagcggcaggttcttgaacagttccacatacgcaccggccacggccctgagcgaggaaatcggcgagatgcgcatcaccacaaggatcacgccgaggatcagggagaacagggcggaccatagggtcagttcgatattgaccagaaacgcgccgagcacgtcatactggctgaagagttccaggaatccgctcatcaggcctcctctccttcgtccggggtgggcgggttgtagcgtacgtcgggcgtgtagttggtgcccttggtgttatcgctgatggcgttctcccacgagccgtcctgaatcatgtccacgatggcgttgttgattttggtggccagctgtgtgtcgcccttcttgatgcccacgccgtagtattcctgcgtgaacggtttgccgaccaccttgagcttgccgcgcgaggcggaggccaggccggccaggatgatgtcgtcggtggttaccgcgtccacgatgccggagaacagggcagtggcgcattcggcgtaaccgggctgttccataagctggacttcggaggcgaacttctccttgacggtggcggcggaggtcgaaccggtgacggagcataggcgcttgccgttcaggtcttcggggccgttgatggagttgtcgtccttgcgcacgagcagatcctgtccggccacgaagtacgggccggcgaaggagacggccttcttgcgctcgtcggtgatggagtaggtggcgaggatcatgtccacgtcgccgttctgaatcatggcctcacgctgcttggagggagcttccttccagatgatctggtcttcggaatagccgagtttcttggcgatgtacttggccacgtccacgtcgaagcccacgtaggtgccggacttcttgaagcccaggccgggctggtcgaatttgatgccgatgcggatcttgccggtttcgtccgcgccgcaggcggccagcgacattgtgcaggccacggcggcgagcgcggcgatcacgcggcaaaccttccgtttgaacgtattggtgaatgtcattggattgcgtacccgtctttcagtgggttcgtcagtgggtgaggatcttcgagaggaagtccttggcacggtcggtctgcggatgctcgaagaactcgtcgggcgtgttctcttcgagaatctggccgtccgccatgaagacgatgcggtcggcggccttgcgcgcgaagcccatctcgtgggtcacgcagatcatcgtcatgccttcatgcgcgagttcgaccatcacgtcgagcacttcgttgaccatttccgggtcgagtgcggaggtgggctcgtcgaacagcatgaccttggggcgcatggcgagcgcgcgggcgatggccacacgctgctgctggccgccggagagctgggagggcatcttgctggcttgggagtcgacgcccacgcgggcgagcaggtccatggccagttgctcggcttccttcttgtccatgtgacgcaccttgatgagggccaacgtcacgttttcaagaatggttttgttggcgaacaggttgaacgactggaacaccatgccaacttcggccctgaggttcgcgagctccttgccttcctgtggcaggggcttgccgtcgatgcggatgtcgccggaatcgatggtctcgaggcgattgatggtgcggcacatcgtggacttgcctgagccggacgggcccacgaccaccagcacctcacccttggtgacggtcaggttgatgtccttcaggacgtgcaaagcaccgaagtgcttttcgacgtgggtcagttcgactagcggacggttcgggtcctctttgccgggaaccagcggggtcaatttggccttgcttggtgatgttgtgcttgtcgtgcgcgaacgcactgctgtttcattgttcgtttcagacatgagtgggaggataacacaccgacgtttccaacgtgttcacagtatgtccacacagttgctcagtcgatgtctcatttccgcatcagacatcgtgaaggcggcattgggcatcggcatacattctcgctgagtcgcgcatcgctcggcgtctgctgtgcgctgattgcctgctgcgtggtggctgagacgttgctgcgacggcaaagcgggcacgtgttgtcctatctgctgattccatgtttggccttggtgtcgttggcgttgctgccgtgtatgctgcagtcgggcgcatggctggcggtcactttgtattgtgtggggctgggctcgccgtttcccatgtcgtattcgtataaatgtgctaggcattttgagcgtggctagctgttcgcacacgatgagtgctgttatacggtggacgacactcccgaagcgcggtggataaccgggcgcggcacacgatatgccggtggataaccggttcgcgccgcttaagttatccccatttttcggttttgcccctgtgccaccgtggaatgcgctacgctcggcgcatgaacggatacagcgaagcgccgcacaatggcgaaatcaacaactatctgcgcaaagatcttgacgccaaagccacggccaagaacacggcctgttggaatctgctgggcaaagtgcgcacgaaacgcacgttgtgtttctcgctgtataccgcattggaattatgcggcgtggagttgccgaggcacagcacgttgccgcagaaggatttttatgtgacggtgaggagcaaggggacccgctcttcattggacaatgtcgactatcgcatatggaatgcaaagttcagcagtatcgctttttcaaacggcgtaacctgcatgcatcccatggatgcgtggatacagtttgcccaatatctcaacctcactgaattagtggtgctggctgaagcgctcatcagacgttatggatatgccattgaacaattcactcaacgactaacggcctttcaccgcgttattggtcgtgcgcgttgtgaggcagcgctgaagctcgtaaaaccatcggattccgttcaggaaactcgtacacgcttggcgcttatgcttttcggcctgcccataccgcaaacacaatatggcattaccgattcagagaacggatacacctacaccgttgacatggcttatccacaatacaaagtcgctattgaatatgatggcgatcatcaccgtcgcttccgcaaacaatatgtgcgggaccagcaaaaacgtcgacgtctgcggcaattgggctggaccgtcatcgaggtgttcgccgatgacctgtggaacaccgccaaacaacgtgccttcgcacaagaggttgccaccgcgatgcaaataccgcttcctggccgtcctcaaccttcatgccgggtattaatagacggcagccttaccatcaatgcgcgcaaaggggaatacaggaggcggaaacaagcaaaacacaacaaagcctcacaacattgatcaaatacggagttgcgatcgctcctcatggggcgacaattcccccatgaggcggcaatttgcccatggggcggtttgaagaaattgtgaaaccgcggaattaagccattttgacctaccgccccatggggttttcaccgccccatgggttgtttaccgccccatgaggaagttaccgccccatggaaggataatcggcaaacgccaagggggacaccgcatggtgcgaggtttgccgcatggcggaggtgccatcgggcggagtatttggcaccccttggcaggtatttggcacattgggccccacccgcaaaaagcaaatggcccttggaattattccaagggccatttgcggctaatagcaccggagcattactcctcgaaaattaatctacgcatgcggagaccgccgttcgaagccgaaggcgcactaaggtgcgtcgagcgctgaggaaaggcggtatacgctccgtagattagttttcgtcggcgtccgggtcgtagtcgacgccggtctcggcgcgctgctcgtcggaaatcggggccggagcaccggtcagcgggtcgcggccgccgccggccttcgggaaggcgatgacgtcgcggatggagtcggcaccggccaggatggacacggtgcggtcccaaccgagggccaaacccgcgtgaggcggagcgccgtacttgaatgcctcaagcaggaagccgaacttctcgtcggcctcttccttggtgatgcccagcacatcgagcacacgggcttggatgtcgtcgcggtggatacgtacggaaccgccgcccatctcctcaccgttgcagacaatgtcgtaggaatcggacatggcgtgctcgggatccttgtcgaacttgtcgatccaatccttgctcggcatggtgaacgggtggtgcatggaggtccacttggagtggccgacagccacatcgtcatcatccggatcgtcggtgggcttgaacagcgggaagtccacgacccaagtgaaagcgaacttcttcggatccagcaggccttcgcgggaggcgagctccacacgcacggcacccagcagcagctgggcggactcgcgagaaccggcggcgaagaagacggcgtcgccttcctcggcaccgacggcctcgcgcaggccgttgcgctcctcatcggacaggttcttggcgacggggcccttgagttcgccgttttcgccgaagaccacgtaggcaaggcccttggctccacgctgacgagcccaatcctgccaagcgtcgaactgacgacgcggcgtggcggcaccgcccttgaagaccacggcacccacgtacggggcctggaacacgcggaacggcgtgttcttgaagtactcggtcagttccaccagcgggttgccgaagcgcaggtccggcttgtcggagccgtacttgtccatcgcatccttccaggtgatgcgcggcagcggcagctggacctcatagccggcagacttccagatggcggcgatgaccttctcggtcatggccatcacatcttcctgatccacgtaggccatctccatatcgagctgagtgaactcgggctgacggtcggcgcggaagtcctcatcacggtagcagcgggcgagctggtagtaacgctcgacgccggagaccatgagcagctgcttgaggagctgcggggactgcggcagggcgtaccaggaaccgggcaccagacgggccggcaccacgaagtcgcgggcgccttccggggtggacttgatgaaggtcggggtctcgacctcggtgaagtccatgtcttccagcgcgtggcgggcggccttagccatgtcggaacgcagcttcagattgtgctgcatggacggacggcgcaggtcgaggtaacggtacttcagacgcacgtcctcgccaggcagcttgttctcggactcattctcgagagcggtggaaacctggaacggcagggcgtcggacttggcgaggatctcgatggtctcggccacaacctcgatcttgccggtggccagatgggtgttctcgttgccatccgggcgcaggcgcacttcgccggtaatctgaatcacgaattcgctgcgcagcgggcgggccatatcctcgtcgtaaatgacgacctgcacgaggccggtcgaatcacgaaggtcgatgaaggccacgccaccgtgatcacggcgtcggtcaacccaaccggcaagggtgaccttctggccgaccagggcctcggtcacttcagtggcatgatgtgttctgtaagccgtctggctcattatcttgtttctcctcgatttttcgcgcgaatacgtcagatttcgacggtttgctgggcaaccacagtatccggctcccacgacgtgcaatcggcggcaacctgctcgcccgtgacgatgttcttgacctcgtcgccagcgggctctgcgccttccgcaccttcggcagcggtggccgggaaccacacgtacggaatgccgagtttgtccgcgtacttgatctgcttgccgagcttggccgcggtgggtgccacgtcggtggcgatgccgcgcgcacgcagttggttcgcaatacggttggcggccgggcggtcctcttcattccacacagcgaccagcacggcggccgggctgacgcggttggcgtgcgcgccggcagcgtgcagcatgtagctgaccagtcggctcaggccgatggacaggcccacgcccgggtacttgcggttgccctgggaggcgagattgtcgtaacggccaccggaacagatggaaccgagtgatgcggcaccgtcgaggaaggtctcgtagacggaaccggtgtagtagtcgagaccgcgggcgatcttcaggtcggcgatgacggaaccggggcggatggcggcggcctcgtcgacgatcatggccagggtatcgagtccctgacgagccagcgtgtatgcctcggaatccttggcgatgccgtgagactcgcacagcgcatcgaacttggcggcaagctcagcaccgtcggaggcggtgagctcggccaattcgaggcaggcgcgtgcctgtgcttcggtggcgccgcaggtctcggtgagcagtcgggccacctcatcggcaccgattttgtcgagcttgtcgatctcgcgcagcacgccttcgacgtccgtcaggccaaggccgcggtagaagccttcagacaacttgcggttattggcgtgcacggtggccttggggaggccatacgcgcgcagctcttccagcgcggagaccatgaccagcggcagttccacttcatagtggtcgggcaggtcgccggcaccgatcacgtcgatgtcggcctgcacgaactcgcggaagcggccttcctgcggacgctcgccacgccacaccttctgaatctgccagcgcttgaacgggaacgccaacgcacccgagtgctcgaccacataccggctcagcggcacggtcagatcgaaatgcaggcccaaccgctcttcaatcggagtgtcggattcatgaccgacctcctgcaaacggctcagcaggtagatctccttgctggtctcgccttttttcaacaaagaagcgccggtttccaccgctcgcgtctcaatgccgatgaagccgttgagctcaaaaaccttacgaagcgtatcgataacacgctgctccacaacacgttcggaggggagccactccgggaatcctgatattgatgcacctttagccacgaaatcaatataataggtgagggttgcgtcaaaacttcctggttcgcccgggatgggagacgctcccgcttatgcattctacgctttaaggagctggccatggccgacgaaactgtcaccgaacccgtaaacaccgctgcgcccgaagagcaggcaacgacacccgcacccgaagccagcgcggccacgccggcgccgactccgtcccccgcttccatgccgaaaccgcacgcgccctcccccgccgccttcgccaagaagactccgtcggccaagccgcgcgctgccgccccggccgccgccaccgccacctattccgaggctgatgtcaaggccgccgaggccttcggccgcgtggatgacaacggcaccgtcttcgtcaaggatggcgacgccgagcgcgaggtaggccagttcccggatgtctccaaggaagaggcgttggcactgtacgcccgtcgtttcctggatctcaaggccaagctcgatctgctggccacccgtctggcttccccgaacatcaaggcccgtgaaatcgacgaatccgcgaagctcttgggtgaagaaacctccgagccggcggtggtgggcgatcttgccgcactcaaggcccagtacgaggagctgaaggctgccggcgaggccaagaagaccgaaatcgccgaggcacgcaaggccgctcaggccaaggccgttgccgagcgcaccgccatcgtcgagaaggccgaagctctggcggcctccctgggcgacaacaccaactggcgctccaccgccgacaagttccgtaacctgttcgacgagtggcagaaccaccagcgcaccaccgtgcgcatcgacaagccggaggccgaggcgctgtggaagcgcttctccgccgcccgcaccaccttcaaccaggctcgccgcaagtgggctcaggctcgcgacaacgagcgtacagccgccaaggaagccaaggaagcgattatcgccgaggccaatgagctcaaggattccaccgcttggggtgagacttcccgcaagttcaacgatctgatggaccgttggaagaaggccggccgcgctggccgtaacgaggacgacgagctgtgggccaagttccgcgaagccgccgacaccttcttcaacgctcgtcaggctgatcgcgatcagatcaactcctccgagaaggagaatctggctgccaaggaggctctgctggtcaaggccgaggctctggtgccggtgaagaccgacgccgaggccaagaaggcccgccaggagctggccaagattcaggaagagtgggatcagatcggttacgtgccgcgtgacgatatgcgccgcatcgagaaccgtctcgacgccgttgacaagcagatcaaggccatcgaggatgccgcttggaagcagaccgacccggaggccgacgcccgcaagtccagcttcgaggagcagctcaacgcccagctcgccgagctcgacgccaagatcgcggccgaatccgacccgaagaagaaggccaagctcgaagccgagaaggccaccaaggagcagtggctgaacgccatcaagtaagggtctcgtgccaggttcccctctgcgggaagccggcagcaaggctgactgaggggagtttacggttataccgcaagctcccctcagtcgcctacggcgatagctcccctcagcgaggggagcttcgtcatatttatgccgttttcttctgccctatactcataactccaccccatagttcctcagtcacccagcaattggtgtcttacgcctgagtccctaccggtgctgcaacaattgccgtgagcccttgatgtgcggccagatattcatgcaacggctggctgtatggcatattcagctcgccgtaattggttccggcacggaaggcggggtaactgtcgccgccctgaagcagatatgaattggatgcgataatcaccaggtcatcgtccgcaatcggtcgaccgtcaacggcgaggttcacgatacgaaccgccgcatgttcgtcggcagcacactcgtcagcgtcagcgttggtatcagcggcggcatcgg

SEQ ID NO: 671 - DNA, 15377 bp, Unknown
  R14_15m  MAG No. k141_18543
caagcagctcaccttgctacgtcgccacaagatcggcttcatcttccaaagcttcaacctgttgcccatgttcaccgcagagcagaacatcctcatgccgctgactttggccggtgataagcccgaccgtgcctggttcgacctgctcgtagaaaccttgggactcaagcagcgcctgaaccaccgaccgaacgagctgtccggtggccagcagcagcgcgtggccatcgcccgcgcgctgattaccaagccgaagctggtgttcgctgacgagccgaccggcaacctcgactccgtttccagcgccgaagtgctcggcttcctgaagcgttcggtcaacgagcttggccaaaccatcgtcatggtcacgcacgatgcggtggccgcctcctacgccgaccgtgccatcgtattcgccgacggacagatcgtggccgatgaatcgaatcctactgccgaaacgatgaacgagctgcttatggccgaacgcgaacgcgccacgcgcactgccgtcaccagcacacgcgccgacacgctcgcccgtcttgccggcgtagaggatgtgcccaacctgcccatcaccgacgctccattgcccccagccgggagaaccggcaccatacgccatgcccgcgccgccgcacagcacactcgctgagccggaaagcgagagacaggatacccccatgttttccatcactctgaaacttatgaagaaaagcgccaggatgctgattccggcaggcatcgccatcctgatcggcactgcgttcatcgccgctaccttcctgttcggcaacgcgatgaacgatgcgcttgccgcccagaataccgcccagctcggcggcgcgaactacgtgatcagcccggatagcggcaaggacctgaccgataaggaccaggactacatctacacgcgcacggttaacgacttccagcttgaccgcatccgcgccaccaaaggcgtcaaggacgcacgtgccggctacgcgggttccgtgaccgtaacccgtggcaacaagcatgccagcagctacgtcatcaccaccgccacaaagcgcacgctgctgccggtcaccatcacgcaaggagaccagccggcggacagcaacgagatcgccctgaccaagtccgtagccgaccagctcggcgtcaaggtaggggaccgtgtgaccgtcaactcgcaggcggcgcagtatgcgggcaagaccggcgattcggccggtaataccggtgacgctggtgatgagtcggcccagaacgccgatggcacgagctcgcacgacggtgattccgatgccgcgtccggcgcgtccgccccatccgacggcaccgacacggccgccgactccggcatgaccgtgcgcgtggtcggcctcaccgacgacccgaacggtgcctacgcctactacggtggcgcttccgtgctttccgacaacgtcatcaccgcaatggccggcagcaacgatttcggcaacctgcctgtctacctcgtctatctcgacatcgacgatgccagcgacacggccgcggcatccaccgtaaaacaggtcagcacactgctccctaagcatttcagcgtgcaatcccgtgccgcgctcgtcgaggaatccgtcaaaagcatgagctcgggcgaaaccagcatcaccaccatcttcctgctgagcttcggcatgctcgccatgctggtcgcggcactcgtcatcgccaacaccttccaagtgctcgtggcacagcgccgccgcacactcgccctgctgcgcaccatcggcgcgaacaaaagccagctgtatgtctccgtgctgtttgaagccggtgtgctgggactgatcgcctccgcactgggagtgggcctgggcatcggactcatggccgcactatgccagtcgggcctgatgaaagccaccggcatgaccatgcgactggtactatccggtccggtgttcacggtgcctatggcattcggcatcattatgacggtgattgcctcgctaggctccgcgcgttccgctaccgccgtcaccccgctggaagcgttgcgacccatcgaactgaccgacacgcgacgggccggtgtggtccgcgccgtgatttccatgctgctgattgtgggcggcgtggcactgtgcgcattctctgtatggcagatgtccgagaaaatcgccggacgtgattcaatggccgacaagcagtattcgctggtgctgctcgccgccatcatcggatgtgcattgatcttccttggactggtgctttccgccacgttctggctaccggtgctcatgcgcggcgtgggcgcgctggttgcactggccggtccgtccgccaaagtggcacatgcgaacattcagaagaacccgcgccgcgtggccgccaccggtgccgcactgcttatcggcgtgaccctggtctccaccatcgccaccggtgccgccagcgccaagcaaaccatgaacgaggcgctgaccacgcgctacagcgtcgacatgattgccgctggcgccgatatgactggcaaacaggccggcgaggcagccaaagtcaagggcgttcagagcagtatctacgcgccgacccgcatgatgaccatgaaggatgccgacggcaagagcctgagtgtgcttgtcgtgggcgtggatggcgtcgacgcgctgcgcaaggtggtgcgctccgatttgtccggtgtgaccattgatggcgattccgtactgatgcccaagtattccgccgctacaggcaaggatattccgctggacaagagcgttacgttcacggctggagcggccgaagcacaagccgatgccgccaatggtccgtccggtaatgatgcgaacggcagcgccgaaaacggcaatggacaatccggcggcacacagacgctgacgctcaaaccgcggaaggtggactatcgccgcattgcctccaactacgccgcggtcgccttcgtggacgccagccacttcaccaacggtggaatcaaggccgacgggcatatcatgcttatgcgtattgacgccgagggcgcgggtgttgcgctgaacgacgtattcaccaacgtgcagaatgtgttctccgccagtgctggcgttaccgtgaccggtccggtggccgaacgtacgcaatgggagaccatgatcaacggcatgatggcattgttggtcggtttgattgcggtggctgtgctcatcgccttggtcggcgtagcgaacacgctgagtctgtcggtgatcgaacgcacacgcgaatccgccaccttgcgtgccatcggcatgacgcgcggccaactgcggcgctcgctggcggtggaggcgttgctgctttcgctcgtctccggcgtggtgggagtggtattgggtaccctgttcggctggctcggatcctacatggtgtttagtttgtacggcgacaccgtgttcccgttcgaatgggccaccaacggtgtggtgctcggcgtcgccgcgctcgccgctctgctggccagcgtggcacccgcccgccgggccgtcaaaacgccaccagttgaagccttggccgaagcgtagagcaataagctccctcatcagagggagcttttttgttacaccagcccgttatcgtacgcgaagactacagcctgtacgcggtcacgggcgttgattttggcgaggatatgcgccacgtgggttttgacggtgggaagggagataaagagcttgtccgcgatctcctgattgctcagaccatgggcgatctccaccagcacctcgcgttcacggtcggtaagcagatccagttcgggatcggtgtatgctgggcgtgacgtattggaaccgtcggaagcggccccggcaggggaggggatgccggtcatcgagccggcaccgttgccggccgcaccgccagagacgccgacggcggaaccgtacacggcaccggagcgcgcgacatcgccggtcagcgaaccatgctgcgcgtaaccgtcctgcatcatcttttcgatgagtcgcttggtggcggaaggcgcgataatcgcattgccttggaatacagtacgaatcgaattgagcaacgtttccggttcggtgtccttgagcaggaagcccgaggcgccggcattgatggccgccatcacatactcgtccaaatcgaacgtcgtcagaatgattacgcgcgtcggccggtcgtcagccgattcggccgagacggtcgcgtcggcggccgggctggccgaatcggccgcgttgtccggcgcggcggagagcgaggtaatacggctcgtggcctcaatgccatccatgccgggcatgcgcacatccatcagcaccacgtcgggatgcagggattccgccaacgccacggcttgggcgccgtcggacgcctgcccgaccacctccatatccggttgcgaaccaatgaccatggcaaaaccggcacgtaccagctcctggtcgtccgcaataatcacgcgaatgcttctgctctcgttcatgctctccactgtatccgtttcctatcggagcgccgctccataaacaccctgattgttccctgagttcttattgggcaagtctctcaccggggtaacgttcccgcgtgttgcatctgactatccaacgaagccgccggtcgcaactgcatatccggctgcacaccctcatgggcctcgtcgctgaacccggtttcacgcaacactctcaacagctgacgcatatgagccaatgcggcgcgcccccgagcaccaatcgcggcaaaagccgcttcaatctgcatactatcaggcgcaggttcggcgttgagcatcaccagtccctcgtcagcctgcgcaatcaccgattccagcgtggtcagtacttcggtttgcatcgccgcactaatacggttgcgctctaagttggccgccagcaccttttgccgctcctgctcggctcgcagcgcctcctcgcgtcgcaacagcaccagagcgtttgcgccacgcgaacggctccatcgagccatcgcaatgcaggcaaaaccggccaacatgattcccgcgcccggcagcaagccggacaaaaccagcctccattttgagagcatggaactaccatcgggcaaaaacagatggaacagctgactgtatccattccacccagccatcaccttgatgcccgcaagccacgaatcggctgccagcgccacgctcacccagcgccaagcggactctcgtccatacaataccgccgaatacacggataccatcgcaaacatattgatggtcaaaatcgatggcaagaacaacagttgcacagcagacagcaccgccatcgccagcgcgctgccctctgggaagcggcgacggaacgccaaaggcgagagcataataatcgtcagcgttatagtcggcacgcggttcggcgaatacggggcattgccgatcatttgcaaatcgccatacgtggcggaatcaaatagcgcaatcagcacgatagtggcgataacgtccatcagaagatagtgccgctcggtccactgcgcaaatcgacccacccagttcgactcatgcgtatctccttggtcgagtactttggggcgcgcccgatccatcaatcctcgtatacgcgagataacggttagcaccggatcctccgtatcggtgccagactgtggggcggcaggggagagcggaatcgttgccgccacaataaagccaccattcggccctgggccggcctgcacgctgccacccaacgactcaatgcgttcatgcataccaaccaatccgtatccgggcttatgaccgtctgctgcagacgtcgcgccacggccgttatcggatacggtaatcgacagcacatcgtttgaccagatttcatcgatggtggctttagcaccctcgcccgcatgtttgcgcgtattggtcagcgcttcctgcacaagacggaacacggcggtttccgcgtcggcggacagccggtcaggttgcgctttgccggtcatatgccgggacaccaccagatgaccgtcaaacagcgaatcgatgtcggcatatccggtactgccactcgcaccgaacacattgaacaaacgctgcatatcatgctgcgcgcgttccgcttcatggcgaatcgtacccatcgtgtgcttggcgatggccagatcatgcgcacccgcataccggccgccatccgactgcacaataatcgtggagagcgtatgtgccaccacatcatgcatatcacgggcgatgcgtgcgcgttcggccagcgccgcgatgcgcgtctcctcggcctctttcgccacaatggaagcgttgcgctcgcgcatggccgccagcgtggcgttgcgcgctcgctgccacaaggccatgatgatgacgctcagcacgctcgattcgatgaacgccgcctccatgccgaagtcagcgagcatcttggccccgcagttgacggcgccgcttgcccccacgacgccggtgaccgccgggcatgtgggcatcgtgatggcatcggacagccagccgtcgcggatgacgcgcgaaccggaggaaggtccgtcgaacagcggacccacgttgaaagacaccgaccagaccatcgccgcgaccagtcccatgacgaacgccgtgacgatgaaccgccaggaatgtcggggattgccgtacagaatcaccgaatacaccatgatcagggcgtagaaatcgaaatacatgatcgccgggccgaacacaagatgcgtgatggtcagcgccacgaacagccaggccgccggctccgggcaatacctgcgcagcatcagcggcacgaagaccggcagcgaccacagcgtcatcgacgcctgagttgcgggaaacaatatgccgcccgtcgaatcagggctggtgacgccgatgaacggcacgcagccggcgatcagcgctgcggcgagcaacgtgtcccatagcagtgtgcgggtcgactcccgtgcgcaccatgccctcacgcgcgccataatctccataacgcgcaaggctagcgtgtccggcgacgaaccggtatcactcttcaggaggatttatggactagagtcttgaaccatgacaatgctgagcaaatactacgtgcccggactggccatagaggaccattccatcgatgttccgctcgactggaccggccatgagccaggccaagcgttcgacggcgaaaccatcaaactgttctatcgcgtggtcaccgcgcccgaacacgtgcatgacgacctgcccctgctgattttcctgcaaggcggtcccggcggtgccggcccgcgcctcaacagcccgacctccgacggatggatcgaggaggccatcaggcacttccgggtgatcctgcccgaccagcgcggcgccggccgctcctcgcgcgtggacacgcacgccatggcccgcatcgccgccgcgcacgacgatgatgccgcggccggcgcacgagcccaagccgactacctgaagaagttccttgccgattccatcgtgcgtgacttcgaacatctgcgcctgaccgaattcggtggccgcaagtgggtgacgatgggccaaagctacggcggcttcctgaccctgaccacactgtccctgttcccggccggcgtaatcgccagcttcaccaccggcggcatcccgcacgtgccggtcgacgccgctgaagtgtacgagcataccttcccgcgcatggtgcgcaagacgactcagttctacgagcgctacccacaggacaaggagcgcgtggccgccatcgccgacaagctgccgactactgcggaagtcgccgaattcgttggcaaactcaccgattccgtactgaatccgatggctggtaccgatgtggagcatcgacttggcgtgatcgccggcatggccgcccacggcttcccgctgatgccgaacggcgacccgctcaccgtcgaacgcttccagtgcttgggatccgactttggcatgaagccgagcttcgagcgtgtccattggattcttgacgacgccttccttgatggcgatggttccgcttctgccgactcgccgttgtctgacgaatttttgaccaaagtgatgaacgccacgtcgtcgcgcccactgtactggccgctgcaggaattcatctacgccaacggcgagcttgacgagcccattcgttgggccgcccagcgcgtgcgcgatggcaagcccgaattcggtgctgatgaacgcccgctcaacttcaccggcgaggccatgttcccgtggatgttcgaacaggagtctgcgttacgtccgttcaggccggccatggacctgctcatggaagacacgcacttcggcgtgatctatgacgaagaacagctggcccgcaatgaggtgccgttgcaggccgccgtctatttcgacgacatgtatgtcgattccggcctgcagctcgacaccttgagccgcgtgggtaacagccactactggaccaccaacgaattcgagcatgatggtctgcacggcccgctcgtcttcaagcatctctatgacgaagcccttaaccggggcgacctcgaagaactgttctgactcaaggaagcaagctccctctgatgagggagctctgtatacatgcacgaaaggaaaacgtatgactcagaacctcaccatcggttttatcggatatggcaacatggcccaggccatcgcccaaggcttcgttgacgcgggcgtggtcgccggcggccagatggtcgcctgcgccgcccactacgacaagcttgagaagaccaccgccgaacttggcgtgcgtccgttgcgcaatgcgctggaagtggtgacggccgccgacgtggtcatcatcgccatcaagccctaccagatcgccgccgtcgtcaagccgctggccgacgaacttgccaggccgggcaagatcgtcgtctccatcgccgccggctggaatctcaagaagtaccaggacctgttcgccaccgaagacggcgaatccgtcgactccccggacatccatatccagtgcaccattccgaacactccgatggccgtgggcaagggcgtgctcgtcaccgaatccgtcaacacactgacctacgacgaaaccgaaaccttcgagcagctattcggccccatcagcctcatcgagcgcgtggacaccccgcatatgaacatcgccatggtggtggccggctgcgcgcccgccttcactgacatgtacatcgaggccttgggcgacgccggcgtgcagtacggtctgcagcgagccaccgcctaccggctcgccgccaagatggtcgaaggtgtcggcgcgctctacatggccaccgaaacccatcccggtgccatgaaggacgccgtgtgctcgcccggcggcaccaccatcaagggcgtcgcccagctcgaaaaggacggtttccgcggctcggtcatcgacgccgtagacgccatcgtcggctgactgccaatcagagttcgcgtatattcgcatatcacagtcaaggccttcgagccgtatgctcggaggcctttgcatatggccggttcaccacatgcacgttcaatgtgtccagcttctccctagactggaatcatgtctcttactatcggaatcgtcggactgcccaacgtcggcaagtccaccatgttcaacgcactgacccgcaacaacgtgctggccgaaaactacccgttcgccaccatcgagccgaacaccggcatcgtaccattgccggacaagcgtttgcccgtgctggccaagctggtccacaccgaaaaggtcgtgcccgccacggtgaccttcgtggacatcgccggcatcgtcaagggcgcctccgaaggcgaaggcctgggcaacaagttcctggccaacatccgcgaggcggacgcgatctgcgaggtcgtgcgcgccttcgaggacgacgacatcgtccacgtcaacggcaaggtggatccggccgacgacatcgacaccatcaacaccgagctgatcctcgccgacctgcagaccatcgaaaacgcgctgcccaagctggagaaggatctgaggggcaagaagatcgagccggcctacatggacgcagtcaagcaggcaaagaccatccttgaagccggcgagacgctcgacaaggccgcacgcgaaggccgcttcgacaaggattccgtctacgacctgcatctgatgaccgccaagccgttcatctacgtgttcaacgtggacgacaacgagctggccaacaaggacctgcaggctaagctcgccgcatccgtggccccggctccggccgtgttcctcaacgctcagttcgaggcagacctgaccgagctcgacgaggcggacgcccgcgaaatgctggccgacgctggtttgagcgagtccggtctcgaccaactggcccgcgtgggcttcgacatcctcggactgcagaccttcctgaccgcaggcgtcaaggaagtgcgcgcttggcagatccacaagggctggaccgccccgcaggccgccggcgtgattcacaccgacttcgaaaagggcttcatcaaggctgacatcgtctcctacgacgatttcgtggccgccgacggctccatggccaagatcaaggaggaaggcaagctccgtcaggagggccgcgactacgtcatggccgacggagatattgtggagttcaaatttaacgtcagcaagtagttttcctcggctccccttcctgaggggagccgtcgcggaaagcgactgacgggagtgttgcggaaaggtccgagcagtgttggttgcccagacctttcttcatgttacgaacctttatgaacctcgttgagatgagatgtttgcgtctacttttcttaggcttccgcgttctcgtcggctcctgtggcgagaacattcctcaatgatttcgccacctgtattttcagcggacgttttccggtctgtacgaccagccccgcggccaagagctcttccacgtatttccttgcgctctgtttggatagtccgatgtgatgggccacttcgtccaacgacatggatttggacgagtcgaacagttcttcctgaatcacgccatagagcaccgagacggcattgcgcgataggccatgcctcttttcaagctgtgtacagagtatccgacctttgtcgagctgatcgaccttgatactgagttcgtcaatcagctcatcctgggcttgttggatgaatccgaggatggtgttcacgaagagcgtgagttcgccgcagttcagcttgtcctccgcctccatgaatgctttgtagtaggcgttcttgttctccgcgatggtgcgggacagggatagcacggtgggcatagtcaggtcatggttcaggtacagggccaggagataccggccggtcctgccgttgccgtcgtagaacgggtgaacatactcgaacaggaagtgcgacatgatggccgactgcagccggggaatctcgtcggaggtcgcgagatggatcatatcggtgaggagtgcgccgatgttgccttcgcctttgactccgttatggatcgcgaggccgtgcggcccctgtatttccacatcgcctttccggaacaggtcgccgtccggctgatcgctctcatcgatttcgtcgagcacgaccttgtcgtagatgtcgcggatggcggcgatgcctgccggcaacgcggagtccttgtccgtgaggttcaggtacagcttggcaaattcgctgaaccgcgccttggagtcgtcgccgtccctctttgccttgtcggccgcgtccacggcgtcctgggtttccttgcgggtgctgcgcacgccttccatctcgttggtggcgaacagttcctcactgatggaatgccgtatgtagtcccagcgcatgacgccgggaatctggttccagagccgtgatacgcgcctttcggcgagaagtatattttccatgagcagggtcgtctcgcgtggcgtggcggagaacagctcgcccaatggcgtgatgaccccggtcctgaatgtggaatctgcctcaagccgctgccgtgcgagtgccgcatggttattgaaggaatcgactgacctgtcggcatggaacagccttgccaaacttctatacttcatatccatgagagagactcacttcccaaagagcatccttgattatagaaagtataagacagagaaggaaatgagtcaataaacaactataaaatcatggataatacaaaaatatagttgtgcgcatgactgcatgtgagtgacatatggtagtgcccgaaatgcgtgtcagtagtgaaatacttcatgatctgttgttctttctgaatatgtgatggtatgcaatgggttttgccgcggtgcattgcgttgcgacgatgccaagaacacatgctcgtacaggtgcgtttatgaggcatggtgcgaacgagtcggctcgatatcaccggcaatgattcagctatgcgccaatgagaggtgtactgatcagatggcgtgttcgttcacgccgttgctgctgaatgcgatgtgttgatcatggttcgcgcaccataaggtctttcgtccgaatccgtcaaatcacgcggtgtgtgaaatgcccgttgtatataaaaagtccggtgcaacgcacgatgataatgcgttgcaccggacctactgcagaaacaattgttacagactgtagatctgtgcgccgaacggccagagcgcgagcttggccattttgaacgactggatgccgaacgggatgccgatgatggtgatgcagttgagcacgcctgcacccagatagccgagtgccatccaccagccgaccagcaccacccagaggatattggccagcgtggagccaacgccgccaccgtattgcacggttttgccgaacggcgtcaaggtaaggcccgccattttgaacgcctgaactcctagtggaataccgataatggtgatgcatagaaacagtccgatcagtgtccagctgatggcgattgccagtccgcccagaatgatccacagaatattgccgatgaccctcatcgtaagttcctcacgtttgtcggcattgcgccggataccgaatcgaatgctggattccattctattaggcgaacgcgggcgatatgtggggaatcggtgacgggacccctgagcattccctgaatcgtccctgagccgcatgctcaggcgcctactcgggtgagcattctcacattcggctgatttctagcgaaaaacccttgtgcgggcgggctgtggactatagcatcacgacacatgaccactacaccgcagccttctcaggcatttcagtccactgccaccaaacccgccgccaaccgcgagctgcccctgccgcagtccgaccgagaccccaagagctaccgtggcgtggaccgcgatccgcaggtcgtggacatcatctccaaactcaccagtgagaaggccacgattccggcaagctgcgtgcagcgcgacgccgccgacaccggtctggaatccaacagcgccgacgtggtgatcggcgaagccatgcttaccatgcagaccgagcgtggcaagcaggcgattatcggcgaggccttccgactactgcgcgccggcggcacctactcgattcacgaactcggcctgcagccggacaacctggacgaatccgtcaaggatgaggtgcgcaagcccgaagcgtaacagcggtgtgccggcccaacgatggccggataatgggaaacaagtaaaagcgatgacgcgtatgtgaggtacgcgcgacgaataggagaacatcatggccgatgagaacgagcagcagaccgcatgcaaggcaggacgcgacgagcggcattgcaagtgcaagcagcgtagggaagccgccgcggcagccgaggcggctgccgccaacggcgaacaccactgcgcctgcaagcacgagcacgccgagggcgcggccgcggagccgggcgcgaagaaggagtgccactgcaagcatggcgaagtcgcggccgctgaagcgggtgaggccaagcactgcgcctgcaagcacgacgcccacgacgccgaaggccacgccatttcgaccgagccgcatcttggattcatcgaagacttggcctcgttgatcgatattcaggaggaggccactgtctcccgtacggtgctgcgcgaggacggcctgcgcgccgtgctgttcggcttcgacaaggaccaggcactgagcgagcacaccgcggccatgcccgtgaccatccaggtgctggaaggcaagctgcgcgtcggcggcgaaggccgtgaagtcgagcttacggccggcggcatcgtctacctgagcgcccgtctgccgcacaccgtctatgccgtcgaacccagcaagatgctgctgcagatgttcgacaaccgcggctgattcggtgaatgactggcaatcacgtatgagaagctgattgccgttagaccattcataatggcttccttcatatggtgttggtcgtatgaccgtaatatgaaggaagccatttcttagacgttggggagagcttgaattcgacgccatcatcatacggcctcaagggtgcataaacgatgtcacaagtagacgcacgcccgccagccatcccaaacgtcacagcaaacctagaacccgcatgagctgacggccgatattcgccatggctgcatcatcaaccacgccgacttggtatcccagcagtttgcggtcgacggtgacgatcttgtccgtcatcacgtaactcactttgttcaggccgttctccggacttggttccaatcggacccgcgtgtcgatgtcggaggaatcgtatgaggtcagcagacaagtgatgacggaatcgaaccgatcgacggcatcgctctgcacgatgacaaccggccgtggcttgctggcgtagccatcggcctgcaacgtccaaatctcacctcgtttcatcggacatcctcaaggcgagacgactggcatactcagtagcgtcccgctcggacgcaaacggctccacgtcatttcgtggcaaacgcacctcataggggaacccacggtaatcattgaacgcgctgatgaacatacgcagggcatcggccggggtggtacccagctgtcgggtcgtctccttaaacaacgcagcctgctcgtcatcaactcgcgtggcaatctgcatgctcatagccactccttattgctatttactatctttttgcaccaaattgtatcaaatacttgacttcagagtgaagcccccgcgttccaaggcccttgtctatactgtagacagttgttcttcatatgtgaatcgcccgatatgactttggagcgggcttgtgattggaggggccggatatgacgagttacgtgctgcggctctatgatgatccgctgctccggttcgatgcgtcgtatggcgagggcctgctggcgggcaagatcgaggcgcatgtccgctggttcgatgagtcgaagcgc

SEQ ID NO: 672 - DNA, 5656 bp, Unknown
  R14_15m  MAG No. k141_19460
cagacgggagaacagcaggtcgaccggcttgccgccgccggtttcgttggtgttgcccgggatcagcgggttctgcggttcggagttgtacgcagtgatgatgttggagccagcggtgttaccggaggcagcgttgctgttagagccgccgcaggcgctcagcagcatggccacggagcaggccatggcagcgaaagcaagagctttcttcttcatatgatttctcctattcattaggttgcggggcgttgcagccccgcctcatgcaaacggggctggattccccgtcaccgtgagacttgcatctcacgatgtctcgaacaatccaaccccgttgctgattacctgtcatttttgcgcacttgggagacaagcagtgtattttttgttacacccatgtaaaattcaggggttcttgccggctaggttcagtctttgctgagtttgttaaccaatgtccacatagtggtcatgcccgcggaaaggcctgtccgtaacggttcttgagctgctcgatggagacgtgcgtatagcgttgtgtagttttcaaggaggaatgcccgagcatctcctgcacctccctcaaatcggctcccccatccaacatgtgcgtggctgccgaatgacgcaacgcatgggggctgatgtccggcacgccggcctctcgggccgctctgtgcacgatgtcacgggctatgcgttggtcgatacggccgcctcgtgcgccgaggaacagggcgttggcagcacgggacttgactgcatccgttgccgtacgggccagtaccggccgcccctgttccagccaagtctccagcgcacgctgggcgggtagtccgaacggcaccacgcgttgcttgttgcctttgccggtgactttgatggtgcgattggagaagtcgatgtcggcgatatccatcgacaccagttcggcgacacggatgccggtggcatacagcagttcgagaatcgcggcgttgcgctgcgattcggcggtgactcgggcgttgtcgcgcttgtctgcacgggcgggtgcctcactgcggtttacggtatcggccgacttatcagctgtcttgccgctgccgctgccggacgcggctgccgctcccccatcgtccttgtactggtttgttgcaacggcatgttcagcgacatccaataattgctcggcctgggattcggtgagcaccgcgggcagcgtgctgggaatcgagggagtcatcagtgtggcggccgggtcggtggtggtcagcccatgctcataggcccacgcgaagaacccgcgcacggccacggttttgcgggccatgctgctgcgggcgtgatcgcgcgattccaccgccatccagctgcgcagatcatccagcgtgatctcgttcagatcggtcacgccgcgcagctcgaacagatgcaggcatgccgtgagatccgcgcgatacgctttgagcgtattcgctgacaggccgcggttggacttcagataggagacgaaggagtcgatatcgccgtcgaactgcgtagatgacactctcgttctcctccgaattctttatggccttgggttacggccggggtggcgtgttacgccgctccggcacgggtttcaatgtggcaatctgttcctgatggatggtcacgttctgggccgggcgcgaaccattggcggcggcgtcacgcaccatctccaacgtgtatccatcccaggaaaccacatgccccacatagtcgcggaacttcatacggtggtcgaccgggtcaatgccgtcggtgatgcgcaccaccacgcgggcaccggccggaatctgccttggtaacgtcatacgtcatcatccccttagccatccgccgcatcaacttctatgcgtttcctgaaaaacggtacagactaccttactcctttgggtctttcgaacagcggagccacacggtcttctcacgaaaacaagcgggaacttcatccccctcgcgcagccttcttcgtgacgggcggcgaggggaacctgcacacgggctgcatggcggggcgcagttacatggcggggcgcagttggacgatggcctgacgcggatggatgaaaccggtgatggcttctccccggcgtgcggagaacagcaaggtctgctgccagccggcttcggggacggcgagctcgcgttccgggaatccggcggcagttgtgccggcttgctgcgcggtggccgtaccagcttgtgcagcggtgatgccggctcgcgtcacggcggccttgtaccggcggaaggggtcgccttcggcgaagaatcccatcacatcctgctcgccgtcggcaccagcgtgcagttggtcggccatatcggtcagacgtgccgccatgcggcgcagcagcacttcgacgttcagcgagtcttcctcgaccatcgcgcgcgtgcggtccgggtcggtcagggacacgcgggtcatgtccctccagcagccggcagccagcgcggcggcgatgttgcggtccgggttggcgaccagttcgttgatcagcgcggtggacaccacatgcggcatgtgggagatcatcgccgcggccttgtcatgcgtttcgtcgtccacgacgatgacgcggttgccgacgtccttggtgatcatcgcggcgacgtcgaggaagcggcggtagtccgtggactcgtccacggtgatggcccatagggcaccgtcgtacagatgcgggtcggcggcctgccagccggacagttcgttgccggccatcggatgggcgccgacgtagcacttccccagcgcggcagccttgacctgatcgcggaccatgcccttgactgagcccacgtcggtgagcgtggtgttcggatggtcgcccataagcggggctagggcggcgaggattgagggcatcgccttgagcggattgcacagcacgaccacatccggctcggcatccatgagttcggagagcgtgctcttgcagaaaatgccatcggcttcggcctgggcgtaggggtgtgagcgatggttccacgcgatgacgcgtacgccgcgctcggtcaggcggcgtgcgagcgagccgccaatcaatccgagtccgacgattccgactgtgtctaccacagcagttccttccttgctccctcggcgtactgccagccttccgacgcgcgattggtgatgtggacgccgccctcgggcagcatccaggcgtcgaccggcgggttcgggcgttcgcggcgtgggtagacggccagggtttttgcccagtcgccgtgtccggcgatctcttccagtgcggtgcggaatcttggctcccagggggcggcgtcaagggtggcgatgaagctgtaggttccgtcgtggcctttgatcgggcgcgagatgaagctggtcatgttcagccccgcatcacgcaggacgtccagcaggtcggcgagcacgccagggccggtgaccagcgggatgaaggtgatgatggtttcgaagtcgccggcgtcattgcggtgggcgcgggcgttgaattcctggaccacatcacgcggggcgatgacaaggaattcggtgtgcgcgccatcgaaatcctgcacatgttcggcgagggtgtcgagatcgtagagttcgccgcagatgctggggccgagcgccacgcggccgggcttcaggtcgcggcaggcggcggcgttggaggatgcgggttcgggctgcaaatggtgttcggtgatgaaccgggtgcattgggccaggccgtgcgggtgggcgctgacggggttgccggtgcagtcgcagatgctgtggccgcgcacggtgaaggcgttgaaggccacgtccacactgatccgggcgaagccggccgcgtcgggggcgtcgatcagcgcatcgagattcgggaccacatagccttcgacgttgttttcccatgcgatgacgccccagccttggcgcgactgtacggcctgcatgatcgcgggcacgtcgggcagggcggtgaggtcgaagtcgccgagtgtggcgaactggtcggcggccgtcattgccgcctgatgggtgaaggtgccttccgggcccaagtaaaacagtttcatgcgtgccataaggttctatggtagcggccgtaatcccctacgcccgccgatacgcgacgcattcgcggaaatgtgccgccatatatagttacgcgcgcgattcagaatgagtgggaataacgaaccagcgggcgggaagaatgagcaggacgacttggaccagtatcaggccgtacagccagatgtagccggcatgctgggagaagaacggcatgtcgccttggaatccggcgacgatgaccgccttgccggatgtggtggtcagtgccatgccccatgcggtcagcgaggaggcgatgaggtgcagggccagtccgaccgcgcccatgcgcgaacgggcgcaccatgtcgataggccgatcagcagaaatgccagcaccagaccatacggaatactcagttctgcacccatacggtgggcgaacgtgcccacaaaggcggaagccacgcccgccgcaatcgtgatcaacgatttgaccagcgcgttctggcgatacgaccacggacgcagttcagtagtgctcttcacagtcatgcgtttcagtataggtggggatatgacttggcgaggaataaacttggctcccctcagagaggggagccagagagaatggtcggctacagtcgcaccagatcacttaccctgctgggcggcgttctggcggcgctgcttggcgcgccacttgtaccagtcctcacggccgaggatgatcttgcgcacgcggatggactccggggtgacttccacgcactcgtcctcgttggcgaagtccagggactcctcaaggctcatcttgatcggcggggtcagggtttcgagcacgtcagcggtggaggaacgcatgttggtcatgtgcttggccagcgtgatgttcacatccagctcgtcgggcttgttgttcacgcccacgacctgaccctcgtacaccggggactgcggttcgacgaagaagttgccacgggcctgcagacgctgcatggcatacggagtggccacaccctgacgatcggaaaccatggaaccgttctgacgaatggtgatggcaccagcccacggagcatagccagcggagatggaggaggaaatgccggtgccgcgagtggcggacagcagagccgtgcggaagccgatcagaccacgggacggcacggtgaactgcaggcggacccagccggagccgtggttggtcatgccgtccatacggcccttacggtcggccatgagctgggtgacggtacccatggactcttccggcgcgtcgctggtggtattgtccatcggctcgttgaccacaccgtcgatcttcttggtgaccacctgcgggcggccgacggtcagctcgtagccttcgcgacgcatctgctcggcgagcacggccagcgccagctcgccacggccctggacctcccaggcgtcggggcggtcggtgggcaacaccttgatggagacgttgccgatgagctcgcgatccagacggtccttgatcatgcgggcggtgagcttgtggtccttgccctcggtgccggccagcggggagtcgttggtgccgaaggtcatggagatggccggatcgtccacgtggatgagcggcagcgg

SEQ ID NO: 673 - DNA, 11230 bp, Unknown
  R14_15m  MAG No. k141_19491
cgaatccgtgtgcccgcacggcggctacttctccgcttgtcaggccgaatacctgcgtgtgcccgaggcggacggcaccgtggtcaaggtgcccggttcaccggaagactacgatgacgcgacgctcgcttcgttgctgaccgtttccgatgtgatgtccaccggttatcacgcggcggtttctgccgaggtcaagcccggtgacaccgccgtggtcatgggcgatggcgcagttggcctgtgcggtgtgattgccgccaaaatgcgcggtgccacgcgcattattgccatgagccgtcacgaggatcgcgcggcgctcgcccgcgaattcggtgcgactgatatcgtgcccgagcgtggccaagaggctattgacaaggtgctggagatgaccggtggctatggtgcggacgcagttctcgaatgcgtgggctccaaacagtccttcgacacggcgattggcctgattcgccgcggtggcgtgattggtcgtgtgggcctgccgcacgacgtggagatcagcgccgaaggcacgttctacggcaacatcggcatcaagggcggcccggctcccgtgcgccactatgacctcgatgacggtctgctggatgcggtgctcaagggcgaaatcaaccccggtcgcgtgttcaccgccgagtacgacctcgaccatatccaggacgcctacgaggcgatggaccagcgcaaggtcatcaaggcgctgatccggttctagggtcaggtgcgcagagaacggttctcactaagaaccgtgtgagccattcgcacaaaaccgcacaatcgaacaggccgccggtgtgatgggggagagattggggggggggtgagccggttcggcttgcgtccttataccgttgttttcgtgtagaatcggctacctctatacctctgttttcgtgtagaataacatatgcccatactgttgttttcgtgtaatgaggtgattgctcatgttgaagcgcaagatgctggataagctgatcgcatggaaacaaaaagcgggtgggcgtgaggctcttctcatcgaaggcgctcgccgtgtgggcaaaagcaccattgtcgaggaattcggccgcattcagtacaagtcatatattctcatcgatttcgcgcgtttgccgcgcgacgttcgcgacatcttcgaaaaccagcgtgatgactttgacacatttttcatgctgttgtctgcgtattaccgcaagcgactgtacgagcgtgaatcgttgattattttcgacgaggtgcagcggtatccggcggcgagggagctcatcaaatatctggttgcggatggccggtatgactatgtggaaactggttcgctgatctccatcaagaggaatgtggcgaatatcgtcatcccctccgaggaacggaaaatggacatggggccactcgattttgaggagttctgctgggccatgggggaggagctgcttgctgaaacgattcgcaaatcgttcgagcgtctggtcccgttgcccgatgcgctgcacaagcgagcgatgaggctgtggcgcgaatatctgctggtgggcggtatgccgcaggcggttgccgattatgtcgagcagcgcgattttggcgaggtggattcgatcaagcgtggcatcctgcagctgtacagtgatgatatcggcaagttcgccaatggcgatgccggccgcgtgcggggcattttcgctcagattccagggcagctgtccaagcatgagaaacgattcactctggcatcggtcgataagggggctcgatctcgtgaatacgattcggcgttcttctggttggaagacgcccgcttggtgaacctgtgccgtaattcgactgaccctttggtggggctgggattgtacgaagataacgattcattcaaatgctatatggcggataccggtttgctggtgtcgcaggcgtttgccgatcgagagacaacgccggatgatgtgtaccgggatattctgttcgataaactctcgctcaacgaagggatgctggtggagaatgcggtggctcagcaattccgggcgaatgggcgcaaactgtatttcttctcgcgctcggatagggcggatgccacgaaaaccatggaaatagacttcctcatcgttcgggaatacgataatgccgcgatgaagcctcgcatcagcccgattgaagtgaaatccacgaaacgatacggcgtatcttcgctcgacaaattccgcaaaaggtatgcccaacgattgggcaaggaatacgttctgcatccccgccaactcgaagtggatggagaacgcatcaagctgccgttgtatatggcccactgtctgtgatttgtgctgattgatgcatgtttgggctgcaaggttcaggcagtcgaagagtgtccgttccgcataggacatccgtgaatatggctggactcacactggctcgactgcagggaaaggagttggcatgggatattccatcggtcaggtgtcgcgaaagactgggctgtccgaacatacattgcgctactatgacggccaaggtcttttgcccggtatcgcttgaactggtttcggacggagatgcttcgatgacggcgatcttgaattgcttgatctcattgaatgtctgaaatccacgggcatgagtctcgcagagatcaaggattttgttgatatgactaagcaaggtgatgccacgctcgaatcacgacttgctgtttttcgcaatcagcgacatgtggtgaaacgtcaaatcgtcgaattgcgacgccggtacatcaaacttgacgtggtcattacatccggtgcctcttgcacctcgtcgatgaaaatcaatgtaccgccgggagtgagcgttgaaggtgagaacaaggtaagtcggctgatgaactcctgcgcgtcattcgccgatgcgagcgcgcgggcctcctgcttgttctcgtacaggttgatttcaaggtaatgagcgtattcgtgtttggcgaactcgcgtaccgcgtagctcttgccgatttggcaggcaccggtcagcagcagtgctttgccggtgccgatcagcttccattccaacagatcgtccgagatcttgcgctcaagcatggcagttcctttccgaatcccttatgggagtagcattttctgccttgtatgtgcagaatgccgcatttcaaaatggggttttggcgcaaaataccgcatttcaaagtagggtttggtgcaagatgtcgtgcaaatggtgaatcgggcgtgtttgtaggggcggctggatgactgtgcggctggactgttgtgcggccgcatgcttatgcggccacaagtcgtgcgggctgttcgcaaactatgcgcggtcggccggcattcgcctgcgcttgaggtgttcgataagcagctcacactttttgacatcctcggcggtcgaggccggtaggtcgtcggaggaggtgtcgatgatgcgctgcaggtagccgtgtagggtttgtagctcggtttcattgagacagtccagcatggaggaggtctggtcgggcgctttgcccagcagatcggcggccttgcggccctggttggtgaggctgaccatcatgacgcggctgtcccgcctggatggacggcggctgatgtgaccgctggcctccagtttcttcaacagttcggccatggcctggcggctcatgccgaacatcgcggccaagtccttctggctggtctggtcggattccctgagcgtggccaagacgcggccttggccgcggcgcgggtcgaaagcatgttcgccgcgcggcgatttggcgccgggggagacgagccgtctgtgtatcgcgcgatacgccatgatgcggccaatgctgatgaaactgctgagaacatcgttcttgatatcgccgtcggcggtgttgtggcttgtgccgttctccgccgattgactcgtggccattacgttgtcgaccgcgtcgtttccggttacggcggcgttgttgctggtactgctcatgttcggaatccttacgtcagtgctgcatgttgtcgtcggtggattcgccgcgatagcgcatcatcatcgagcgctgcatctcctgcgcgttcggcggggtccaggtcagcgcgttcgcgccggccacgatggtttcggccatggactcgtcggtcgaaccgccgctggcgagcagcgggatggaggggtgacgctgcctgatctgctggaccacgtcaggcgtcctgcggccggccgccacgttgatgatggaggcgccggcctcgattttctcgtccaattcgtcatcgcaggtcaggaccgtggcgatgaccggggtgttcgtgatgcgcgccacgtcgtacaccgtggagggcggcgccggcgcgttgagcaccacgcccgccgcaccctgcatctcggccatcatggcgagttggatgacgcgcgggccggtggtggtgccaccgcccacgccgacgaacagcggggcctgggccacggtgagtagggcctgggtgatgactggttcgccggtgaacggatatacggcgagaatggcgtcggcattggtgttgcggatgatggccgcgtccgtggtgaacgcgaacgagtggagttggcggccctggacggtgatgccggaagtgcagctgatgatgtcgggaacacgggccgcggaggagctgatgcggttttcgatggggttcggtccgtctacttgacgggattccgggtcgtattcggtgaggtcgttgctcatgtcatgtgtgatgttcatgccagtctcctttaataaggaagcgagcgaagcgtcgctggtcgtgtgtctttttcatcctcttcagtaattatgtcaagtacctgacagatatgagtatacgactccatcaaagattgtcaagtaccttacgtattgctgctgtgtcacatttttcgacaatgccaacatgcgtatgttgtttgatgcggatctgaatgtggaacggctgattcccgcactgtcgatcgagtccggaactaggatcactcccgaggatacgctcgtcattttcgatgaggtacaggaggtgccgagggcgatgacttcgctgaagatgttcaatgaagtcgccccggagtatgacgtcttggccactggatcggcgctgggcatcgccatgcatcctgggttttcattcccggttggcaaggtcagtagactcaagctgtatcctatgtcttttgttgaattcctgtatgcgtgcaaacagtatgccttggccgaaatgcttgagcccaaggattttccgctaattaacgtaatgcatgacagggtcatgacttggctgcggtatttcatgtatacaggaggcatgccggagatcgttgaagcgttcgccagtactctgccgaatcctgacttcacggcggttcgtaaattgcagaatagtctggtctccgattatcgtgacgatttctccaaacatgttgatatgcgtgatagtcccgccgtcaccacgcttcgtctcaatcaggtatgggattcaattccttcccagttggcgaaagagaacaagaagttcgtatacggcgtggtgcgagctggtggacgtggcaaggattttgagagtgccatacagtggcttgtcgatgcgtcgttggcgttgcgcgtgaatcgggtgagtgcgcctcttgaaccattggcggcatatgcagacggctctgcgtttaaactgtacagcctcgatgtggggctgctaggagcgttgagcggtctgaatgttcgtgtgttgctggaaggtgacgcactgttttcgagagttcaaaggttcgatcgccgaacaatttgtatgccagcaattgaccatgatgaacggccattcaccctattgctggtcggccgagaactccagtggtgagttggattttctgttcgagaggaatggcaaagcggtgcccgtggaagtgaaggaggggactcatcgacaggccaaatcgcttgtaatcatgcagaagaggcacggttatccgcttgcttatcgtttctctgctgaccggtatcgggatgtggggccgatccgagatgtgccgttgtacatggctggcatcgtttagggcgttatggcccgttgcgctgaacgatggaatgcgaccacaacggatcctgtacggaagtagtcggtctcgtacctgtggctggcgttgcgcgcatccgccatcgcgcaagcgggaacgatcgcattcccggtcacgaggattccgctggttccgcctccggggatcggccggttggatgaggttacgccgtcttgcgagccgtcgaacgatcagggccaaaggtaaagaaattcggtattcttgcaaggctttttgggttatcccgcaggcatgggtagactggcatgcggtaggagagatactcgctgaaaggtgcatgccagctcatgggaacgggtgaccagccggaaaagaccaacaactaaaccagcgattgctgtcggctggccggtaatagccgtaactgcagcggacgttccccgctgcaggtgacacgcatcgccggagggcagctgcaagtccagataccggtccgcggccaccccagtcagccgcgctgacgacccccggcgtcatacgcgatgtgcacgtcgtgcactgctacgtgccgtccgccgggctacccgtccagcgaaagcgtaaccgggcagccagccagtatcgatacatgtcataacgtaaggaagtagcccatgccatcacacgcacgcacggtccccaggacaacccatcgcgttcgcaacgcgctgctcgtcgtgctgctgttgctggtcatgtgcgccgcggcggccggcttcagcggattcaaactgtacaagtcggcgatgagcgccaaagcgcacctcaacaatgtcgtcaacgcggccaaggtcatcaaggacggttccaccgacgacatggtcaaggcgctgtccgacgtgagctacatccagaaggaggcggccgccgccaagcaggatgtcagcggcggtctgtggacgctggcggagaagatgcccgtggtcggcggtgacgtgaagacggcgcgcaccgccatcggtaccatcgatgacttcgcgcagaccacgctgccccagctgggcaaggtcgtcaccacactgaccggtgccagcctctccagtggcgatgggcagctcaacatggagccgatcatcgccgcggcgcagcagcttgccacggtcgaccagtccgtgcaatcgcaggccaggacgatccaggatcttcccgacgccaaactcggcgtggtgaacaacgcgctgcagaacggcaagacgcagatggccgccctggcgcaggtgaccgaaaacctgagcggcatgctcaacatgctgccgaacttcctcggtgcgaacggcgcccgcaactacgtgctgctggcccagacgaattccgagatccgcggaaccggcggcctgatcggttcggccggttccttcagcgcggacaacggcaagatcgcggtgggggagttccacgcggatgccgagttcccctccaacgccgcgttggatgacgtcaaccaggacggtgacggcacgctgtacagcggactgtacttcggtcaagtcatccataatctttcgtccacgccggacttcccgcgcgtcgcgtccatggcccagaagttctggcaggcggctccgtttggcggatcgtccgacggcgtgatgtcgctcgaccccgtcgcgctgcaggcgatgatcggcgccaccggcgacgtgaccctgtctgacggacgcgtgctcaacgggtcgaacaccgccgaattcctgctcaacggcgcctacaaggaactgacgccctccgctcaggaccagtacttcagcgagaccgccacccaggcggtcgcccacctgttcagcgacatgaacacgcagaagctcatgaccgtcgccaagacgatgctccggatggccgagcagcggcacctgtacttctggtcgttccacgaggaggatcaggcggtgctgcgcagcgccggcgtcaccggcgagatcaccaacgacgcgaagaacccggtgaccggcgtctacttcaacgagatgcaggcctcgaagatggactggtacatccagcgcaagtcgacggtgaagaggaccggcgacaacacctaccacgttacgtattcgttcaccaacaccctgcagccgggcgaggccggatccctgccggaatacatcacggcgaacgccaagggaggcgtggcggtgaaccgcgtggtcatctacacgccggccggaggcgaggtcagcaacgtgtcggcgtcgaacggcagttccttcgcacaggtgcaggccaaggaccatatgacctacatggacgacatctccctggcgcctcaggacacggtgaccatcgaatacgacgtgaccaccgcggccggctcggccaacctcaaactggatcagacgccgaccatcggcgaccccgcgatcacgtacgagtattgatcggtattgatctgtgggtgtgatcttgggattgtgtgcccttatgaaagcgcgccgccgactcctctcggaaccggtgacgtgcttccggacgacgatgtccattacgatcacggcagatcgatagccgacaatatcgtcacgctggttcagctagttcgaattgcaggtggcggacggtgcccaagacgaaagattctcgtccggcgttcggccgccgtcgttggccgtgatgatactggagaccatgaagctcaggcggcggcagccaagggcgaagtcgagaaagaggtgacggcgtgacactcgaacagaggtcagatagcgcggcggcggagcagtgccgagcatgagcaacgatcagcggccgcagacgatcgaagtgcgcggggcgcgcgtgcataacctgaagaacattgacatcgacattccgctgggcgaactggtgggcgtggccggcgtctccggttcgggaaagagctcgctggcgcttggcgtgctgtatgcggaaggttcgcggcgttacctggaagcgctgtccacgtacacgcgccgtcgcctgacccaggccagccgcgcccaagtggacgaagtgctgcatgtgccggccgcgctggccctgcaccagcggcccaccgtgcctggcatccgctcgacgttcggcacgatgaccgaactgctcaacagtctgcggctcctgttctcccgcgtcgcctcgcacgtgtgcccgcattgcggggcgcgcaacgaaccgacgctgaacgtggcggccggactgcccattacttgcgtcagctgtggcaaggaattccacgcgcccggcgccgaatcgctcgccttcaactcggccggcgcctgcccgacctgctccggaaccggcattgtgcgcgaagtgaaccgtgcggccctggtgccggatgagtcgaaaagtatcgacgacggtgcggtgctgccatggggttcgctcatgtgggacctcatgaagcaggtgtgcggcgcgatgggcgtgcgcaccaatgtgccgttcagcgagctcacgcccgaagagcgtgacattgtattcaacgggccggccgtcaaaaagcatattctttacaagccgaagaaaggcgacgatttcgccgaactcgacttcacctacttcaacgccgtatacacggtggagaacgcgctcgccaaagccaaggacgagaaaggcctgaagcgcgtggctcgatttctcaaggagggaccatgcgccgactgcggaggtacccgactgagcgccgtcgcccgggctccgcacgtgcgcgggctgaaccttgccgaagccagcgcgatgaccttggatgcggcggtggattgggtgcgcggagtgccggaatccctgcctgccgacatgcggacgatggccaccaacatctgcgaatcattcctggacgtggcccgccgactgttggatctgggcctcggctatctggcgcttgaccgcgccggtgccacgctttcaaccggtgaacgccagcgtgtgcagctcgcccgtgccgtgcgcaaccgcaccaccggcgtgctgtatgtgctcgacgagccgtccattggcctgcatccctcgaacgtggatgggctgctcggcgtgatgcatgacttggtggcggacggcaattccgtggtggtcgtggaccatgacgtgcgcgtgctcaaggccgccgaccatcttattgaaatggggctggtcgccggtgccgaaggtgggcatgtgatcgcgcaaggcacggtcggcgaggtggcggcgaatcccagtagtcgcattgcgccgttcctatctgatcaggtgagcgcgcgtatacgtgagcgtgtggctgaatcacaggtgttcagccttggccacatccgcatgacaaccagccagctgcatacagtcaagccgctggacgttgatatcccgcgcggccggctcgtggcggtgaccggcgtctccggctcaggcaagaccacggtggtgcttgaatcgctgattcccgcgctcaaagcgcaggcagcgggggagcggttgccggaacacgtgcgtgaacttgaggccgagggcatccatcgtgcgaatctcatcgacgccacgccgattggcgcaaacgtgcgctccaccgtggccacctatgccgatattcacgacgaattgcgccgcgccttcgcccgcacggacggcgccaaggcgggcggctggaaggctggcgatttctcatacaacaccggccgactgcgttgccccacgtgcgacggcaccggttcgatctcactcgacgtgcagttcctgccggacgttaccatcgaatgcccggattgcggcggatcccggtatgcgcccgaagccggcgcgattcggcgtgccgttaagggagaatcgcacctttcgttgagtctgccgcagctgatggcgatgagcgtggaccagacgctgtccgtgaccggcgacctcaagaaggtccacgcgcgcctgaccaccttgcgtgatttgggcctcggctacttgacgcttggcgagccgacgccggcgctttcgggcggtgaagcccagcggctgaaactcgccagcgaaatgggcaaggcgcagtcggacgcggtattcgtgttcgatgagccgaccatcggtctccacccgctcgacgtgcgtgtgctgctgggcgtgttcgaccggcttgtggcgagcggcgcaacagtcgtggtcatcgaacatgaccttgacgtgatcgccaatgcggactggatcatcgacatgggtccgggcggcggcgaaagcggcg

SEQ ID NO: 674 - DNA, 2522 bp, Unknown
  R14_15m  MAG No. k141_20441
ccaacgacgccgcttccggtgccccgcagcgcgcggaaagcgcggaacgactcgcccgtccgctggtcaagctggccaaagcatgcgggctttccacctcgttcatcgaccagctcggcacctacaccgaaatcagcgacgaggccttggtcgccgtgctcaaggccctcgatgtggacgcatccagcgacgaggccataaaacgttccatgaccgaacttgaggccgaaaacagcaaacgtttgctaccacccaccatcgtggccaccaccggcaagccgacaagcctgaccctgaattgcccgtcggacgcggacatcaccgtctccatcgaactggaggacggcaccgcgtttggccactttgccctgctgccgcacctcaattccggcaagccggacttgaccatcgcccccgatttgccgatgggctaccacacactgaccgtcacggtggacgggcgcgagggcaaggcggccatcatcgccgcccccgcgcgcattcccgtgccggaggcggtcgccgagcaccagcggtggggctggatgacgcagatgtattccgtgcggtcccgcgaatcgtggggcatcggcgattacggcgatctgaagctgctgctggcggacgcggccgacaagtccaaggccgacttcatgctcatcaacccgattcacgccggcgcgccgattccgccgcttgagccatcgccgtatctaccggaatcgcgccgattcctcaacgtgacgtacatccgcccgcaggacatccccgaatacggcacgctgccggccgatatccgagcgcaggtggatgcgctgcatgattcagtggccgcacgcaacgacgaatcgaacccgatggacatcaacgcggcgtgggcggccaaacgcccggcgctgcgcctgatcttcgacgcgggccgcaacaacaagcgcgagctcgaattcgagcatttcaagaccaccgccggcccagacctcgattccttcgccacctggtgcctgtgcttcgaggtatggggcgcgccgtggggcgagaaccgttggttcttcgagaagaccttcgacgacccggccgtgcgccagctcgtcgaggagcaccacgacctgttcgagttcaaccgctggctgcagtggattgctgccgagcaggtgaacgccgcgcagcaggaggcgctggaccacggcatgacactgggtctgatgcaagacatggccgtgggcgtgcacgggctcggcgcggatgcttgggccaatccggaacgcttcgcctccggcggcgtcacggtcggctgcccgccggacttctataaccagcagggccaggattggggccagccgccgttcagcccacgctatctggaggccaccggctaccaggtgtaccgcgagatggtgcattcgatgtacgagcacgcgggcgcggtgcgcatcgaccatgtgctgggcctgttccgcctgtggtggattccgcaggggctcggcgccctcaacggcgcatacgtaacgtacaaccacgaagcgatgctgggagtactggccatcgaagccacgcgcgccggaggcatggtggttggcgaggatctgggaaccgtgccggattacgtgcgccgcattctggccgatcacggcgtactcggcactgacgtggaatggttcaaccgcgtggacgattcgccgaacgccggcgacccgtaccgcgcacccgaggactaccgcaagcaggcattggcctcggtgaccacgcacgatctgccacccaccgccggctacctgaacttcgaacacgtcaagctgcgcgaggagctgcatctcctgagcgagccggtggaggcgttcgccgcctcggcgatggccgaacgcacggccatgatgaaccgtctggtggagaacggctatatctcgcagaccgtggcggatgatgtggaaggccatgtgcaggagatcgtggaagcgatgcacgccatgctcaccgatacgccgtcgctgctgctgcaggcagcgctggtggacggcgtgggcgaatgccgttcccagaatcagccgggcacttccagcgagtattcgaactggcgcgtgccgctggcggacagctcaggccacgtggtgcataccgacgaggtcttcgacctgccacgcgtgcagtccctagccgccgtgatgcgccgagagaagcggtgatcgattccgcaatgggaaattggtctaaattggcttcgaggggctgatttggcctttcccggacatctacttccgtttcaaggggctggtgcccaagtagacccaacgcgagaacggcggaatgacgttggcacaaagtcgtttgcacttgtggtttcaccggcaaggagccccttgaaacggaagtagatgtccggaatgccctaaatcagcccctcgtaatcgagatagccgaagacgacgacttgttatgggcatgttatcgttgtcatgacaatgattgttcgcgacggcgaaggagcgacggcatatgaccaaggcaagcattcaggcagtggcccg

SEQ ID NO: 675 - DNA, 2748 bp, Unknown
  R14_15m  MAG No. k141_20814
caggttggccagcaggtcctcaggccaggtggccaagggcttgtgccagggcagcgtgaacatctttgggttcgagctggcggcggtgattttcagtgcttgcggttccgctgaatcggcgtgttcgtcttcggctttgacagacgtggccttcagcgcacgcggatccatctggggcaattcgttcaactccatgtgttcgattttacgtggtgcttgggaagtgcagcgagtagcggcgacttcggcgcattattctcgcatacgaatagatcatctgtatgggatttgccagccgaattgacgtcccgtatgcgacgcctcatgcgcaatctgaacaaaatgaacgcaacgagtagcatgagccccgctgccgcagcaatgcttcctacggcggcaccggtacggccgataacgccaggctttaccggctccttgtttggattattttcgggcggagtgacgagagttccgacgctaaatttcggctctaccgtgatgttgagatcggcggccgtgtctccgctgccgggaatcgagatgaggaacggatcacagtcgtatgctttgttggctttcgccgagttcgtgcgggagaccagatataggccgagcggcagattctggaaagtgagctgaccagctacgttagtggtgccggaatgctggtacagcttgtttttcgccgcgtgcgtagcgaacttcttggccgcatcgtgatattcacttgatgtcaggcgttcccaatcggcagtgaggccggaaaaatcgccgacggttttatatgaggagacgctaccatcattgttcgttgtgacggtggcgacgcgcacgatggaataggtatcgccggcaagcaatttgggcgaagccgtgtctcggccccatacggcattgatggtgagagtgccgaaggaatcagcttgcgcgtatggcaccatgaagccgaaagacacaagaccagtgaggatgatagtaatggtggcggcaatcatggcagcaacgcgcgccgcaccatactcgcttccgctatgcgggtctaacatgtctgcccggtcctttccgccgtgatgaatgtgattggttatttgtattggctggctgaggaggcaagtcaccgtccggctcgatggctgcggagctagaatcatcagacgcgaccttggcgctcccactctgccggcgtcgccgctcatgccgttgccacaaatgccatgcgatgagcaaggcaatcaatgcgagagacggcaacaagtactgcagcgggatgtccacgtggaacgtggatttggcgtcatcctgctgctgcggcgcgtatgggatgcgatggccacgcaccagcagccgatgcgtgttgaccgcatacggcgtacaagtgatgagcgtgaccaaatccttgccgggctcgattgccagttgtttggtattggtcggcagaacggtagtgatcttatcgacctgatacgcatatgtgtctttaagtattgtgatgtagaacttgtcgccttttttcataaggttcaagtccgtgaacagttttgccgtgggcaagccccggtggccagacagcgccgcatgagtggacgcgccaccaactggcagtgaggtctgttcgagatgtccgatgccggattgcaacactttctcggaagtgccgtgataaatcggcagggtctccttgagcttaggcacggtgatgtatcccatcatgccgtcaccgtcaatattgagcagactgttgtattcttcgtccgtggatgcggaattgacggcgccggttagggcgtcggtctctcctgcatcgttctgggcgagtttttcgttataggcgtgcgcagcatccagcaccttctggtactgttcctggctcaatgcttcaacgctggcgtcgtagttatttacggcgcggctggcgttgcgcataatgaggaagttgctgatcgtcggatagaacagaatgagcattccaccgagaatgaccagtaagggcaggatgttgcgcagtcgtttcatcgagtgttcttttcgcgaggaaaccgtgttgtgggcgtagcgggtgtatgcccttcacgcccaaaacacggccatgctcgtcaggcgttcttgcgcttgagagtccaggcaacgccgagcgcgatgaccagcacaccaatcaccgtgaaggcgatggtacccatgccaccagtgctaggcaggacaacaccggacttgttctggaccgggatgacaccgttcgatgcggtctggtcgtagttgctgctattggcgttgttgtatttgatgctgacgttggcattcgtggtgtcagtgccgtcgttctggccatcaaccttcacgctgatggcgctggcgagcttgttgtagccggccggcgctttggtctcggtgagcgtgtactcgccgttcttcagtccctggaagtcaaccttaccgttttcaggagtgatgatagtcgtagtacctgtctcatcagccttagctacacggtatacagcgttctcggtcgcactaccggcattgactcgcacgaagctaataggcgtgctgtcgttcttaggtgtgagtgtgaactcagcaccagcaagtcgagtagcggcatcattgtacttgtcaccagtgtacttatcgacggtgaagccataagtgaagacgcgaaccttgctgggttcggactcaccggtgccaccggtgctcgggttgttggagtactgaatcgttgcggagttggtgttaccatgaccgcccaca

SEQ ID NO: 676 - DNA, 7146 bp, Unknown
  R14_15m  MAG No. k141_20829
cttccacgattcgtctcatactgttcgtacccatctcttgtattgtaggtcacgttggaccgctgctacgtagtttttgcgcgctgaacaacgatgcccggcatcctctcgaaagaggagccgggcatcgtaaccaccctcagtcagctcgtgctgacagggagcatcgagtgaaatcagttgtgcgaattggggcggcgctggtgcttgcgaatcaggtattcctgactgtcgaccagcgggcggccctcgtcgtccttggtgtgcagcacatatgtgccgtcgggctgcatgtgccagctcatggtggagtcggccatctgcaggtccacgtacttgatgagcccgtcaatctgctccggggcggtgacacgcaccagagcctccacgcggcggtcaaggttacggtgcatgaggtcagccgaaccgatgtagacctccgggccggaagccggaccctcgccgatctgcgggccgtccgcgttgcagaaggcgtagatgcgggagtgctccaggaagcggccgagaatcgaacgcacgcggatgttctcggacaggccgggaacgccgggcttcagagcgcagatgccgcgttcgacgatgtcgatcttcacgccggcctgagaggcacggtacaaggcgtcgatggtcttctcgtccacgatggagttgaccttgatcttgatccaggcctccttgccggcgcgggcggcgtcctcctcgcggcggatgcgctggattagaccggtgcgcacggtgcgcggggccaccagcagacggtggaagctggactttggcgcgtaaccggagagctggttgaacagacgagtcagatcctggccgaccaccgggtcgcaggtcagcagacccagatcggtgtacagtcgcgcggtcttcgggttgtagttaccggtgcctacgtggcagtagcggcgtagaccgtccgcttcctgacgcacgacctcgatgagcttgcagtgggtcttcaagcccacgatgccgtacaccacgtgcacgccggcgcgttcgagcttgcgggcccacgcgatgttggcgtcctcgtcgaaacgagccttgatttccaccaaagccagcacctgcttgccggcatgagcggcgtcgatcagggcgtcgatgatcggcgagttggagctggtgcggtacagggtctgcttgatggccagcaccttcgggtccgcggcggcctgcgcaaggaaggcctgcacggaagtggagaaggagtcataggggtgatgcagcaggatgtcgcgctcgcggatggcggcgaaaatgtcctgcgcacgggaggactcgacctcggcgatctgacggttcgtggtcggcacgaacggacggttcttcaggtccgggcggtccacgctgccgagctcaaagagcacggtcaggtccagcgggctgggcagacggtatacctcgtcctggctcacgccgagctggtcggcgagcagctgggagaggaacgggctagtggtgtccgtgatctccagacggatcggcggtccgaagcggcggcgcagcagctccttctccatggcgttgagcaggttctcggcgtcatcctcttccacgtcgatgtcctcgttacgagtcacgcggaaggagcgggcttccttgatgatcatgcccgggaacagggattccagatgcgcggcgatgagcttttccatggcgatgaagccgtaacgctcgtccttggactcctcgtcggtcatgtcgtccaccggcaccaggcgcggcaggttgcccgggatcttgacacgggcgaagtgcgacttgccggaggccgggttctccacaatcacggccaggttgatggaaccgccggaaatgtaggggaacgggtgggccggatccacggcgagcggcgtcaggaccgggaacacctgctggcggtagtagcgcgagagacgctcctgctcggaggaggtgagcttgtcccacgtcagcaggacgatgcgctccttctccaattccggcagaatggtgtcgatcgcgtaatgtgcgtgctcgtcttgcagacggtgtgcggtctcgctgatcgcgcgcagctgctgacgcgggctcaggccggcggcagacggcacggcgatgcccgagtcgatacggcgcttcaggccggcgacgcggaccatgaagaactcgtcaaggttcgaggcgaagatcgcggcgaagttggcgcgctcgagcaggggcatgtcttcgttctccgcgcattcgagcacgcgctggttgaacttgagccagctgagctcgcggtcgaagaaacggtccttgggcagcggtgcctcgccttcctgatcgacgcggcggtcgttgttgtcgttttcggcaatatgctctgcgatttggctgcgcagaattgccttcgagggtgcgtcaaatatctgtgccatagcttatatcgtaagctctggcgtggccggaaaacggctgaacgcgccagaattcaacgggtgttcatgttagttcggtgttggttggttctgagtgtgctagcgtgctcgcgacacgccgtgagcggcggtgaaacgaacgaaaccgaacatcagacgggttcgatgtgaacggttcagctcgttttccgatagccagaaagtgcgattgaacagttgtgataaaaaacgcacaacgactctctgcaggttgcgagaaacgggagtgatgaatagattatgaggtacaagaacaactgaacagagcagagcccacaaatagtgtatggtcacgaggactgttacgttggacgggcattggaaagacttaccgttacgacgatgatgttgtgcagagattctgctccagtagttgaacttgtagaaaaggcccgctccggcgggccttttcgtttgtgtgtacagtggagggcatgacggaaacacagcgtacgccagaggggatgtcgtcgaaaccccgtatcaagccggccgatgccgaagacggccgcccggtctctatctctgcgcgtctcggacgactgcaattccactattccggcaagttccgcgtgctgcagattgccgacattcaggatgggccgaaagtctccaaagacaccatcgccctgattgaggccagccttgatgccacacggcctgatctggtgattttctccggcaaccagatcgccggctacgatccggcctttgccaagagcttccgcaaacgccgttggtgcgaagaggcgattcctgaatctgcgttgaaccatacgcgtgaattggtgcgcaaggccatcggtcaatttacctctcctttggcgtcacggggcataccgtgggcggtgacctacggcaaccacgatttccagtgcggtttgagcaatgccgaactcgacggaatctaccgcgagtttcccggttgcatcaatccgccgagcgatgcgctggccaagcagaccgtatatatgtgtcataaggacggctcgcctgcggcaaccaatggtgaagaaaccgatgcgccgatttccgcgtccaccattcccggcacttttgcattgccggtgatggatgtggattgcacgcgcaacgtactgggactggtactggtgaattccggtgactatgcgcatggaggcggtttcggcacgccttcgcccgagacattggccttcctcaaggctttgcccgaacatatcggagccaaatcaatggtgttccagcacatgccgctgccggagtattaccaggtactcaaaccggtggccgccaatgcggctttcgccatgcagggctaccgcaagcatgcggatacctattatgtgctggacgaggatcgcactcaagccggcgggtatctgggggaaggcatttcctgcccggatgagtcggacgagtttgaggcgctgcgcgaggggtatttcggcgtcgtagctggtcatgatcatcgcaacggtttcgtcggcgaacatgagggtctgttgcttatcgctacgccaacctgcggattcaatacgtacggaccggctccggccaaacgtgccacgcgattgatcgaatttgatatccgtcacccttacgagccgcgtacgcaattgctggagtttggcgaactggtgggcaagcccagttccaaacgcgcctacacctatgcggtgaaccaaaccgcgcctggcgagggcgagggtgatgatttgctgcgcaagccgtcgctatggagccaactgtccggtttattcaggtaactgttcctgatagaggcggaaagcggcgcgaagtattcgtatacgcgcgcggccggaggcgcggccgtataccggttccatatcccggcacaaagatatgccgacatatgatacaaatgataacatttgttgaataaagggttacgttttcacgtttagggacgtgtgcttcggcacgcattcaaacaagcgcatcccttgcggtcactatctcacgatggttcgcgcgaagcgatgaaccgtcagtatgtgcggagttctggtatggtcacacgtttaacgcggttggcgacggcggtcgcgctggtcgtcggcatgatcgtaccggtcgccacggccgccgccgtcgacgggggggggtgtcgatgccgcgcaacagacgccggcgtgcggacgtccttggaatcaggacgaacagggcgccatcgttgattccagcaagccttccggccgattggtcggctgcatcagcaatgccgcggtgcagtatcgattgcagaattcgacgcaatggcagaacgttcccgtggatgaacacggcaatgtctcgttcgattacagcacgaagatagcgcaattccgttttgacgcgcaattcgtcatacccaaaggaagcatcaccgaagacaaccacgtgttccgataccacatcgcgggattcaacggcaccggtaccgccatgtcgggcacgctcaacgacgatctcggcacgtacacgatcgctcccgacggattggtgaccatcgtcttcagcgagcacgccatcggcaagaacgccgtcgccccgctagacaacggacgattgtacatcgaagccgatcgcaacaaggtgaccggcaataatcctggtcagaccgtattggatttcggcaacggccataccaccaccatcaccatgtaccgcagaagcggcagcacctccaagcaggtcgtcggcacaccgacgctgcaaccggacggaacgctcagtaccagatggcaggcgcaatacgtcaacacaggaaccatcgaccagccaatcgtgaggatcgaggattggttggcctatgagaacgttgatcaaccgaacgccggttccatctcgttaagctgaggatggtacacggctgagaacatcaacgatctgtaccaaacgttgaccacaacgatggggcacggcacgttgacggtatataaggtcacgctgccgaactacaagggcggacccgccgtcacatggccggccggcggattggccacgggaacctattggaaatgggttttccagccggattcgtattcgattcccgcagggcagacgttgacgttgcaatacaattcgacgttcgccaatgatgtgctgtatcccgcttcgaaaaacatttcgcggttcgtccgttccaataacggaggcgactatttcaccaacaacgcagtcgcttggaatccgctgcggccaaggatctcactcaccaaaacggcgggcgggcagcagaccccctcggcggagcaatgccagaccatgggcgtgacggaaggtcactgcggccttgcgtcgtggagcgtctcggtgcgcaatgccggcgacggtcaattgccggcgggatgggtcatgcaggacaccggcagcggcgtctggtacacgaagcaactgctgcaggacagtctgcgcgtgaccgtcgacggtaagcagctgaccggagcgacgcaagtgtcctccgacaacggcaggacctggatagaccttaacaaagcgcaggaatcacagcgatacacgtccttccggttcgtggccgacaacgcgcttgcccccggcaaaaccgcggcgatcacttatcaaagtctgttcgattccagcgaaacgactgtgcgtaagaattcggccaccgcgggaaccggcgtcggcggagcgtttgtcaaacccgtcacctccagtgtgcaagtcgcctctttggtcaaagacggttgcggcgatccggtcgacggacagggaaatcccaaattcacctcctgctcggccaacggtgccgactacacacgtaccgccacccccgatccggtgtccgtgaggcaagtgggatggcgtatcagcgcgcacgtgaccgacaattggcgtcgcgcgccgctcgtcttcacggaaaccctgccggagggcctgcacgacgtgaagttcgcgttctccgatcatggcgaccgcaaacagtggcttaccgtgggggagacgcggttcaccaatacccagggtgtgcaatatgtcgttaccgtcaagcagaccggcgaccgcacgtaccagatcaccatcccccaacaggcgaccgatctcatgaacgacggcaacgtgtatctgtatgtggccgcacgcactcctgacatcaacgacggcaagtactgggcggaaggcaaatacgacggcaaacggggttgcgtcgccgatcccgcgctgaaaaacggtgccggcgattgcctgacggccaaataccgtaatacggtttccatgggctccggcagcataccttccgtgtccacgtcggaaaccttcatcgataatttccagaaaaccaataccggcgtcgaagacaagcagaacgtcgacggcggctggtcctccgacggcaaaagcttcacccgaacctattatgtgcgcgccaaccggtatggactgaacatcgatgccacgcatgcgaaacaggatgatgtccccgataccgacatgctgcccatcaaagacacgctgaccgtgcccgccataccggaaggcagcaatccgcaggtcacgttcctgggcaacgtgaccgtgtgcctcgcctggataggcaacggacagtcctgcccggccggcaaaacgtaccaaccatcctcggatgcgatcgtatatcaggaaaacgatgccaaactcggcggcgtattgacggtgtacgttcccgattccacgccggtgaccatcagctaccagtacgggttcaaag

SEQ ID NO: 677 - DNA, 35582 bp, Unknown
  R14_15m  MAG No. k141_21062
atgcaccgacaacacccccaatcgaccactatgacacatttccctccacaatcgaacactagtcattcacgaaatccatcactacgaggcatcgcaatcgaacggcatgcaatatcaagcacacaccacaacaacaggtcgcacaaatattgcctttacatcagtccgtttcggacatcatggtcacagcaggctctgcgccaactcttcaagagacatggctactacatgaaactcgaatacggcaccgcgcgaagcaagcgccctcgccacgttgaaagcgaattcagcacgagcatcctcgttagcgatacttgctgccgtggcgacgaagaccagccatctccgcccgaccagcacaccccttttctcttggtcacggcgccattgagtcttactcgtacgatgatgatcgccatcatattcaacagcgaccttgaactccggccacgctaagtccaacgttatgggagctccagatgcaaaagccgcgtccggcaccacatagttcgcaaccggccgtggaatcccatgcgctaccagagagagtcgttcttctgattctttgggcgaatcagcaccaggtgatatcagaggcaatgctcgaacgcaggacgggcgccctctgaatcgggtaaattgctccacgaacttcaccagatcctgatagattgcagcagcatcacgatccttggccaatactggctgtttgctcgtagcagcgatgacggcatccccgagcacaatcagggactcaaaagaaacatacggggcaagttgagcccatacgtgaaacaggtccagcgcaaacacgtgttggttcatttccacattgtcggctttagccgcatgtttccaaatatgcgtttgcagtggtgcatggcgtgtacgaaaccgcctgctcttaacgctggatacagtgtgcagcttggccgagtcgaggtcgcaatcggcgggaatcggtacggattgcagagcgagggaagtggtcatgccgaaaagcagcttcttgcccgcccgtttcgcttcctcagtgcagcgtgcgaccatgtcgcgtctgcgctgggcgaggctttcgctcatggtcggtgtcgctgcagaatcatgtgcaccactgttcggcgatgacgagtcgcgagaagtcgggtatttcgagtcagtagaaaatgatcccgcaaattcgggcggaacaaaaactgcctccgattcttccggaggctgatcgtatatagagcctggcagagctccatagttggtgatgccgtcggtcatcctgttcatgacaccaccatatgggtagtgggtgcggaaacggaagccgatccgaggtatgtggtcctagcttcacttacgcacattcattgtggataaccatgtggacacctcacttatacacatagtcatccacctcttcaaccccgatttgacacactaactgtatctgatatgattacagtatcataactgtacacatcatagttacagtatcgactcggtaaggaggtcgtttcatgaacggcgaccattcactggcagtgcacgcattggtctaccttgaccatcgcgccacacacctgcccagtcagatcctggccgagaacatatgcaccaatgcggcgcgcgtgcgcaaagtaatgcgaccgctcgcctcagccggactcatcgccactaaagagggtgctgaaggcgggtacgctctggcccggcccgccgccgaaatcactttgcgcgcggtagcggaagccaccggcaccacttttgtgaaagtgaactggacaccgggcgacgtacacgaggactgtctggtgtcatcttcaatgggcgcagtgatgaacgacatctatgccgggctcaaccgcacttgcctcgaacaactcgaacacaccaccatccacgacatcaccgaacagatattcagcgagcgcaaaggccaataatcccgcgcgtttcccctagccagcatcagtcgataacgcttcggcagtcaaagaagaaaacagacgccgcacggcacacaacacatcagcacaacgcactcttatcactcgaatacgtaaggaagtaaccatgtccatcagcacacccaatgccatcagcacacccagcacctcccccactatcaccaccgacgccctgatcattggattcggcaagggcggcaaaaccttggctgccaagctcagtgcagccggccgcaaggtcgtcgtcgccgaggcaagcgccgacatgtacggcggcacctgcatcaatatcggatgcttgccgtccaagtcactgattttgtccgccgaacaggcgcggcgggatggcgcgaacagtactcccgaaacccgcgaagcagcgttcgaggctgctatcaaggagaagcgccgcgtcacttcgatgctgcgcgacaagaactatcacaagctcgccgaccaagacaacatcaccgtaatcaccggccgcgctcacttcaccggccctcatagcgtggaaatcgccaccgctgagggcccggtcgccgtgaccgccagcaagatcttcatcaataccggtgccacgccgcgcattccggatattcccggtatccacactacgcccggcgtctacaccagcactggactgatggatctcgacgatatgccgcagcgactggtgattatcggttcaggattcattggacttgagtttgcctcgatgtttgccgatttcggcacggcggttaccgtgctgcagcacaatgccgagttcctgccgcgcgaggatgcggatgtggcggccgcgattcgcgcacagttggaagcgcagggcgtcaagttcctgttcaacgcggataccaaggccatcgcgcctgctgctgacggcggcgtcaggttgtccgttgcggtgaagggtatggctcgcggcgcatcgcaagcttgcgattccacccccgccggcaccgggaacgctcataccgatatcaccggtgccaccgacgccaccgacgccaccggcgccaccgacactacaacaaccaccagccccactagcaacccgaccgatcacgccacgatgtcacacgttcaaacgaaaccatcagacgatggcgagccgcggttcgccgagccggctgaagcccgattctgcctgaccaccgacgcggtactggtggccaccggacgtacgccgaacgtcgagggactgcatcttgaggcagctggcgtggagctcaccgaacgcggtgccgtgaaagtcgacgagcttctgcgcaccacagcagccgacatttgggctctgggcgatgtgaacggcggcccgcagcacacgtacatttcgctggatgactatcgcgtggtgtggtcgcagctcaatggttccgaccgtccgtacacggtgaaggaccgcaagcatgtgccgtcgagcacattcctcgccacgccttactcgcgcgtgggattgaatgagcgcgaggcgaaggcggctggattggattatgtggtcaagcgattgccggtggccgctgtgccgaaggcccaggtaatgcggcgaccggatggtctgatgaaggcgattgtggaacgcaatactggccgcattctgggtgcgatgctgctttccgtcgagtcgcacgaggtgatcaatatcgtcaagttggcgatggatcttgacgcgccggccagcacgttgcgcgatatggtgttcacgcatccgacgattgccgaggcactgaacgacttgttcgcgtagtttgtccgcatagcacgcccgcgcagcatgacccgcgtagcgcagcccgcaacagactcccctaatgcgcgcgaaggtcctcatcgacgtaaaccgatgaggaccttcgcgctgtcgtcatgatccgtacgtgacagcaatcacgtccgaaccagccgttacttcaagccgagcttacggtccagaatgtcggaggcatccaatcccaagcggcgtcggatgaaccagccaagaccgagcggcaggccgggagccaaggccatgccgcctggaccgagtgccacggttttggagttgcctgcgataagcatggtgcccttggatgcggccgtggaggtcgaaccatcgctgtccgcctctggtttgaggatttcgatgttgccgtcactggttttgtacagtcccttattctcattccagataccggatgcaccattgttgccggcctcacccgcagagaggaaatgtcttgtttttcttgtgagcgctcacctattcacgcgcgatggcatgtttttcaagcaaagtcaataggtgtgatgttattcacactcttcactacgttgttttgcctcgcactgggcaaccccacttcagcaagagattgcacaacttgcgttagggtggagaacatgactatcacagtatccacagatgggtccgcattagggaatccaaacgggccaatgggctgggcctgggccgatcatgagcagaacgccggcggcaagcccggccataagcacgacgaccatggttatgatgcgggcggcgcgaccaacggcaccaatcagattggtgagctgtgcgcagtgctggaagctttgcgagcgcacccgggccctgagccattgctcatcgaatcggattcgcagtacgccatcaattgctcgaccaagtgggtcaaaggctggaagaagaacggctggaaaaattcgcagaaaaagcctgtgaagaacaaagagcttattcaggcgatcgaccgtgagatctcacaacgccctggcccggtggatttccgatgggtcaaaggtcacgccggcaacgagggcaatgagttggtcgatgaactggcacgcacctatgcgggcgattgccgttcgggtgcgcgcgacggctatctgccgattgaaggctggcagtcgctactgggctccgaatacgcacatggcaccgatgtgcctccagacgtgcagttggtgctggatggcaaggcggatgcggcaagtttgcgcaagccggctgcggcgacggattcgacggatgccacaaggccagagaccaagtcttcgtcacccttagcgacacaatcagcgcaacctgtacaatcagcgcaccccgtacaccccgcaaagccaagcggactgacggtatccggtacgctgaccttctcccccgcgccgaaaacgagcccgtatttcaacgggcagccgatgccgatcaaaggcagcatcgaaatcgaaggctatgtggacggcgacggcaacctgaccatcaccaacgcaccattcgtacgacactaacacccaaacacacgaatatgtaccgcaatcggacacgatgacacaaaatcgctcattcgcgttaggataggagataaggcttcacgccgttgatccatgcggcggaggcaaggatggcaaaggagaaaccatggataaggcacagcaggatgcgctgaagaaggcggccggcatcgaagccgccaagctcgttgaaaacggcatgatcgcaggcctcggcactggttcgaccgtgaagttcctggtggacgagctcggccgccgtcatcaggaggaaggtcttgagttcactggcgtaaccacgtctcgccgcacgcaggtccaggctgaaagctacggcatcaagatcgtggacatcgacgacgtggaccacatcgacgtgaccattgacggcgccgacgaagtcgacaagaacttcaacggtatcaagggcggtggcgctgctctgctgtgggagaagatcgtggccaccaactccaaccagatcgtgtggattgtggacgagtccaaggttgtggacaccatcggcaagttcccgctgccggtcgaggtcattccgttcggcgctggccacgtcatcaagaagttcgaggaccgcggctacaagccggtgcttcgtcttgacgccgatggcaaggaagtgcgcaccgacgagaacaacttcgtggtggacctgcacctggagcgcatcgatcacccgcaggagctggccgaagacctcatcaacacggtcggcgtggtggagcacggcctgttcctcaacatggtcgacaaggtcatcgtcggcgacccgaacggcccgcgcgtgttgaccaacgccaacaagtgatcgtctcacatcactgaacttttccaagcccgcatctgtacatcgcaggtgcgggctttactgttgcccgaacaaggcaaaggagccaaaaagagaaaccccgcgaccataacgatcacggggtttctaatgccttgattgcaggtaagactacttacgctggtggcgggtcttacgcagcagtttgcggtgcttcttcttgctcatccgcttgcggcgcttcttgatgacagaacccatctgaagcctccatttcgattaatcgtaaaagttgcaacttgcaccataatacacgtgttgccagacagaggaaaccagtatgttgtcgatagtccgcatatgccctgaacgcagttgaggcatccacatcagcaatgtggatgccccaacgttcataagtttgtgcagcagctgacagccgatactagatactacatcgggaacttctggtagaagcgatcgaccgcttccttggtgccggtagcttggaagaccacggtatcgttctgccagatggcagcggcgttcttgctgttggaggcatcggccttcaccacgtacgcgcccgtgacgttgccggaaaccttgacgttgccggatgccgactcatcgccggtctgcgcagcgaccaacgcatcgtactgggtcttggcattgtccgccgacgaccactgcgcggcgaccagcgtgacatccttggcggcatcaccagtggagtaggtcagagtgtactcctcgagcggcgacgcggaattccacgtcgtggaggcatccgccttggtacgcgcgtaattcagcacgctgtccggcatggccttcaacagctcactggcatcatccggcaaagctgtggcgtcgatggtcggcttgatcggctcggatgattcggttttctgctggctgttttgggtggtagtggaggtgccatcattcttctggatggcccaacccggccacacaaaggccgaaagcaccgccaggataatcacaacagctgcggcaaccaccactgcaatcaacttgccatgggattgtgtggtcgaggagttctcactattagtcatgccccgattctctcacagccgcgtgacgctagacggccgtaatcttagtcgttgtgcgcaagccgcgtgaaactcttgtgaacggtaaaaatttaccgtccgctggtgtttgggttagggtgagaccatggcgaaatcaagtgtgcagtatgtatgttccgaatgcggttggaacgggccgaagtggtacggccgttgccccgagtgtggtcagtggggcacggtcgaggaatttcacgaggctcggccggcggcaagctctcgcacggccgctcccggccgaacatcacgcacgcagtcggttacggttgccgacaacgccagatctgcagcccgtccgattaccgaagtgggcacggaaagcgtcgagcggctcggtaccgggttttccgaattcgaccgtgtgctcggcggtggcgtggtgccgggttcagtgacgctgatagcgggcgaaccgggtatcggcaagtcgacattgctgttgcagacggccggcaatatcgcgcgcgttgtggcgggagacagtacattccgaggagccggtcagcggtctgcccaacagtcgggccgggcgcagggcggcacatcaaacacggtgtcggtacagggcaacgcaccgtcggtacatgccaataccgtgctgtacatttccggcgaggaatcacaggcgcaggttcgtttgcgcgcttcccgcatcaacgcggtggagccgaacttgttactggcctccaccaccgatctgtccacagtattggggctgatcgaacagaacaagccggccttggccattgtggattcggcgcagaccatcgtctcgcaggaggtcgatggcatttccggcggttcgactcaggtgcgcgaagtggcaagcgcgctgatagataccgctaagacgcttgacattccggtatttctggttggtcatgtgaccaaggacggttcgattgcaggcccgcgcacattggagcatctggtcgatgtggtctgccaattcgaaggcgacagcgagaccgcgctgagaatgttgcgagcggtgaagaatcgttttggtccgaccgatgaagtcggctgtttcgacatgagcggtgagggcatcgaagaggtcaccgatcccgccggattgttcctgtctggagacggccctgatgcggccaacgcggcacccatggaaggcacctgtgtgacgttcacattggatgggcatcgcagtctgcctatcgaagtacaggctctggtcaccacgtcggtgctgcccacacctcgacgtgcggtcaatggcgtggaccccagccgtatcgccatgctggtcgcggtgctctaccgtcacagcaagctcaacctgctgtccaacgacctgtatatctccactattgccgggggccaggccaaggagcccggttccgatttggcgatagtggcggcactggcgagcgccgccacgtcaaaacccattgcgcgagccacgtgcgccattggcgagatttccctgaccggtcaggtgcgcccggtaccgcgtatggaatatcgccttcgcgaggccgcgcgccttggctttacaacggcagtcattcctccgctgcgcaagccggtgcatgtcgagggacttcggctggtggagtccaacacattgtccgacgccttagatgccttgggagtgcgtaaatagccctgagatatgcctcaggcggtaagacgcttggtctcttcgacgttgcgcttgagttcgtcaacgagttggtcgggaccatcaaacttgacctgcgggcgcaggaaaccgacgaattcaacgcgaaccttatggtcgtacagatcaatccactcatcggtgatgcaataggcctccaccacgcgttcgttgagtcctgttttctcgctgaaggtgggtttggtgccaatggagatggcggcaggccagcggttctcaccatctaccagccaaccggcatagacgccgtcgaccggaatgtagcctgcaatgtcggagccaagattggcggtgggaaatccgatggtgcggccgcgctcctcaccgtgtaccacttcgccttcgatggcgtgcggagcacccagaatggcgttggcatcctggattcggccatgagccagcaggtagcgcacattggtggagctccaggcgcgcattgccttggcctggttcttcttgctccatgcgcggcgctcggccttggtggcattggccagcgggtcgacgggctctccccattcgctcggggcttccggcttgaaatcgcgcggaatgcgcacttcacccgggccacggtcatcgaccacatcaagttcgaatacaccggtggcggcggcaagattggcgatatgcttcacatcaccttctcgccccttgcccatggcggcatcctgcccgaggaccagcgtacgcatgcccagcttgccggtgagtctgccaaggaagaaaatgtatgacatggctgcgaaggccagcgtgtagtgcaccaccaacacatggtccacgccgaactgttccatgcggtgcagtcgatcatccacactggtcaaggcttcggcatccacgttctgcaccgcgggttcctcgccatggtgcgaggcggcccagccgtgcacgaatgcggggcgcgggtcaaacagaatcaccacggaaaaagcatcatgctggtgcgcgagttccaccacacgcttgatcaccgcctgatgtcccaagtgcatgccatcaaatgcgcccaatgtcaccacggccttcttgtcgttactgaacgagggccattcaatcgaaccttcggcgtcaggggtcaggtgcgtgatatccatcagtgtgctgttccttttatccgtgcgatgttattcatgcaatataggcgttgttgtgcgcggcctgtatcaagctgcacttttcaccgcgtctactttacgcgagggggaatacggtgaccggcttggcctgatgagcgttggcacgctcgataatcgccgccacatcatgcgtttgcggcacaatggcggcagtgggctcgctgattgtacgctcgatacggcggccgaagcgcaattcgctggcttcctcaggtgtgatgtcaagcgccggcatcgcgcctcgagcggcctgttccatggtgagggcatggtcaagcagccagttgcggcgctcgtcaccggcaaggccttcaggagtgttcaatacgcacttgttgcgcgtgacggtttgcccttcccgattagtgaacgtcttctgatcggtatgtgcggtgacggtatgggttcgcgtgtcaagcatcgcctcagaggcgataagtccgctggtatcgtccggcaacgcgaatcggccgactcgcgtacggcgcaaacgggtcaggtatccgccgacgccaagttcattgccgaggtcgcgggcgagcgcgcggatataggtgcccgatgaacagctgacccgcacgtcaatatcaagtgcgggaatcgttcccgtgttcgcgtcttcccgcaatggttcagcggcctgctcccctgctacgaatccgctgcggatatccagcacggtgaattcgctgatggtcaccaggcggggcttgagttccacatccttgccttcgcgagccaagtcgtaggcacgctggccgttgattttgatggcggagaacgtattgggtacttgttcgatatcgccggtgaaattggtggcgatggtgcgagtgagcaggttttgccatgaggcagttggtgacgccgttggttcgccgctctggccgccctcagtcagctgcgctgacagcgtttgccagcgggagcgggcttcatcatcgacaagcgcctcgccttcggcatcgtcggtagtggtgcgcaggccgaggcgtatggtggcctcgtaggttttgtcatgcgccacgatggcgttgagcagtcgcgtggcgtggccgaaggcgatgaccagcgtgccagtggccatggggtcaagggtgccggcgtgaccgaccttcttgatgtgcaacgcgccgcgcacggcggcgacggcgtcgaaactggtcacgccttgcggcttgtcgatgatgagtaggccgctgggtgttgtatgaagcacactactcctcgtcggactcgaactcatcgccctcggcttcggcctcgtcgtcgtgcttgtacggatcggcgtcgccggcgtactgggcggtggcgcgggcgcgggcgagttcttcgtcacgcttcttggccacggcgagaatgtcttcgatctcgtgagcctcgccgggcacttcatcgaacacgaattggagctgcggagtcaggcgcaggccagccttgtggcccaccagagaacgcaggtgacccttggcctgatcgagcgcctgctgggcgcgcttgcgttcgccttcctcgtggccttcgtggccgagctgggtccagtagaccttggcgatctgcagatcgttggtcacacgaacttcggtgacggtgatgctggcgagtcgcttgtcatgcagttcgcgctcaatggaggaggcgacgacacgctgaatcaaggccgcaatacgtgcggcgcgcgggttggttcctgccataggaatttccttttctagacttgagccccctctgacgaggggctgccgaacgcagtgaggctgggggagagaaaattcatggaactaccatgtctctcccccagtcagcctgcggctgacagcccactcgtcagagagggcttaacaatgactacttgcgctcgacttcctgcatctcgaaggtctcgatgatgtcgccgagttcaatgtcgttgaaggtgccgaggttgataccagcctcgtagccttccttgacggactgaacgtcgtccttgaagcgacgcagcgaggagatctcgaggtcgttgaccgtggccacgccgttgcgcaggatacggcacttcgtaccacgcttgacctcgccgtcctgcaccatgacgccggcgatgttgccgaacttggaggagcggaaaatctcgcggatctcggagtgagaggtgacgacctcttcgtattccggcttgagcatgcccttgagggatgcctcgatgtcttcgatcgcacggtagatgaccgagtagtacttgatctccacgccctcgcgctcggcgaggtccgccacctgacggttcgggcgtacgttgaagccgatgatgacggccttgtcgaccgtggccaggttgacatcattctgggtgattgcaccgacgccgcggtggatgacctggatgccgacctcgtcggatacctcgatcttcatcaaggaatcctcgagcgcctcgaccgaaccggacgaatcgcccttgatgacaatattgagcatgtcgatctcggactcggcgaacttcttcttgaagtcctcgagggagacgaccttgcgacgcttggccagctgggcggcacgctcggtggcctgacgcttctcggcgatctggcgagcggcacgatcatcggaggcgaccaggaagaggtcaccggcggtcggcacggaggtcaagcccagcacctgaacaggtgtggacggaccggccgcttccatcggctgaccgttctcgtcgagcatggcacgcacgcggccgtacgaagtgccggccacgatggcatcgcccacgtggagcgtaccctgctgaaccagcacggtggccacggcaccacgacccttgtcgagtcgggcttcgacggtggcaccacgggcgtccatgtcggggttggcgcggaggtccagctcagcgtcagccgtgagcagcacggcttcgagcagcttgtcgacgtgcaggttctgcttggcggagatgtcgacgaacatggtgtcgccaccatactcttcagggaccaggccgaactcggtgagctggccgcggaccttctccgggttggcaccgggcacatcgatcttgttgacggccacgacgatcggcaccttggcggcctgagcgtggttgatggcctcaacggtctggggcatcacaccatcgtcggcggcgaccacgaggatcgcgacgtcggtgagctcggcaccacgggcacgcatggcggtgaacgcctcgtggccaggggtatcgaggaaggtgatcttgcgcggttcgccttcaaggttcacggtgacctggtaggcaccgatgcgctgggtaatgccgccggcctcacgtgcgatgacgttggtcttgcggatggtatccagcagtcgtgtcttaccgtggtcgacgtggcccatgacggtgacgaccggcgggcgaggcttgagatcctcgtcatcctgcagttcttcctcgtcaaggttgatgtcgaactgctggagcagttccttgtcttcctcttctgcggagacgagctggatgttccagccgatctcttcgcccagaatctggaaggtctcctcatccaaggactgggtggcggtagccatctgacccaggtggaagagcacggtgaccagcgcggcctggttgacgttgatcttctccgccagatcggccagggaagcgccctgacgcagacggatggtctgaccgttgccgttggggatgcgaacgccgccgatggtcggtgccttcagctcctcatactcatggcgctttgccaggcggttcttacgggccttcgaggacttaccgccctgacgtccgaatgcacctgcggcaccgccgcgaccgccgcgaccgccgccacgtgcgggaccgttgctcggtgcgccgccgccctggaagttattgccgccgccttggcccccacggaagccgccgcgtgcgccgccctgaccggcaccctgggagccgccgccctgacccggacggttgtggccccactggccgggacgaggaccgccctgaccaccttggcccggacgaccgccacggaagccgcggccttgcccctggccttggccgggacggcccggacgaccgccacgaccgctatcagcagtcggacgagccatcggatgcggacgcggaatatcacccggcgtcggggtgtgcataccctgcttgcgggagaacgggttgttgcccgggcgcgggccctgagcgtgcgggcgcggaatcgcgtttgaagcggcattgccgccattggcaccggcgccgccctgagcgtgcgggcgcggagccgaagcattgtcgcggttgttctgatgctgccccggctggccattgttcggacggccctggttgttacgacgatcgttgttacggcgatcgttcgggcgactctgacgaccgttctcgcggccttcgcgattatcgcgaccattctcacggttgtcgtgctgaccgtggcggccgggggtcggcatgccggggcgtgcgccgccctgcggacgcggtgtcggtgcgcccggagtcggagcctgctgatgtgccgaggcgggcgatgcctgacgtgcgggagcggccggagtcggtgcggaagatgaagtggaagccggggccgaaggtgcggccgggcggcgctgctgcacgggcttggcagcaggcttttgtacggaagatgcgggcttggaatcgcccttggcgttgtccttggcgaactctgccttcagacgccgggctaccggcggttcaatcgtagaagaagcggacttgacgaattctcccatgtccttaagcttctcaagcacggttttgctatcgacattcaaaaccttagccagttcgtatacgcgtggtttcgccactaattactcctattctgtgaccacgcgcgtgcatgggcgtggtcagttggtgatgacggcaagcctaccctgtctcatcgtgcgaccatgatcgtgttacctcgtctctggtgtgggcgatttcgcgcacactgcaccagcccacatacgccaatcaagcatactcatagcgctggatagcgtagacgcagcgagccgcgccattgctgacgcggctcgtatcaggaaataatgcgccctgaagatcattcgccttcgagcccggcggcctattcggcttccggagcagcagcctcggccgcagcctgggcggccttttcagcggcgaccttcttggcatgggcctcggcggattcgatgccgatcttccagccggtcagcttggctgccagtcgtgcgttctggccttccttgccgatggccagggatagctggtcgtcgtggatgaaggcgatggcggtcttgttcttctcgctgatcacctgtacgccggtggccacagccggggacagcgcggctgccacgaacttggccggatcgtcggagtagtcgacgatgtcgatcttctccgggccaaggttctccataacggcacgcacgcgagcgccgccggggccgatcagcgcacccttcgggttcacgccatcggtgttggccttgaccgcgatcttggtgcgggcgccggcctcacgagcgatggccatgatggacacggcaccggagaccagttccggcacttcacgctcgaacagcttgcggaccagctccgggtgggagcgggacaccacgatttccgggcccttgatgccacgggccacgttcaccacgtacacgcggatgcgttcgccgtggcggtaacgttcgccgggcacctgctcacggcgaggcagaatggcttcgacatcgcccatcgcgacatgcacgttggaggggtcggaagcatcctgttggatgatgccggtgatgagcttgcccttctgaccggagaacgcgccgaataccttctcatcttcggcgcggcggaacagctgggtgatgacctggcgtgcagtggcggcggcgagacggccgaagtcacgcggggtgtcgtcgtattcctcgcccagcttgggagcggggtgcgggtcgtcctcggtgggctcgaccgggatttcgtcggcggcccagacggtgaagttgccggaacgttcgtcaagctccacacgcgcgtgcctggcggcgtgcggagtcttgaggtaggcgaggcgcagggcctctgccagcgcatcatccagggttccggggtcgattccttgctcggcggcgagcttgtgtattcctgtcaggtccagttccatcgatccgtacctcctatgaagttatgtggcgcatggcctatgagtggtcacagttagctattagtgtaggtttccatgcagacacgcttctcttcaggacggtttacccggcgcttggcatccgcactatgcgcgagcgcgatgctgtgttcgctttcggcgtgttcgatgccgcgactggccggacgggccgaggcggaagctcaaatgagcccttgcgagaaagcgatgacgttggcggactacgccacccatccggctgaaggcacgccgttattagagcagtatgccaccggcctggccgctcccctgacttggattgacgttgccgggtattgttcgggtcgttttgccgagggaacgttacgtgacgcgcagaccaagcaatggctggcttttctggccgataaattcgggcagtccgcgcctgaggtgacgccggcgcgtcttgatggcgtcacgtccgccaacgttgaccgaccggtattggatgcgatggccgtggccgaggatcgcgccggattcgctatcgaggtcttggccgcacgaggagcgaccgctggggctacgttggcgttgagcgatatgcataagaccgccgggcagcagctggttgcgctggcaaacggcaattttgatgattccggcgcacaatccagttcttccggccaaagcgacccccgccaaaaggtctatgccatcgaccaactactggccaaccccaccaccatcgtcgacaaggcaagtggccaaaccgtacccacggccgctgccatcgaaatggattgcgcccgcgcgcagatcaaggccgtgaccgaatcgaaatcttccaccgagagcgacacgctgctcatcctcgccgcactggccgccaagcacgcctacaccgcgttccaacttggctacccagcgactgacgccgcattgttcgagtagtttcgcagtaaccgttttcgtgaaccatagtccggtagacgcgatgccgttcaacaattcaacaggtaaaacacctgtattcgtatgcattacgcatcgcaccaagcaactgctggcacgagacctatacgctacaaccgagtggaaccacgctctataagctcgaaatcagtgcaatacgtgcgtattggcccctcgtagccctgaatacgttcaatcaacatatctatgccgcacttcacgtaatcgctcacatgcggatctacggtggtgagtgacggattggagaattgagcttctggcacattgtcgtatccaataagctgcacatcttccggcacatgaagaccattcgcctcaagaccatgcaacacgccaatcgccatagcatcgttcaggcagacaatcgcatccggccgtaccccctgcttcaacatgtgattaacggcacgcacaccactgtcgctcatcattaggccccacgaaaacagcatatccatgtccggacgtagtcctcgttcttcgaaagcaagaatgtacccacgaacacgcatctcctgtgtgccttcagtagcgttcatatagtagtcgtaatcgcggttgccctcgcatgcaccgaacagcgcgatgttccggcaccccgcatcaagcaaacggccggttgcctgccgcacaccttcgacattgggcatggtcactttatcgactctgtcatatgtttcatagtcgctagcaacaaccaacggatacggctgctccagtaacgcgccttcattggcaaggggctggtcaatgaatacgaaccatccatcaggtgccaacatggcggcattatccataaccgatgccagtccagcaccgccttggccatatgtattaacgattacgccatacccacgctgacgcgcatagtcgataacctgatcagatagatagggagcaaaaggctgcgagaaatcaaaaatagatagtcctatcagaccggtcgtgccggttttcagcgaccgggccgacaagttaaccgtatatccgagtttgacaatggcattttcaacacgttctcgcgtggagtcacgcatactgccagtactgttgagcacattggaaacggttttgaacgaaacgcccgcttctttggccacatctttgatggtcacatgcctaggcattattcactccttaacaatttgctcattattcacattgtaattacggtttaccttcaataatgccactatgacaacgagcccgacacacatcgaaagaagcgaaggatgtgcgtcgggctcgtcgagagcgaaggcgggccgaaggagaagacccgccaagtcgtcaggatttcacagaaccggccgtaagacctcccacccagtagcgctgaaggaagagaaaggccagcaccatcgggatgatggatatgaacgcaccggacgtgaccaaattccacacctgttcagaagccgcaccagcctgggacttgacctgccactgcgtcagaccaacagtgatggggaataacttgttgttcgtcaacactacctgcggcaggaagaagttattccaagctcccaccgtggacagcagatataccgtggtgatggctggggtcataatcggcagcgacacctggaagaacgtgcgcagctcgccggcaccatccacacgggcggcctcgatcatctcgtcgggcaacgattcctggcagtagatacgcatgaggtacacgcccatggggttgagcagcgagggaagcaacacggcccaaactgtatcaacgatatcgatattcgacatcagcaggaaggtggggatgaccaacgcggtgttcgggatcatcagagctgcgagcaccagattgaagaacatcttcttgccacggaagcggaacttagcgaagccatagccggcgagaacggcaaccgtggttgcgcccagtccaccgaccaacgcatacaggaaggagttgagaatccaacgccagtagatgccaccctgataggtggtcagctgcttgatgttgtcgaataacgcgaacttgtcgtcaaaccacagtgaaccgtgcgcgccaaagaacaagccgttattggtcttggtggaggcaacgataagccaccacaccggaatgaggaagtaaacgatggcaaggcagaacactacaatcgtaaacactctcgaattgccacgaatgtgattggccttagcagctttgcgtgcattcttagccatgtcagtcctccaatcccgattggttcttcgtcagtttcataaagacgacgctaaagataacgacgatgagtcccaaggcgaacgaaaccgtcgccgcatagttgggctggttgtagttgaacgccagtgcctgtgcatacatgttcggcgtgtattccggctgtatggccgtcggtgcctgattgcgcagtaccgtcggttccgtgtagaactgcaaggttccgattagggagaagatggtcaccataaccatcgagctggagcacatcggaatcttgactcgtgtggcgatctgcagttccgtagcaccatcgattcgcgcggactcatacagctcatgcggaaccgattgaagtgccgaatacagaatcaccatgtagtagccggtccactgccaagtaaccacattgaccaacgcgccgaaaattccatcaggagtgaggaagccaggcgtaggcagtccgaacaactcgaaaaacgtggtaaatggacccatgttgttggagtacatgaagccccacatcaacgctccgaccacgcctggaatcgcgtacggcaggaaaatgaccaaacgagtcacggatgcgaagcggtttttgagggagtcgagcagcagagcgaagaacaaggccaggccaagctgaatcggaaccataaccaccgtgtatagaatcacgcgccccatgcccttaaggaacaacgggtcagtgaacaccctctggtaattcgacaaaccggtgaattggacgccgaacacgttggatgtgaacagcgacataacgaatgcatatacgaggggcactacgaggaaaatcacgaaaatcacgcaaaatggagcagtgaacagccatccccagatattgccgcgacgagtgacgataccgtctttactaacggtctttgttgcgtttttacccatgtgtatctccaataatcaggtgaagaagctgcgggccgagccggttggcttcggagccgttggcccagcccgcaactcacctgctgtcagggttattcgacagtgtaaccctgctgcttggcgtagttgttgagcgtctcatcgaggctcttgaggttgctggtggtatccttgccatccttgacgatgctagtgaacgtctttacctgctcgtcgtatgcgtaggtctggaagggcaggaatgagtagcccttgtaaccctcagccgtgggaatggtgatctcgttgagcttctgcccgccgaggaactcctcctccatgttcttgaagctgtcggactgcagcttcttggtccaagccgggaacaggccgccatcggtaacaccgatttcctgagccttgtcggaatcgaacagctctcgtgccaccttgtatgcggcttcggtgtccttggcctgatcggttacggcccaagcggaaccgccttggttcaccatcggggtggagtcatcccacaccggagcattgtagatgcggaactgaccattggtgtcgccggcacccttcagatagccggtctgccacgaagcctgcacccatgtggcgtacttgccgccaagaatgttggtggtccagtcgttcgtgttggcatcagtggtgtctacgaggccctctttgacgaggttctgccagtagtcgagcacttccttgactccatcggtgttgaagttcaccgaggccttggtgggatcagacgccgagtagttgtagacgttctgattcttctgcgcgaacagtgcaatgttgaacgcggtgccattcggcgcgaaatcagtcaggtagccgtcgtatccggctgccttgaggtccttgccggcctgctcgaactcagcccaggtggtcggcaccttgacgttgtacttgtcgaagatgtcctggcgcacatacatgacgaatggtccaaggtcgacgggaacaccgtaaaccttgtcttcagaacccagctgaacgctcttccaggcaccttcggtgtaatcgtctttatgatcggtgaaaccgaattggctcaaatcgacgagatgttgctccttgccggccataaactggggcatggcttcatattcaagctgaataacatcaggggcacccttaccggccttaatggcgttctggaatttggtgtattcaccgccgccctggccgccgttattccagcaaacctgaagatcatcgtgggtttcgttgaaatcatccaccacctgttcgatagctggataccaagcccaaacggtaaccttctgcacaccctttttcttaacggtattggtgcaggatgcactgtcattagcggtcttatcgctgttgaccttggcaccattcgcgttggagcttccgccacaagcgcttacggtcaatgccatagcgccagccgcaatggctgccatgacccgggttactttcttcatgagctcctcctttggattctcatttgttctttccttattgttctttagttatgggcgctgcggaaattcgtcgaagcgattaacgaaatcccgcagcacagttatgttgttggcgcgcccgctacgattaagcgaaatgcaacgccgtccagctcacggggggcagcacaacatgcgccataccggtctctccatcgagtgatgcggtgtcgttgtcgtgcagcacgacacggttctgattgtccagagtgttcttggcgagtaggtcatcatcatgcagcgtctgcgccgtgacggttttcgcaaaaaggccttcaggcaatttgatttcgaagtcctgctcagcgtccaaagaacgattgaccacgaatacactgaccgtaccatccgcgccacgtaccgccaccgaattgacgaccggcacctcgccatatttagcggtgtcataggttccagaagcgagtttcggctcaagcaccgtaccgcccttggcatattctgcagtgaccgcaaatgggtagaacgtggtctgacgccatgccggcccattgggctcagtcataatcggcgcaatcacattgaccagctgagcaagactagccgcatgcacgcgatcggcattcttcagcaaggtaatcatcagatcgccaaacaccacagcatccgcgacggagtacagatcctcaagcagacgcggcgcaaccggccagttgccgatgccttccggattcttgctcggctcatcatgctgataccacacgttccactcatcgaaggagatgtagacctcatgcttgctcttcaaacgggccttggtggcatcgatggcagccgccacatcattgatgaatccgtccatatcgacgccggatgcgaggaagctgcccatatcgcgggtgccatcttccttaagggccgggaagtaataagcatggcacgaaatgaagttgacggcttcgtaggtcttctcgagaacggtttcttcccaacgaccgaaggtgtccatctcatgggaagaggaaccgcataccacgagttcaaggtcgggatccatcatgcgcatgcccgccgcgaccgaagcggcaagagtgccgtagtcttcggcgctcttgtgcccaatctgccaaggaccgtccatctcgttgccgaggcaccacatacgtatgtcgaacggtttgtcagcaccgtttgctcggcgctgctcggaaagggccgttccgctaggaatgttggaatactccagcaaatcaagcgcttcctgcaaaccacgggttcccagattggcggcttccatcagttcgttgccgccgcacttgtccagccacttgaccatctcgtgcaggccgaactcgttggtttcagtggaatgccaagccaaatcaagacgacgaggacgctgacccttcgggcctacgccgtcttcccaacgatatccggacataaaattaccgcccggatatcggatggtggtggcacccagttcgcggaccagatcaatcacatcctgacggaaaccatcttcatcggccgtgggatgaccgggctcatagatgccggtataaacgcaacgcccaagatgctccacgaaggagccgaagagacgattgttgaccggcgcgacctcaaatgcgtcatcgacgacgagacgcgccttgttcgcagtgacttcttgtgccataggaaccctttcctgttactgtttctcacagagttagtacaacgttgtcttaaaggcgaaaaaagaaccacaacctttctgaaacaatgttcggtgcatacgaagcggaaaccacctcttatgggagaatcatcgaatcaatcggttgctttgaacacttctttctatttagtacaaccttgtaccgactgctgatacacaaggtacaccagtacgcaaaaccgcgcaaacgcaactagtataacgttggagtaattcgcagattttcgcccaacacgccgtgtgctgtcctcaagtatcgcttgaaaacgaacattgaacagaacagaaacgaacacggcctataggaacttttgtggtgcttataacccgggtttggccttgtgggagtaggcgtgccggggtgttatttttcccggcgggaaaataggggcgtcccggtggtgggctggacgcatgagaacgaagtccagcaaggcgaagaaatgcccggtgtgcggccggccgatgaagaagaacggtcggaccgcgaaggggtgcagcgctggaagtgcgcatcctgctcgctgagctcgacgatgccacaggagaacacggagcgggccgggcagctcgacgcgttccttggatggctgctcggccgcgcgagccagtccgcgtgcgacgcgaacggcgattcgcgggccctgcgcaagcgcaccgcgtggtgccggaacatccggcccgccatcccgccgtgcagggtgaaacatcatacggtgatggcggacggcacgtacatgaaccacggctggtgcctggtcatagccatcgacggcgggaacggcgaggtgccgggcttccagtggtgctcgaacgagagcaaggccgcctatatggcgttgttctcgcgcatccctgctccggacgtgccgataacggacgggctgcgcggcgcggagagcgcctgcaacgtgcagcgctgcctggtgcatgtgctgcgcaacacccgcgtcgacctgacgaacaggcccaagagcgaggccggcggggagctgctcggactcgcccgcaggctcgtcagggtgacgacggccgacgaggacgccgcatggctcaaggagctcaacgactggcacggcaggcacgacgatcacttcaaggagcgcaccaccgccaaacaggatcccatgcacgcgaggggacgcaagtggcggcggacgcacgaacgcctgcgccgcgcccacttccgattggtcagactgaaccgggccggcgtgctgttcgcgttctgcgatccggccgtcctcaagagcggcggcccgctgccgtcgacgaccaaccagctgaagggcggcgtcaacgccgtggtcaagcgcgcgctcgaccaccaccggggattgtcggaggagcatatgagacgctgctgcgaatggacggtgtacatgctcacggagcagcccggccccatggcgctcgtcacacctgaacaccggaggacgaggaaggggaagccggtcgggaatgacgggcccatgcccggcaccatgacggccgtgcaggaaccgaccgacggcgtcgacgcctacgagagcgggttcgggatcagaaaaggatgggtcgggcgatcaacctgaccatgacacgagggaatagacactttttaacccacttttctttacttaacccaaagatggggttccgcaaaaacaaaaaaggttccgagatgacctcggaacccttgcaggcggataaggcgagattcgaactcgcggaggctttcacctcacacgctttcgaggcgtgctccttagaccgctcggacacttatccatgctgccaaaatggcaacttgttcattatgccacattctgccgacctggcaaatcggagtttcgctgagcaagtctcgagtgtatgccgcttgagacatgtcagatcacaatcccggaattcgcccgaagcgctggcattgcgtttacgcgccaagcactccgacaggaattacatacactccatcatcgcgttgatacgcgaactcgccgacccccaccaacaccgccaagaactccggttcacgggttcgcgcactcggatttctcagcagtttccctttcagtctgcatagatttgccgctgcctcagggactttatcctcactggacttaatctcgatgccgccccaccgtccatcggacaattcaataatggcatcacactccagaccggaatcgtcatgataataccgaaccggttctatcccaatatcgaggagagatctcgcatacaccaacagatcgcggatgcatagattctcaaacagaaacccaaaagtctgccaatcgccgataagagcagcaggactcatgcccaacattgcggccgcaatggaaggatcggcaaaataccgacgcgccttggtctggagtcgctttggatcccgtgccggcggaacccagccctttatcggatcgatgacgaacatgttctcgaacatggccgtatacccggataccgttctctccgaaatgaaatcgtcaagatttgcttcagtaccgtacatatccttacgtaaggttttgaatgtcacagcttgactgatattgcgcgcaagcgaatccagcagacgacgagccacatcaggatccttgccttgcctgggcacactctcagtcagcgtgagtcgcatgtattcccgaatcagaatctgtgcgtcagatacaggcagagccaccgcctccggccatccacctcggcatacggcatccaacaacatttgtgtacttatctctgattttgcagcggcgaacttatgttcaaacagtccactgagacttaccgcacctgtcgagagtccggactcatataaagtcagaggattcatacggatacgtccgattcgtcccgcaccactatggttcggccgattctcattgagaggagtggatgaaccggtcagaatccactgacctttattcgcggaatcatcgtcgacgcgatgacggacttcatcccatatagctggagcgagttgccactcatccacgatatgaggcctatctcccagcagcatcaatgacggatccgccttagccgcagccaaattgttattgcgatccacataggtaatgctggctgcatgggcccgcgcagaccaagttttcccgcaccacttggtgccggtaatctccaccgcgccaaagatgcgcatatatcgttcgatctgtgcatccacgatacgagggcgataggctttcggcttgatgtcgctcgccagagaatcggccattccgcgcacctcccgttatttcacgtccgccatcgcaataatccgaatttctcaactaccaaaatccgaatgttgcaacgacgaaaatccgaatattggtggtggtagaagcggtgacggggccactctgcattgagcggtctctctcagtctcgctacgctcgacagctcgaacgcaatttaaggacagctttccagctgccattttatttgctcactgtcattcgccttcgcctaaaaacgcctccggcgttttcttcacggctcagctcatcagagggggcttggaattttgtttacgccacctgttcgtggacggaggcattgacccattgggtctgctggacgttgtagccggagaagatgccgatgtcgagcatgcagtcgcggtaatcgcggccgtgggcgatggtgatgtagctgtcgtccaccaatcggttatgcgtgggatccagtccgacccatcggccatcctgatacacctcgacccaagcgtgggtcgcgccctctcccccaagcaaaccggcaatgtagcgcgcggtcaatcccacatgccggcacacggacagcattacatgggcataatcctggcatacgcccttgcgctgggccaaggcctgttcggcggtggtgcgaatcgtggtggaaccgggcgtatacacaaacgccttgtagacctcatccatcacttcgtcggcctgctgcaccggagtggcgtcggcaggcaacgcagccaagcgttcgcggcatacgtcgatcatcgcctccacgttcgggccgggaatggtgagcgctgaattgaatcggtacagcggtttataggcttccttatggatatgcgcattgtccacgaaggcgatgccggtcaccgaatagctgaatatgtcgtgcggctcggggatgaatccggtcatcaccacggagccaaaggagtcgatggtggtttcgagttcggtttcgggctgaatcttcacttccacgtcaatcacctgttggcgagggccagtggcgggaatacagcgaagctggaacctgtgatcggtgaccggtgcgctgaaggacagcttcatctcatagtcgaacacgagttttttcacaacgtctcctgcacttacacacgagccggcaaccggcacattctcgggataacgacactacagccatggctgaggtatggtccgcgcgctcacagtccacgcatatattccggcaattcgccgatacgcatcggccggcactcgggcgcacggtttttcgccataccaccatagcatttgaacccgtcagggcgaacgtcgggttaggggcgcttggcctccatgttcatggagctcagtgagcccatgtctttgatggccagggcgctgacacggccggaataatcgtcaaggtacttcttcagcaggtcggcgacttcctgatacccgcgagacggcagctgaccgaccagccagctcagcccatcggcgaagcaactaggcaacggcatgccgtcgaggatcatcgagtaggaggcgagcttcctaagcggggcttccatctcctccatcgtcaggccgaagcgcgtgtacaggtcgatgcgctcaagatacttgccgatgaagatgaacgccttcagcgtggggtcgaccggcgaattctcgatgccgccccagaaggcgagcatgtcatcggtaatatcgcgctgcttgtagatgtcctcggcgtcggccgcgtatttggcggcatcggtgatattggtcatcgccaactccacgtactgcaacagacgcgagctcaattccgggcgcagaatcacggcgttgttgaatgcggaggttacggccgaccgcaccgaatcagggttggacccgtcgtacaggaagctgttcacgaacccgtcgaagtcctcgaaatcttcgggcaggtcgagtgcgtgagcgaacggacggaaggcgtccacatcggtgtccatcacacgatcgtagaacgggaagaactggttcagcgtggtgaaggcgcgctcggtgtaccgacccagccaatacaggttgtctgccttggaggcggtgaccagagacaacgagtggcggcgggactggctcagcaggttcgccacctgcacttcagcaccgtattcatgctccacgccggattcgggtgccaacacccacgtatccttgaatccgccaccctgcgacgagttgacgatcatctggccgggcaccgacgagtatcgagtcaagcccgaataccacacatgcgtgtttttgccgatgaccacaaaggcacgcaaatcgcatttgcgcggcgacatctcaccggtcttcgggtccaccacatcgatatcgcggaactgaatcacctcttgggcgatgaatcgacgaggctcctccttgatccggttggcaagctcctcacgtgcggcagcatccagcgacgaaccgaacaccacgccgtaaccaccggcttcggccacatccttgatgaccagctcgcccatacgattcaggacttccttacggtcggcctcgaacatcggcatatacgtgggcgcgttgttgagaatcggttcctcgccgagatagtacttgatcatctgcggcacgaagtagtagatggccttgtcatcggccgcgccgttgcccggcgcgttgacgatggccacgttgcccgcgcggtaggcggacaggataccgggcacaccgatcaccgaatcaggattgaaggcaaacggatcgaggaattcgtcggacagacggcggtagaccacgcccacacggtggcgtttgccggcgtagtcgaggaagtagaccttgttgtccaccacttcgaggtcttcggggaaggccagtgcggcgccggttttctccgccagataggcgtgctcgaagaacgcggaattgtagcggccgggggtcagtaccacggcgatgccctcagtggacacaaagtccatggccttgcgcagtaggcgcgggtattcgcgattgtcgcggatgtgcacgtcgcggaacaggcgcggggagatgcggcgctcgatgtcgcgcacgaacagcgggtagctggcgcccgaggggatgcgcaggttgtcttccagcacccaccagcggccatcttcaccctggaccaggtcttcgccggcgatgtgcgcgaagatgccgccgggaggggtcacgccgttgacctgcgggaagtagccggccgaggtgtatacgtattcctccggcacgacgccgtcatggatgatggccttgtcggagtagatgtccttcagataggcgttcagggcgttgacgcgctgcttcaggcccttctccaattcgtcgtattcgtcggattcgataatgcgcggcacgggatcgtacgggaagagccggtcatggtattcgccgttcttgtagatgccgaagcgtacgccgttgcgggacagctcgcggttgatcgcctcgcgacggtttaccagttcatgggccagtctgcgtgctgcggattcgatcatcgtgcctgctccttgctgtggcggcttctgtggcctcaagcggttaggcgtttcgagcgcacgctgacgccgcaagccgtaaccgggtttgatggttacaacctaaggcggccccgtttcagcaaacgcgcgagaatgttacaggcaggtcacttcgccgaccgcactcgtctcgccgaccgcgcgcatctcgccgaccgcgcgcatctcgccgaccgcactcgttacaatgaatggctatgacacgactgcgcattgacttggcctacgacggcggcggattctatggctgggccaaacagcccaatctgcgtacggtgcaaggcaccattgaagatgcgctgcacaaggtgctgcgggtgccggccgatgatgcggccgaaccgttgcgtctgacggtggctgggcgcaccgacaccggtgtgcacgcctcccaccaagtggcgcatttggatgtatccgatgaggtactgaatcgctgcgtaggtcacatgaccattccggtcaccgaggcgctgactcgcagactcaaggctgtgctgccttcggacatcgtcattcatggcattgccgtggcaccggccggtttcgatgccaggttctccgcattggagcgcacttatgtgtatcgggtcgccgatcgttcgtccgagatcgacccgcgcctgcgtggatgcgtgcttaccgtggatgaatcgctggatctggagcttatgaaccgcgcagcctcattgaccatcggcctgcacgattttggttccttcgccactccgaatccgggaggcactacgatccgcgaagtcaagaccgcctattggcggcgggtgccgatcactcccctggtgccggatgcgatggcatcgcatgaagcatatcggactccgtcgctggagtccggactggcggtgttcacgattgtggcggacgcctttgcccgcaatatggtgcgctccttggtcggctcatgcatcaaagttggttcgggacgcaaatctctggaatggtttgccggcaaaatggccgagccagtgcgtgaaggctcaagcgggccgattgcgccgcagggcctgactttggagcatatcgcataccccgtcgatgatcagctggccgcaagagccgaggccattcgagccgtacgtacgttgtagtttctatgaaacaacgcaaaagggctggaacccaaacggattccagccctttcagctagcttggcgaaacgctattcagctcactcggccttctcggcgtcagcggcttcctcagcgggagcctcagcctcagcggcggcggtctcctcgaccggagcctcagcggcctcagcctcaacggccggagcctcttcttcggcaaccttggcggcggcttcagcttccttcacaacagccttcttggcaaccggctcggtgacgagctcgatcacagcggccggagcggcatcgccaacgcgcggggcgatcttgacgatacgggtgtagccaccttcacgctgctccatctgctcggcaatctgggtgaacagaatgtgcaccacggacttgttgcggatgacgcgcatcacgcgacgacgggagtgcagatcaccgcgcttggcgaaggtgatcaggcgctcggccagcggacgaaggcgcttggccttcggcagcgtggtggtgatgcggccgttctggaacaggctggtcgccatgtttgccagcatgaggcgctcgtgtgcggggctggaagccagacgcgggcccttcttaggtgtaggcattgggtttactccttatatgtccgttcttcaggcaagcaggtgggcatatgcccgaacatccgcttgcctagtgaacgaacgattggtcaaagaggcagatcactcgtcttccggcgagaagaacgtaccaccttcgagattattggtatcgaaggccatcggcgaggacttgaggctcaggcccagggtctgcagcttctccttgacctcatcgattgacttcataccgaaattgcggatgtcgagcaggtcctgctcggtgtgggagacaagctcaccgatggtgtggatgccctcacgcttgaggcagttgtaagaacgctgcgtcaggttgaggtcctcgatcggaacggccatctcggggttggtctcctcggccaccggggccggaccgacctcgacgccttcagcctgggcgttgagctcacggcacaggccgaagagctccaccaaggtggaaccggcggaagccaccgcgtcacgcggggagatggcgggcttggtctccacgtccagaatgagcttgtcgaagtccgtgcgctgttccacacgggtggcctcgaccttgtagctcaccttgagtaccggggagtagatggaatcaaccggaatacggccgatctcatcgttgtcctgcttgttcatctgggcaggaacatagccacggccacgctcgacagtgaactcgatctcgagttcgccatcgtcggcgagggtagcgatgtgctgctccgggttggcaatagtgacgccggcaggcggggtgatgtccccagccacggcttcgcccttgccgctcttgcgcagatacatgaccacaggctcgtcatattcgctggtgagcacgatgcccttgatgttcagcaggatctcggtgacgtcttcctggacgcccggcagagtggtgaactcatgcagggcaccggaaatacgcacggaggtcacggcagcacccgggatggagctcagcagcgtgcgacgcagcgagttgccgagcgtgtagccgaagccaggctcgagcggctcgatggtgaagcgggagcgctgcggattcagagattcctcggtaagagtcggacgctgtgcaataagcactgtggttatcctttcagcttgaactcggtggtgcactcaccggtcaggcggttttggatggatttggtattgctgagtgctcagacgcgacgacgcttcggaggacgaacgccgttgtgggcttgcggggtgacgtcggtgatggaaccaacctcgaggcccgcagactgcagggaacggatggcggtctcacgaccggaacccgggcccttgacgaacacgtcgaccttcttgacgccgtgttccatcgccttgcgggcggcggactcggcagccataccagcggcgtacggcgtggacttacgggagcccttgaagccgacatcaccaccggacgcccaggacaccacggcaccggacggatcggtgatcgaaatgatcgtgttgttgaaagtggacttgatgtgagcctggccgaccgggaccgacttgcggtcacgacgacggggcttacgagcggcttgcttaggcgctgccattgaccctcgtttcctagtaacgaactttgttgttgacgttcgggcgatgggatgaaatcatcccgtggcccgaatcatgccaccgactacttggtggccttcttctttccggcgaccgtgcgcttcgggcccttgcgggtacgagcattggtcttggtgcgctgaccgcgcacaggaagtcccttacggtgacgctggccttggtagcagttgatctgaatcttgcgacgaatatctgcatcgacttcacgacgcaggtcaccctcgatcttgtagttggcttcgaggtagtcacgcagcgtaatcagctgctcgtcggtgagatccttgacgcggatgtccgggctgataccggtcgcggcaagcgtttccttggcacgagtgcgacccacaccgaaaatgtaggtgagggcgatctcgatgcgcttctcattggggatgtcgactccggcaagacgtgccattgcgattccttcttgttgccgtaggtcttgcacccgctcgcccggttacccggcacgggcctacgtacccgtggttcagtgtcgttcccttgcgggaagcactgtgagagagtgccttatttacttagtgccgctggagaatctgctctcagccctgacgctgcttgtggcgcgggttgacgcagatcaccatgacgcggccgtgacggcggatcacgcggcagttttcgcagatcctcttcacgctagggctgaccttcatggttatccttttcttgtgtacctttacttgtaacggtacgtaatgcgtccgcggttcaggtcgtaagggctcatttcgagcacgacacgatcctgcggcagaatacgaatgtagttcttacgcattttgccggaaatcgtggcgagcacgatgtgcttgttctcgagttcaacgcggaacatcgcgttaggcagtgcttccactacctgtccttcgacttcaatcacaccgtcttttgccatgtgcctctagtcctattccgttggatgattactatggcatatccgaagacacaccaactgtcaactatatacgcacatacccctgtacgaacactcggcgtgtcgcacaggggtatggaaacgttgatgtggtatttcggcatcactccggcttgttggccgggctgccgaacctactactcgaggtggctgatgatacggccgctgatctcgtcgatgtcgccgacgccgttgaccacgacgagcaggccacgggattcgtagatgtcgagcagcggagcggtttccttctcgtaggtctccaggcgcttggcgatggcctccggagtgtcgtcagcgcggccctgctcggcggcgcgcttcttcatacgctccagcagcacgtcacgggcggcttcgagggccaccacgtggtcgagcggagtgtcgaggtcggcgagcatctcgtcgagagcggtgacctgggcggcgttacgcgggtagccatcgaggatccagccgttattgcagtcttccttggccagacgatccttgacgatcttgttggtcagggagtcaggaaccagctcgcccttgtcggtgtagctcatcgcctcaagaccgagttcggtcttgttcttgatgttgtagcggaagatgtcgccggtggagatggtggggatgttgaagtgctcggcgagcagagcagcctgggtgcccttgcccacgccctgggggcccatgatgagcagacgcatagtggtctccttttgtgtcggttattaatacggttttggctcccttggttaggggagccattgagttatatgtggaagaaagattgctccgtcgtggaactcctcgcgcggccgcctgcccattgcgggcgaccgctgccaagcgggcgtcagccttctttgtggtccacattttcgaacaggaagccggtgtactggaactgttcggtctgggccttggcctgacgcagggtgtcgaggcccacgcccgcgatgatcaggatcgtggtgccaccgaacggcagcttggcgttgagtccgagggccatgatcagcacggtcggaatcagggccacgaacagcaggtagacggcaccgacggtgttgagtcggttcatcacgtaggtcaggtagcggctggtggcgttgccggcgcggatgccggggatgaagccgccgtactgcttcatgttg

SEQ ID NO: 678 - DNA, 28994 bp, Unknown
  R14_15m  MAG No. k141_21308
cagctggggagctcacggtcacactcatgcgtcgcagaccacgagcctcacgcgcctcctcattccacatctgtgttaacaacatgtgttaatcgcatgcatcgccaccatgattccccaatgatttcaagggttccccggcctcactattgtttcttccctaaaacggcctcaatcatcggcaccttcccggtagccaccaccacgtccctgaccggcaacgcctcgttcggcgtgctctccatcgccgtcctgctcgttgtggcgctcgttttcctgctgctccagaaggatccgacgcgcgcaaacgtgctgagacatcgccggtgaaccaagttctgcctttttaccgacgccagctcgcataagcaggaatcaaacgtcggcgctgggacacagaacgggaatccgccgacgttcagagtatctgatgtcggtgccgggccatgttttggacgccaccgacacaagtaccactcttggcgacggtggtggggcatccgctgtcccaccaccgtcgccaatcgttctcagcggcgttgacaatccattatctgtcctttcaacgccgccaaacgtccacagcgtcggcgacggtccggattttgacgcaccaccgatgcaaaaccattgcaggctccgtacggaacatcagccgcgaccaccgaacgagcaccagatgcggcatcagccgcgacaccagccgcacttatcgacgcgcccttaccgcgtcatcacgtccatcaatacaatgactcatcggcatatccggctgcagcccaataatcgtcggccgatagcgagcgattgaaaccggtggcatgatcgcttccgaggtcgccctcgccaccgaaatcgacatcgaaatcagtaccagcatcggaagtaccgccggacataccggcaacggacctgacttcggttttcagcaggtatttctccgcgaaattcagcgtggtgcacaccatcgcaaacccctttccatgcgcgttgccctggcggaccaagacgtccttgtgtaagtaagtaagtatggcggctccccttccgcaccgccatatccactatggaagcacgccgcggcacacgacacaagccccgggacatatgaagcagttatggccggttcaaagcacccgtattacagcccaaacggcaccgcgcgcagcgggattgcacgacggccggacgccactcataatcggaaaccgctcacagccaaatgccacccgaggccggacgccatataaggaaccgtggcacggcagatatagaaaatgcccgccatcatagactgacgagcgtgatatcgggtgggcgatgtaggaatcgaacctacgaccccttcggtgtgaacgaagtgcgctagccgctgcgccaatcgcccgagcttgtgatgaaaaaaccggcaacattctgccggcaattcatcgagtgggcgatacaagattcgaacttgtgaccccttccgtgtcagggaagtgcgctaccactgcgccaaccgcccgggtcatcctcaggctgaatcaatcatcctgaaccagccatccgagagcggacaacgggactcgaacccgcggtctcaaccttggcaaggttgcgctttaccaactaagctatgtccgcatgtgttaccttcacgggcaacaggtgacaaagatacgccaatctcaggaaaaagccaagcccccgcgtgtcccaccggttttccaacgattatcgggtgccgccgtgcacataactcgcggtggccgtatacagcagccaggcgatgggcatggccagcataaacagcgggtagaaccaagcgatgggcacatctggcacggccatggccgtggaaatcaggaacgcatgacgataaccgatcagctggccgaagaggccaaggccctgatcggcgaccgtgccgaagtgaagttcctgaactacgccgacgtgccgttcttcaaccaggacgaggaattcccgaacccgacagccgccgtggccgccgccttcctggcgctcgttgcggagtaatcccgcctgaatcttggttacgttccgcctcaaggcggacggcggaccagctgcatcagcaatgtgccgaacccctctgattgactccaatcagaggggtcgctgcgtttcaaggggctgatttggccttctccggaggtctactcccgtttcaaggggctggtggctgagtagacacgggccaaaaacggcgtaatgacgttagcccggagccgtttatacttgtggtttcccggatgaggagcccctcgaaacggagatagacctctggaacagcccaaatcagcccctcgaaacggagttagacggttgggatgtcggaaagaacactcatgccggcccaagaacccccactatgtcagatatcgctgcccagcacgcaatactgaccgtacagcacgacccgtccttcatgaaatcaggcacggtatgggcttcatccctcaacgcgcgataatggcggtatgacgcaacgacaactgatgcgggccacagtcgaaacgcccatcggccggatgatgatggcctcggacggcgagggcctgaccgagctctgtcttgaagactggtggtgggccaccgatcaccaagccgttctcgattcgaatcgcgaatccgatcgtgaacccgatgtgttccgtatgacccgcgtatggctgaccgcctatttcgccggcgagcgccccggcctagatcagacgccgccgttgcatcccgccggcacgccattccaacatgaagtgtggaatctggtggccgaaattccctatggcatgacggtaagttacggcgaactcgccgccgaattggccgaacgacgcggtggcggccgcatggccgcgcaggcggtcggaggcgcagtgaagcgcaatccggttaccatcatcgtgccctgtcaccgcgtagtcggctcgggccgcgcgtttggcggctacggcggccgactcgacatcaaggccgaactgctcgaccacgaaggcgtggatctggcccgcttcaatctgccgaacctttgacggccccagcggtccgcctcgtcaaaaggattgagtggttacccctcccgctggcgggaagtggcacgtaacgccggagggtggtcggctggctggcatcgcaacccccgctacccgacaattttcgacaagctgacgggaatcctcccacgaattgttcgccgtcggtgcagtcttgctcgatcgcgccggccaaaaccgtacaatccctacaatggaatgtatatggttaattgctgcgcgcagccgcacggccgcacgcgatcgcaagaccacatggcccaaggggatatgcaatatcaacggaagcaggaggtgcgtatgaccggcattatcgattacgcgcacaccgaaacgcgctccttcgccgacttgccgttcaatgaaatcgacgccttgatcatctccacgctcatctatgaggatgtggccagtatctgtccgacgttgatgctggatgagacgcagtcaggctcgttcgccgcacgcattcgcgctttcgagcccaagcatccactgatctggctgaagggtatctggcatcccgagcttgaatcggtaagccttgacgaggccaaccgcgagctgcatcgttcgccggaaacgcatgccgacgacaagccgcacgaagcccaaatggtttcagtggtcaatccggacctgacccacgacctgttccaggccgcgggcgagaacccccgctacgccaacgttcgtctgggcgcggtggtcgagcacatcaatcagggtgagcaaacccaattcgccgccgccaccttccaactgcccgacggccacaagcgccggaagccgacctacaaaggcacgttggttatttccttccgcggtaccgatgattcgctcatcggatggaaggaagatttcaatatggctttccagtatccggtgccggcgcaacgttcagccagcgcctatctggatacggtggcgcgactgtgggagggtccgattattctggtcggccattccaagggaggcaatctggcgatttacgcggccatgaacgccgaccccaaggtgcgcaagcgcattcagcatgtctattcactggacggccccggtttcccgccggagattgtgaccagccccgcctaccgcaccatccagccgaaggtgacgaaaatcgtgccaagttcgtcgattgtgggcatgattttcgagaccccggagccttgccgcgtggtctcttccgattcggatggcattatgcagcattccgccttcacctggctattggatggcgaccagttcatcaccgagccggatttgagttccagctcgcagttgtttaacgaggagctgaaccattggatcgccacgcttacgcccgaacagcgcgagcgtgcggtggacgcgctgttcaccgtgctgcacgccaacggcgccaccagcttcagcgaggtgatgagcaacttccccgcttcgattccggcgatgcttggcgcgtatgtagggctgacccccgcagaccggcgtcatttggttgaggccctggcgatactgttcaaggcgtccacggccaaacgcaggccgacgcccgccccggcttccgcgccgagttctgcgaccgccaaaggaacagccgaaaccccagcaggaactgcgacaggaacagatagcgcggccccggccagcgccgataccgacaccgacactgacaccgcagcttcgccctcagcggaggacgcaactgaaatcgccgattagctcatagacatgtccacaaataatagttatactgcccgataagttattagacagcgtgaccatatcacgctggtgcatcaggaggaagagatgccacgtccacgccatgattccgaggtgctgcccgccaaagaacgcctagagaacgctttctgggaattgctcgccgaccgcgactaccgcaagatcaccgtcaccgatgtggtgcgtgaggctggcgtgaaccgtaattcgttctattatcacttctccagcctgcccgaattggccgattcagccatcctgcatcaggtcgaatcgattccgatcaaccgcacccccgacccgaacggcaatcccgaggaacaatggcgagaccgcgtcaccgccacgctctccgatccagagcaacggcaacgcctcgaccgcctggccctgttggccggcccgcacagcacgcttgaactgaccgaatcgctgcgcgacttctgccgtctgcaaatgctcagcacattgcaacgcgaccccaagaaccttgacctgaaaaccgatctcatggtcgagttcaccgtgggcggcatgctcgccgtgctgcaacgttggcccgaattgagcgacgccatcgaaatcaaagacctgcttaaagaagatgtggccgtgctggccatgggcatatacctggccatgagccaaaaggacatgcttaattactggaatcgcatcttcgtgcacaatgcgcaggattcggccgcccccggcatgccggccgccgccacgcatgccgctccatcccccatctcaccgtcgaacggccccgcaggattccccgggtacaccgcttgaccgaaaaccagcgagtctggattgtttccgtcgaatgaaccctgcgtgaggtttctcacaaggcgcaatcagcctcccatgctggcgtttccagccctcacacaggaagatggaagcatgagcgaaacatcgaacaaaacccgtctggaacatgactgcatcggccagatggaggtgccggcgaacgtctactggggcattcacacccagcgcgctatcggcaacttcccggtctccggcatcaccgatagccaacatcccgagctgattcgcgcctatgccacggtcaagcgcgcctgcgccatcgccaatgaggaattaggcctgatcgacccggccaaggccgaggccattcgcgccgcctgcctggaaatcgaggccggcaaactggccgatcagttcccggtcgatgtgatgcagggcggtgccggcacctcgtcgaacatgaacatgaacgaggtgatcgccaaccgtgcgctggaaatcgccggccaccagcgcggcgattacacatacatccatccgaacgacgacgtcaacgagtcgcagtccacgaacgacacctaccctgccgcctgcaaactcgcgcttatcgacgcgatcgggccgctcgccgagtccaccaagaaactcgccaaggccttccacgatctggccgacaaacatatcaacgacgtgacgattggccgcacgcagctgcaggacgccgtaccaatgacctatggtcaggaattccatgcgtttgccacgctgttgaagtctgatttggctgcattcgatcgcgtggtgccgctgctggcccagctcaacctcggtgccaccgccatcggcaccggcatttgcgcggatctgcgattccgcaagtccgccatcaagcatctggcgcagatcaccggcttgccggtcaccgccgcgcccgatccggtggccgccatgacggatatgggcgcgtacgtggccacgtcggccgccatcaagagccttgccgtgcacctgaagaaggccgccgacgatttgcgactgctcaattccgggccgcgctgcggtttcaacgatctcaacgtgccggctcgccaggccggatcatcgatcatgccggccaaagtgaacccggtgatccccgaatgcgtcaaccagtgctgcttcacgatcttcggcatggacgtgactgtgaactgggctgtggccgagggccagttgcagctgaacgccttcgacccggtgatggtgcatgagctgctgaccggcatggcgttgctgacgcgggccatggagacgttccgcgtcaattgcgtggagggcatcgagatccacgtcggtctgggacgctcgtatgcccagtcctcgccgtcgatcgccgccgcactcaaccactacatcggctatgagcatgcggccgacatcgccgccgaagccgtgcacaccgaccgtaccgtgcgcgaggtggccggcgaacgcaccgacctgcccgccgagcagctggacgagattctcgatccgattcgactggcccgtggcctcggccaaacctgccgcgagcatcgggactaggcgtcacggcgacgtcatcaccacgacgatgctgcaccgcggtgccgcggtggtgccggtggtgccgacggcacgccaccggtatcgcaccatcggcaccaccgcaacggccaaaacccgacgtgggcccgcatgtttacgacttcaccagaaatggtcgatacagtagggcatatgaccgaatatgcacaagacatcgcacgctggtttcaggtgaacgccggcaaactcatctggctggccgtcgtgctggccgtcgtgttcgcggccgaccgcgtgatcagccgcgtgctgcgcagggttctggatagttcgcagattcccagcgcctcgattttcgtgaatctcacgcgcgtgaccatctgggtcaccggtacggcgatggtgctgcaaccggtgttcggcatcaatccgaccaccctggtcaccgccctcggcgtcggaggcgtggcgatctcgctgggtctgaaggatacgatcgccaacatcatcggcggcttcggcctgatgctgggccgcgtaatccaacccggcgacctggtgaccattcaaggcgtcacaggtaccgtgcatgacatcacctggcgacagaccgtggtgcgcacccgctccggggacatgatggtcattcccaattcggtgctcaatacggccgccttgaccaagctcacgccggccagcgaaggcatggccacgctcgaattcacggccaaggcctccggcgacccgtccgctatcagtcaggatattctcgaccgcgtaaccaaagccaccgccgacgtggcactggagggccagccaccgctggtcaagttcaccggcttctccccttacggcatgaccggccaagtgcttgtgttcgcgcgcgagggtgtgctgccctccaccatcaaagatatggccgcgcgcgccatcgccggttcgggcactaaataccttgttgaagatggcggctcgtcagacaatctgtgatatctcccggctcacctctctgggtccggctatgacagtcatgcgaacagcatccaaccggtaagcatcacagtcagcagtaggtacgcaataacgccgggattggcataggcggtgcgtattttaagccccgccggcaactcctctggcgcaagatagaactcccagttcttgcgcttggtgataagcagcacgataccggcaatgcagaggcccaacatcactgtgccgtacaacatcatgatgcccatgccgcccatgttgccggtttcagccatacgcatgatttcggcctcgctgattgtgccgtcgaggatgcggggatcgatctgttgtatcaccaatggggcgagcactgccccgttcaggttgatcagcatgtgcatagccactgaataccgcaggcgggaggtgcgtgtgtatacatatccgaacatcagtcctaggccaaaggcgtagaagaactggaacacgttcatatggaatagcgcgaacgccaatgcggagaacatgattgcggtcttttctccgtaccggcgcaggcgggagataatctccttgcgaaaaatccattcttcgcaaaccggtgccaacaggcctatgaacaatgcgttcacccgccagtcgctgccaagaatcacgtcgttgatgcgattggtggcctgaccatcagtggctccggcagacaatatattgccgatcatattgcccaagaacattaccggaatgcacatgacgaaaatccgaatgaactcccccgccttcatggggtactgccgggtgcgaataaccggtacgcgagtgaaggccaacatactcagcggcatggccaccacatacagcggcccggaggaggcgagcagcacagcccaagcgggcacatcggcgccaagcagcgttcgtagtgcttcagtggccagaatattcagcccgatccagaacaccatcataatggcgagcgccgagccgattgtcgaaaaccggcgatgggccgtgaaccaccaatcgcgtggggtttgttgcggctgctgcgccgacggcattggttcgctcatacttatcccccatagtcactggccgcaaacggaccgatcacacgtgcaatactcttcaagaatacggcacggcgtttcgattgcattgggaatggggaaaatcatcaatgggcaaggaatgatctacgtcaatcaatccccatgccgagagagtcctctactctgcgggattgttgtgggacggcacgcgattttgcccgattttttcgcggcggcccacaccactccacatatgactgatgacgccgcacgaagaaatggcgtcattgcaacgattcctcaatacattctgtgggacggcacgaatgtacatcgtttgacgttcatgccatcccacaccggcgtgggacggcacgcgataatcgcccaaaaatcgccgccgtcccacacatatcattgccgataagccattcgacgatcgtacagtcacaaaacagaacagaaccgcacgatcatcgcaacgccattcagcaggcgagcgcggcgaccggacgcggggcgacaatcacgtcatcgcccaccgccagaccggccggcagctcgctggcgggcagctgcacggtggccttgagctgttcacctttgttccagcgctggtattcgccggaggtgatgaccgtgtccacacgaaccaaagagccaaggaagtgaatgacctccacgcgggcgcgttcgccgacgtgcgaatcgctgctgccagccaaggccagcatcaggttctccgggcgcacgagcacggccacggaatcgcccttggcggagccggcgagcagcggcacgcgctggccgaagaccacggcctcgtcgccattggatgcgccgagcaggcggttggtgagtccaatgaacgtggccacgtactcggtggcagggcgctggtacaggtcctgcggggcggcgatctgctcgatcttgcccttgttcatcacgccgatgcggtcggccacggccagcgcctcttcctgatcgtgggtcacgaagacggttgtggtgccggtggtgagttggatgcggcgaatctggtcacgcagctggacgcgcactttggcgtcgagcgcggacaacggctcgtcgagcaggagcacgcgcggcttgacggccagagcgcgggccagggccacgcgctgctgctggccgccggacatctgctgcgtgtacttcttggcctgatcggcaagccccacgagctccagctgttccatggcgatcttgcggcgttcggccttgcccatgccgcgcacttcgaggccgaattccacgttctccagggcggtcatgtgcgggaacagcgagtacgcctggaacaccatggccatctcgcgcttgttcaccggcacaccggtgacatcctgtccgccgaccatgatgcgtccgccttggatgtcttcgagaccggcaagcgatcgcagcgcggtggacttgccgcaaccggatccaccgagcagcacgaccatttcgccgggcttgatgtccaggttgaagtcgtcgagcgcgtgaacggtggagccgggatagatcttgacgacgttctgcatctgaatggaaccaccgccgcgcttggcggtgtctttgagcagggccttggcggccttggtcacgtccttgccgcgcacgccctcgagggtagcggtgggatcgttcttgaaggcgtcctcggcagtggaggacatggctgccggaatggccggggacgccggggcggcgtccactgcggtaccggtttcctgacgggtgggagttgaatcgttgttcatcgggtcacttaccttcccttgacttacgcattgcgtcggagatcaggtcgagcgcaacgaggagcaccacgccgaagagcagagccagcagcgacatggcggtggaaatttgggcattggattggccgagctggtagagcgcgacctgcaggttcatacggccgagcagcgaggcgacggtgtattcaccgagtaccacggcgatggagatgaaggatgccgagaggatcgactgccacaggttcgggatgatcaccttgaagaacactttgggccaggaggcgccgagcgatcgggaggcttcgaccaacgtcttgacgtcgatggagttgaggcccacggcgatcgcgcggaaggcgaacggcatcacgagaatcacataggcgaagcacagccagatcgggttggtgctcaacacgtcggcggaaagccaacggtagatcggcccaagacccaccaccagcacgatggccggaatggtcagcggcagcgtggccacccattcgattgcacgctccaaggctttggagcgaatatgcacgatgaccatggtgggcaccagcaggatgagcatgatcacgacggtgacggcgctcaacgacagcgagatgccgacgccctgccatagcacgctcagatcggcgcccaacgattcgccgttgccggtgaaaatcgccgtccacggcgcggccgaccagcgaccggacaacgggtgacgcagggtgaagatgaacatggccagcagcggcacgaacaggaacgccagggtgacgaacaggatcacgaatttgatgatgctctgtttgcgcacgcgggcggcacgcagctgcggcggcttggttgtggaagtttcggtcattgccaacgtccggccctcttttccacggcgtggctcagcagcatgacgatggccacgacgatgatcattgcgaatgccagcacctgcgcgaagccctgctggttggggtccatctcattgcgcatggcaccttggatcatcaacggcaccagaatcgagcgctgcgagaacagggctgcggcggtcgcgtatgcggagaacgcggaggcgaacaacagcaggaacgccgagatgaagcggggtgcgaggatcgggcaggccacgcgcgtccagtattggacggtgttgccgccgagcgactcgcaggcttcgcgccactgtggacgaatggaatcgaccgcaggcaggaagatgatgatcatcagcggaatctggaagtagcagtagacggtcaccagccccggcagggagctgagccaattcgggttcacggtatagccagtcagggttttgatgagcatggtgccgatgccgttgatgccaagagtggcgatgaacgcgaacgcgagcatcacgccgccgaactgggcgagcaccgatgagatggcggcgaccatacggcgcagcggtccgttcggcttggcgccgatcaccagcgcgtaggaggcgagcgcgcccaccacggcaccgatcagggatgaggccacggacaccaggattgacgtgccgaacgcggcgatggtgttggcttcgaacatcttgtggaagttcgcaagcgtgaaaccgccgctgcgatcctggaacgcgccgatgatcacgatcacggtgggtgccagcaggaagcaggcggtgtaggcgaagaacgggagcgtggtggcgagcgtgccaagctcctgacggtgcttcgccagtgcggacgaagcgggggtcgatgcggcggacggacccgcggccttggaggcggcgggtccgttcggtgcgatgggtgcgattgcggcggtcatcgtggactctcagttgccgatcgtcttgtcccagttgttttgaagccactcggtgatgcgggtggagtcatcgttgctgtaggtgaccggctggccttcgatggtgatggcgtccttcagggtggcctggtcgacggtgccgtcggccttcatggagtcgagcagcaccgggttggcgccgcccttgaaccacaggttctgggtttcggcggtgtacaggtattcctcccacaggcgtgcggcggcggggtgcggcgcgtccttgttgatggcctggttgtagtagctgacgacctgagctttggggaaggtcttgtacttccagttcacgcccttggacttgagttccttcttgtaggaggcctggttgtaggcccagtcgaagaccacgccggtctggccggagtcgatggtgccgttggtcacatcgatggtgttcaggttgccggcttccttgagcttcttgaagaagtcgagaccgggctgcaggttgttgatgtcgccgccggcgagctggttgaccatcagatagccgttgaaggccgcgccggcctcggtaggcttgccgttcagggacacggtgccggcgaacttcggatcgagcaggtcgttcagggaggcgacatcgccgtacttgtcggcgttccagcccacggacatgatgccggtgtagtcggcgtagtaggcgccgtcgacgttcttggcagcatcagggatcttgttccaggcctgcaccttgtacggggcgaaatagtcggtggaggtggcggcgatggcctggccgacgtcgaagacatcgggggcggcgtcggtacccttgttggtcttggcggcgtcgatctcctccttggaggaggcgttcgggttcagctcggtgatcttgatctccgggtacttcttcttgaagccctcgatgacctcgccgtagttggaccaatcatgcggcaaggcgatgacgttcagcgcgccctcttccttggcggccgattccgcaccacacttacctcagcacgccctcaatcaatcgcgtgatgagttcggtgtagctcactccggtggcatcccaagccttgggatacatagaaatcggcgtgaagccgggcatggtgttgatttcgttgaccatcaccgtgccatcaggcgtcacgaaggtgtccacacggctcaagccggcaccatccacggccttgaacgcacgccgggccacgtcacgcacgtcctcaagcacgctgaccggcagattggccggcacttccacgtggctggcggaggcatccatgtacttggagtcgaaatcgtagaactggtcgtcgttctgatgatcgagcacgatttcgccgggccagctggcctcgggctcgtcaccggccttcgggcacagcacggcacattcgatttcgcgaccatcaatcccctgttcgacgagcaccttccaatcgtgctcgccggcggtggcgatggcggcggccagacgatcctgctgggtctcgcggtcatcggctttctcgaccttggtcacaccgaagctggagcctgcgcgcgaaggcttgatgaacagcggataggtaagaccggcgtcctcgatcttggcaagcacatcggcggcggtgaagttgcgcgcatcgaccgtcacaccgggcgcggtgggaatgccggcggcacccagcaccaccttggtgtaatgcttatccatgcaggcggcggaagcaaacactccgcaccccacgtacggcacacccatcatttccagcaggccttgaaccgtgccgtcctcgccataaggaccgtgcagcaccggcagtaccgcgtccacatggccaagggaggtcagcgcatggtgcatttccgggtcggacatgctgacgaagctggtgccgaagccggaatcggcggaattgatgcggctgggctcgccgatgaagaaaccgtcctggccgcgagaggggtcaagcatcaccgggcgcgatcccggggtgatctttacggtcggcagctcgccgccatccagattccagccacgaggatcttcgccgttgatgatccacttgccgtccttggtgatgccgaccggaatcggctcgaaccgttcagtgtccatggcccccagcacaccggcagtggagatgcaggaaatcgaatgctcgtctgcacgcccaccatagagcaccacaacacgcttcttggccataaccatccttttattgaaactacaaccgttttcaagcctatgctttgcaccgccaaccggaccgaaccgcgctcggaccgccgcgcacaagagacgcacaccagtctactcgcgcacgtcaacgacgtatacgccacacgactttgcacgtacaacgtatacgccacgtatacgtcgcttctctcgttattcgccggtaacctcgtgcccgaacagtccggcaagcatctccgagcaggaaatgccttcgttcagcacgcggctcatctgatacgccaacggggtcggcacatcaagctgctcgccaagagccaccaccgcatccgtggtgggcacgccttcggccacaccgttgctgaccttggtggcctcctcgaccgtcaatcccttgccgagattcgcgccgaacgtatagttacgagacagcggagagccacaggtggcgatgagatcgcctacaccggccaagccgaagaaggtcttgggatcggcgccagcggctgcgcccagcgcggtcagttcggccagtccacgagtttcgatcatggctgcggtgttctcaccgtagccggcaccacgggccatgcccacggccagcgcggtcacgttcttcaggctgccgcacatttccaggccgatgacgtcggtggtcacgaacggcttgaaataggaggtggtacatgcctcggccaccttcgtggcattatcgaggttcgtgcaagccaccacggtggcggcaggatgacgatcggcgatttccttggacaggttcggtccggaaatggcggcgaaccggtcggccggcaggtcaagggattcgcggacgacttcgtccatacgcttgttggtgccacgctcgatgcccttcatcaggctgacgacgatggcgtgatcgggaatcagtcccttgaattcgacgagtgccactcgcgcgaactgcgcggcgatggccacaaccacgatgtccgcgttcttgacggcttcggcgcgatccccggtggcggtcatgttgtccggcaacttttcgacggacggcaggcgcacggcgttgtggtggcgatcgcgaatgccctcgacaatccgctgctccttggcccacatggtcaccgtgttgccggcgtccgccagcacttggccgaaagcggtaccccatgctcctgcaccgagaaccgttatatttttacccatatcaaattcctaccttcgcttgtcgcgcaacttcatcggcacaatcttgtgccatgctactcgcctaggctccccgtacgggaaccggtgcggctacttctcagccgggaacgggccgccggcttcaggccaaggcttgcgactcatgctgcggtagtcccagtagccttcagcggggaactgctcgccacgaatttcctccagtactgtgttcatgcgtttgagcacgcgccacatcagctcgttcacggcctcggcaggcggctcttcaccccatgagtccatgtcggcaagcagatcggagtaatcgagcgcatggtcatagcacatcaccacgtttttgcgcggccatggccaccagtggttgatggaggcggcaccccacgtcaccgccgggtacagcggcacctgatgccccagtctgcgcgaggattcaagggcgatgtatcccacgccctccttaatgctcatcacccactttttcgggtcgcgggtcacggtgccttccggccagaccgtcagcgggcggccggacgtcagaatatcaatcgaggtctcttcgatctgcttggccttgcccgaatgacgctgcaccggctgcatgccgaccaaccggaaccacttgccgatcaatggccacttcgccatctcggccttggccatgtaccgggggcggcggcccatgtggaacaggctcatcatcggcacgaacacatcaaacatggtgatatgactggcggcggtgatgaacggtccggtttccggcacctgttccaagccccaggccttggtcttgcagctggcgcggaacacaatggacacccctcccagcagtcgtttggtggccttgggattctgggcgtcgatttccggctgattgggcgtgcgagggccggtcgggtaatactgtgtcgagtccacaagcgtgtggcgggcggccagacgcttgacctgctcatcactcagcgggcttacggccgaacgcggcgacggttttcctttggatgccatggtctctattgtggcacggaccaccgcccaacgattccagcgcaacattcccgggaatgtgccgcggaaccacacctcgcaccccacgcccagcgaaacattccccggaatgcgtcgcacaatacgcggcggcccgtctgcacacaccatgcgcgcagacgggccgccggggaaacgttcgaatcactccaccgcgatggcgtcaatctccacgagcgcacccttgggaatcatgttgttgccaaaggccacgcgggcgggcttgacggagccgatgaacgcctcagcgtaacgtgcgtccacttccttgaagtcctcgacgttcttcaggtagatggtggcgcggcacacatgctcaatgccggtaccggcagtgtcgagaatgtgcttaatattcttcagcgcctgtgcagcctgctctccagcggtctcgcccgccagttcgccggtggccggatcaatgcccagctggccggatacgaacacgaagccattggccttcaccgcctggctgtatgcgcccagcgcggccggcgcctcggaagtggctacggcttccatcttttcgctcatattgtgctccttctcatcttgggggcgcccacctgctgcggccggcgccggtacacatcaccaccggctacgaccaatcgcacgatcagcaacgattggcaatgccgattacgtagcagtctactgagcgaagtcgcgtttagcgcgcatgatgcccggcatacggccatcaacagactattccttgctattccagacgattccagacgattcgactaccgttctcgccaaaccgggcggtttttccacgacccaagcgagccggcatcaccgaccccgacaccagcaccagcaccagcaccagcaccagcaccagctttgcacgcgcttaatatcacgcgccgaatatgcaaaaggcttccggcggctagccgaaagccatgctggtgggcttgatggggatcgaacccacgaccttctgttccggagacagacgctctatccactgagctacaaacccgagcaacttctttactgtacaccacatcacgctgcatgaggcacatacgtcgccaaaataacgagaaaatcgccatcatcggctctacaatgaggttatgtcggaacctacagatgacttcgaatacgaacgccgcttcttctgccgcgagctgccggcggaatacgacgacggcgacgccccgaccctcattattcagagctactacgtgcatgccgacaattacgccttgcgcgtgcggctggtctcgcacaaggtgcacgtcgacatgacgcccgacgtaaatccggtggccgtgctggacgagtaccgcgaccggttctcggaagcgtatgtcaccgtcaaaggtccgtccgtgggtggcacgcgctacgaggtcgagcgcgagatcgacacgcgcatcgccgccgaactcatcaagcgcggcggctcggtaatcatcaagaaccggtattccgtgtggattgcggaagacggctggagcgtggacgtgttcggcgggccgaacgcgccgctgatcgtagccgaggccgaacgatccgggccggttaccaatctgacgattccgaaattctgcatcaccgaaatcaccgatcaggcgcgattcaataacgatggtctcgccaaccgtccgttctgcaagtgggcggatgatttcgaggaggaactggcgctggaggggccaaggttccagcaatatttcgggaagaatcggatggtttaggggaagcagtcaagtacgctcgcgcgctcctctcagtcatctacgcctgacagctcctctcaaagaggggagtcaaaaccaatcagtacatgagggtggctaggcgacggcgggcgcgagccagacgcgggtcggtgggttcggggatggcgaagtattcgagcagacgcttgcgaaccggctcgatatcggccttgtgcccggcggccaaaaagtccagcaaacggtcgaaagcgtcttgaatctggccaccgatcatgtcgatatcagccacagccaactgcgcttccacatcgtccggcgctgcggcggcagcggcacgcacgtcacgtacatcagcggacccggagcgggccagcaacagcgccttcgcacgttcgcgggcggccagtgcatcggacgggtcggattcgagcacgcgctcgtattcggcggcggcaccggcgtaatcgccctcctcggccaaacgatgggcttcggcatgctccggcggcacctgctcagcacccacgccggcaccggtggcaccagcgctcttggcggcatcggaatcaggatcacccgagtacggcgcggtaccgttcacaccagactgcgcggcggcctgaatgatcttcggaatcacctcgtcggtaagttgcttgagctcgtcgtcacccggaagaccctgcaacagtggcatcggacgaccggcaatcaacgcgaacagtgcgggcgcgccctgcacctgcaacgcttgggcaatcgaaggattggacgagatatcgatacgggagagctgaatctggccgttcagggcgttcaccgcgtcgcccaacgcacgggccatcgggaacaggcggtcatcggtcggtatccacaggagcagcaggatcgggaaggtcgcagaagtctgcaccattgcctggaaggtgttttcggtggtgtcgatcacgtacccaccagcggcaggagcgccacccgcctggccgggctcggccttgacctgatgcttcagcgcctccaaatcgacggcgcccgccaatgagactcccggattgaactgctgctctgccataatgcctcccgattccacgcgattcgcgtacaacaacaatcacatttgctgacattgattgtaatgccgattcccaccacgtagggattcttccactacgcggtgaaattcccaccacgtagcaaaacgcccaccacgatgtgactcaaaacggcaccattgtgcgaaaggtaaaacttaccgacatcgtggtggatgaatcatatcgtggtggggcgttaaccgcgcggtgggcggcggcaacaactacagcgcttcgacctttaccggctgacggtcggcacccacggcggtgatttgctcaccggagcttgccaacggaatgtacaaggccaccacgttcacatacgtgaccttcatggtgctggtgtacttgtcgctattgaacagcgccttctcgtcgtcggaagccggctgcgattcgcggccatcccccgccttgcgagtccattcgccgttaatacggccaaccaccaaatcaccggcaccgtctgcagcacgcatcacccacatctgttcaggcacaacggtgaatttctgctcctgcgtaccgttgttgcgttgcataccttcctgcaccttggccgtggtattggccagttcctggcgcagcaaatcgtctgcgaacttggaagcgtattggctcttggagccgttctgcagcacatcggcgtattgggtcaaggcatcggcgggagtggccaccagcttctcatcctttgcagtgcccatctgcgagccaatagtcggaatctcgaacttcggcagcttggccccttcaaacagtcgagccatggccatcagcttgtaattctgctgggcggattcctgatcgaagaccagcaaacgcttggactgctgatcttcggtggtggtcgtgatggtgaacaccgagcgaggccatccgtcgtccatgggaatcaccgtctgggcgatgtccttgggaatggtcgcgtatttggacataccgccgccgcgctggttgatcgtggtctggctgatgcgaatgtccagctggggcccgcccataacggccgcatatccatcgggattcttggcctgatcggcttcatcgatcgtcttgagaatcttcaggcgaatcttcttctcctgtgcctcggtcaaatccggcgcaaccttggtggaggtatcagcagccggcgtcggcagccggccttcacaggcggtcaacggcacgaccaacgccacgcaggcgagggcggccacacacagtttgttccatcgcttgttcatcagctttcctcctgtccgtcatcggccgagtcgtctccggtattgacctcttgggccaagcgggagaagtaggcctgcagttcgtcaggggtgattaccgaagtcgattcgttatcgccggcgctgaagccggtctcagcgccgctctcggcaccagtctgctggtcggcgaccaggttacgtgaacttgggtcgatgataaccggtgtttcggtggcttcagattgcgaggacgcacggcccgaacgccgatttgtggcgtggcggcgacgattacgtcgacttgcaccatccggcttcccggacactgcgatgctggcgggtgcctcttcctcaattacggcgcttgccgtgccttccaccatgcgcttgcggcgcttatgcggcggcatggcgaacacggaggcgcacaatacggccagcacggccagcaatccaccggacagatagaacggcatcgcaaagtccggcacttcggagcgcacccagtgcagctgcaccttggcgttggtggcattttcacccaaatccacaatggccaccgtcgaggcgccggtcttcttgctctccagcgaaacggacccggtgccgcatttcacggcagtccacatatcggaatccttgaacgccaccgcgtcatcggcactggcaggcgctccctgactcgtgctgcttcccttctgggtgctcagctcgctccatgacgccaatccggtgatacgggtataggacttctcggacgcgacccatccggcaacatccttggacggacccaacgccacgcacgcctcgtcctgagaggatcccgagtccacggttatcgtggcgttctgatccaacaaggtcagcacattcggatcagtgacggcataccgggagccgctcatggttgcggaagcggtgatttcagtggagggcttccatatcgtggcattcatgtaccccaacaccacagccgccacggccaatagaccgaagataggcgtcaccactccacgcatgatcttggcatgacgggatggacgcttggcgcccttatccggtcttgtagtctgttcttcagcactcataacttaaccattctacaatcttcacctgtttattacctaggagcgcagaaaatcaaggttcaccagtagggtggtgtgtcatgcgtaagtctgttaaatctatgttatcccctctcggcaaggccgttgctcttgcctgctcgctggcgatgtgcgtatcgctggctgcctgctccagttcgagctcggactcgaaatcctcttccggctcttctgacaagaaggggcaaattgccggcgtgaccgccaagggcaagctcggcgagaagccgaccatctcctttaatacgccgatgaccgtgtccgacggctcctatgtggtgctgcaaaagggcgatggcgacgtaatcgaggagggcgaccgcgtctgcgcccaaggcatcgcgctcaacgttaaagacggcaccgagctcatggacacctggaccaagaacacgccggattgctcgctgaaggtggattccaagaccctctcctcgacctactacaaccagatcaagggcgccaagatcaacaccacgatcggctttggcgtcaacgctcaggattcgtccggatactcttacattttggcgatgacgtttgtatccaagtccaaggacctgaagaaggccactggcgaggaagtcaaggatgtgccggccaatctgccgaaggtgacgcgagccaagaatggcaagccgtccattgacatgaacggtcagggttcggttgattcgctgatctcgcagacgctgatcaagggtaacggcgccaagctgaccgacaagaacaccgtggtggtcaagtacaccggttggcttacggatggcaagcagttcgattcgtcctgggatcgcgattccacaatcgacgccgatctgttcagcgattccagcggccagcatcaggttatcgagggctggcagaagggtctggtcggccagaccgtcggctctcaggttctgctggtgattccgccggatcaggcctatggagataaggagcaaggttcgattcccgccaactccacgttggtcttcgtaatcgatattctcgccgcgtactaaacaatctcgatggctctccccaagaggggagctggcagcgaaactgactgaggggaggcctcacggaatataccgtgaggcctcccctcagtctctctatgtacgttcgaaaactccccttcaagagggaagccaagaacaatcagaacagcctgagactgtcgtcctcggtgcctttcatatcgtcgtaatcgaggatgaggcaggtgaagccgcggtccttggccaagacctgggcttgcggcgtgatggtttgtgcggcgaagatgccatgcaccggggccagcagcggatcgcgattgagcagttcgcagtagcgagtcaactgctcgacgccatcaatgccgccgtgacgtttgatttccacagccacatgctcgccctcggcattcacggccatgatatccaccggaccaatggcggtagggtattcgcgacgcaccagcttggctcccttgccgatacgctcgatctgctcggccagatagcgttgcagatggtcttccacgccatccttgatgagacccggatcttcgcccagatcataggtttggtcggaatagatgtgttgcagcgtcacttcaagaatgtcagagcccttgtcggcgctgacacgtagcaccttttccggcccaccagcggcgacactttccggggaatgcgtcgcggaatcaccatccacagccccaccagcgacactttcccgggaatgttgcgcggatttggcggctgggtcgatctcacgaatcgtgcagggcgcggtcatccagttcagcggcttgtaggagcccaattcggagaaaatcaacaggctggaatcagccttgatcagcaatacacgcttggccaggggcagtgaggcgttgaggcggcccgaatactcggccgaacagtcggcaacaataactcgcataggccaccactgtagcgcaacacatggcatacatagcaaaaggggctctctggaaaaccagagagccccttgaggagttggttcagatcactcggcggtgccggagtactggacgtcgtggccgcgctcgaccgccacggtgagtttgttcgagtcgaaggagatgaatccgtcggtcacctcgaacatgtggcgatcgccatcgggctcaaccacggtgagcgtaccctgcttgatcaccgtgagcacaggctcatggtcgggcaggatgcccatgccgccctcagaggcgggaatggtcacgctcgtcgcctcgccgtgccacacagggtggtcagcggcgacgatgttgaccttcatcgtggttttttccgcagccatcacgcacccagttccttctgcatgttgtgccacttctcttcgagatcatcgatgccgccgataccggagaacgcctgctccgggacgtcgtcgtacacgccgtcgcagatgcgggtgaaggcttcgatggtctcgtcggccggcacgtaggagccggggcgaccggtgaacttctcggcaacgtagaagttctggccgaggaactgctcgatcttacgagcgcggttcacggtggtcttgtcctcttcgccgagctcgtcgataccgatcaaggcgatgatgtcctgcagctccttgttacgctgcagaatcgccttgacgcggttggcgcagtcgtagtgagcctggcccacgtaacgcggatcgaggattcgcgaggtggagctcagcgggtccacagccgggtagatacccttggaggcaatgtcacgagacagctcggtggttgcatccaagtgggcgaaggtcgtggccggggccgggtcggtgtaatcatcggccggcacgtagatggcctgcagcgaggtgatcgagtgaccacgggtcgaggtgatgcgctcctggagggaacccatctcatcggccaggttcggctggtaacccacggcggaaggcatacgacccagcagggtggacacctcggaaccggcctgggtgaagcggaagatgttgtcgatgaacagcagcacgtcctggttctgcacgtcacggaagtactctgccatggtcagtgcggtcagcgggacacgcagacgggtacccggctgctcatccatctggccgaagaccagtgcggtcttctcaagcacgccggcctcggccatttcgccgatcagatcgttaccctcacgggtacgctcgccgacgcccgcgaacacggacacgccaccgtggttctgagccacgcgctgaatcatttcctgaatcagcacggtcttgcccacacctgcaccaccgaacagaccgatcttgccgccctgcacgtacggggtcaacaggtcgatgaccttgatgcccgtttcgaacatctgggtcttggactccagctgatcgaaggccggcgggttgcggtggataggccaacgctcggagacggtgatggtctcatccggcttcttgttgaggatgttaccggacacgtcgaagacgtggcccttggtcacgtcgccgaccggcacggagatcggggcgccggtgtcggagacggaggcaccacggaccaggccgtcggtgggcttcagagcgacgcaacggaccgtggaatcaccgaggtgctgttcgacctcgagggtgatctcggtctccttcgcctcgccttcttccttggcaccggtgttgacgatcgttactttcagggcgttgtagatgtcgggcagatgacccaccgggaattcaacgtcgataaccgagccctggacgcgggtgacgcgaccgttggtaggctcggccgcagtggtctggttgtcagccatatgcgttcctactcttccttcttggtcagcgcgtcagcgctgccgatgatttcggtaagttcctgggtgatcgaggcctggcgggaagcgttgagcttgcgcgtaaggtcgtcgatcaggtttcgtgcgttgtcggttgccgtgtgcatggcgttctggcggcttgcggtttccgacgcggccgcggtcagcaggcactcgtggatgcgggactgaatgtacttcggcagaatcgcgtccagtaccttttcgaggctgggctcgaaagtgtacagcggagcgacatccgcagtagccggtgcctcttcatcaggatcgggcaccttggtctcgtttttcacgatttcgaccggcagcatgcgcagcacgcgcaccttttgcaccaccatgttgatgaactcggtgtagacgatgtagagttcggaaactccacctttctcagccggcttcatgtaggcgtccatcaaagtgttggagatcgtttcagcaatttccacgccgggctggtcggtgtcgccttcccacgtcgccgcgatgtcacgattacggtacttgtagtacgtcgaaccgcgacgcccgtacacgaacagctccggctgcttgcctgccgcatcgaggcgggacagcagcgactccgtttcacggataatcgaagaggtgtacgggccggccataccacgatccgaggtgagggcgagaacagccacgcgcgggttcttctcgtccttcaccgcgatcggatgcgtgatatgggtgtgggccaccaacgcttgcacggcatcgaaaatcgcatcggtgtacggcttcgcgttcagggccacatcacgggccttggcgatatgcgaagacgcgatcatctcctgagcgttgaagatcttcgccaacgactcggtggagtggatgcgtgatttcaatgcgagttgcgagcccatggcttacttttctcccgccacgatcttttcctgatcaaccggcgcggccttgtcaacgtccggcttcttctcgaccagcggcttgccggcggaagagacgaacgtcgaacggaactcgtccacggccttatcgagggcagcctcggtgtcggcggtgaattcctcggtctcgcgaatggtcttgaggatatcggtgttgtggtcgatgtagtccagcagtccctgctcgaacggaaggacgtccttcaggtcgaggtcgtcgagcttgccgtgggtgccggtccatacggacacgacttcctgttccggcgagtacgggtggaactgcggctgcttcaacagctcggtcaggtgggcaccacgggtcagctgggccttggaagccgcatccagatcggaggcgaacatggcgaaggattccagcgaacggtactgtgccagggagatcttcaacgtaccggagaccttcttcagagccttggtctgtgcggcgccaccgactcgagagacggagataccgacgtccacggcggggcgctggttggcgttgaacagatcggactgcaggaagatctggccgtcagtgatggagatcacgttggtcgggatgtaggcggacacatcgttcgccttggtctcgacgatcggcagacccgtcatcgaaccgccgcccaggtcatcggagaccttggcgcaacgttcgagcaggcgggagtgcaggtagaacacatcacccgggtaggcttcacgccccggcgggcggcgcagcagcagggaaatcgaacgataggcctctgcctgcttggacaagtcatcgaagacgatgagcacatgcttgccgttgtacatccagtgctggccgatggccgagccggtgtacggggcgatgtacttgaagccagcggaatcggctgccggggaggccacgatggtggtgtactccatggcgccggcgtcttccaggctctgcttcaccgaggcgatggtggagcccttctggccgatggccacgtagatgcagcggacctgcttcttcgggtcgccggattcccagttggccttctggttgatgatggtatcgatcgcgatggcggtcttaccggtctggcggtcgccgatgatgagctggcgctggccgcggccgatcggggtcatcgcgtcgatggccttgaggccggtggacagcggctcgtcgaccgggtggcggtgcatcacgtcgggggcctgggcttcgaggatacgacgaccctcaatgccctggatctcgccgaggccgtcgatcggcttgcccagcgggtccacgacacggccgagatagccgtcgccgacgggcacggagagcacttcgccggtgcgtcgcacttcctggccttcctcaattcctgcgaaatcgccgaggaccaccacgccgatctcacgggcgtcaaggttgaacgccaggccgagcgtgccgtcttcgaacgtcagcagctcattggccatgcaaccaggcaatcccgtcacgtgcgcaatgccgtcaccggccgtggcgacatagcccacttcctgggtgggggtgtcgctcggcttgtacgacgacacgaagtcgtcgagggccttgcgaatcgaggcgggatcgatggtcagttctgccatgatcactccttctattggttattgttcagtcaagtctttgcttgtgtgtggtgttggacggattggctcggccggtcaggccggagtcgcctccgtctgcaccttgcgatgcaggttctgcagctgtgcgaccacggtgttgtccgtgacttcgtcgcccacctgaatgcgcatgccacccagtacggtcggatcgaccaccgagttgatgtgcacctggcggcccaccttggcggagtagacctcgaccagtcgctcaatctgctccttcttcagcggggtggcggtggtcacggtgaccatcgactcgcccatgtggcgggagaacttgttgatcagccactggatggtctccaagtagcgg

SEQ ID NO: 679 - DNA, 10356 bp, Unknown
  R14_15m  MAG No. k141_21419
aatgtaacgaacctacggtaattctacgccgagcgggttttcatcacaggcgagtcggtcccagagtttaaaaccctatctcgccttcaaggggctgatttggccttctggagacatctatctccgtttcaaggggctgttcatccgtcatatcccgagtatgagcggcatcaccccaacgtcattccgccattttcatgctgcttctacttgggcatcagcccctcgaaacggaagtagatctctggaaaccacgacatcagccccttgaagcggagatagcatccatttaggcccagattgcccgttacagcatcgggtaatacttaccgtgatcgattttggcggcgatatcacgtaattcggcagcatctcggcggtcttcttcattaccttgcgacaacttgttcgctttactgtccagatgatgctcgatgccgaagtaactgcatatccccacgagcgcaaatagcactataccaactaaccagttcatagcacgctccttgccaaagcttctgccttaatatggtactgctgttcatggatcgtaataaaaaaagcgggctcgcaagcccgcttttggttttaggttgaagacgatcaggcgccgtattcctcaaggtaggcggcggcgcgctgctggatatcgtggctgagcaacggggtgccgtcggggttcttcatcttggcggcggcgtcgaagatctcgcgcacgttggcgatggagagcaccgggaagccgaattcggcttccacggccttcacggcggacaggtcggagtccttggtcttctccatgcggtccacggagagcacgagacccacgacctcgacgttcgcctcggccttgagcttggggatgacttcgcgcacggcggtgccggcggtcatcacgtcgtccacgagcagcaccttcatgccgtcggtcagcggggtgccgaccatccagccgccgtcgccgtggtccttcttctccttgcggtcgaaggtgtatccaacggtcatgttgtggccggcgttcagcgcgatcgcggtggacacggccagcggaatgcccttgtaggcggggccgaacacggtgtcgatgttgcggggaatcgtgttgtgcacgatggcctggctaatcttttcggcgtagaacgtgccgagcgcggcgatcttcttgccgtcgtcgaaggcgccggcgttgatgaagtacgggctcttgcggccggacttcagcgtgaagtcgccgaacttcagcgcgttggattccaacaggaattcagtgaagcgatgtgcgagtgtttctgccatgatgttccttacctccaagtctgtcctgcggccagtttagcagcgagttcgggacggctgtccagcaggtcgtcaagttcgcgggcgacgcgcagcggggccaccgggtcgaagagcgcggccgcacccacttcgacggcgttcgcgccggcgtacaggtattcgagcgccttctcaccactgtcgatgccgccgagtccgatgatcggaatctccggcagtgcggtgcgcacccgatagacggctgccaggccgaccggcagcacggccgggccggatacgccgccggtgacgttggcgatgatcggctggcctgtgcgaatgttgatgcgcatacctttgagcgtgttgatcatgctcaacgcgtcggcgccgtgttccacggccgcgcgcgccggcacggtgatgtcggtgacgttcggcgtgagtttgacgatcatcggcttgtcggtcatcgggcgcagccggtccataagattggcgagggccaccgggtcggtgcccacgctcatgccgccggcggaaacgttcgggcagctgacgttgatttccagcatgtccgcgtcggagtcggcgagcttttccacgaccgccgcgtaatcgtcgtcgcaatgtccggcgacattggagatgacgaacgcgcccgcggccttgagcttgggcaggtcttcggccaagtaatggtcgatgccggggttctgcaggcccacagcgttgatgttcgcggccggcgattcggcggtgcgcggcgaggggttgccctcccacggcacgggcgaggcgcccttggtgcatacggcgccgagctggctgacgtcgtagaaccagcgtacggcggcgtactggaaggtgccggaggcggtgccgaccggattcttccattccagaccggccaccttggtgtggtgcttccacacgtggggctcgtacaggttgatgtggttgtcgctgccctgcgcggactggttgtttgcgctcatcgtcactccccccatccgagctgttcgcgagtgaacacgggtccgtcggagcagaccttgaggcggccgtccacggtgtcgatggtgcacagcacgcaggtgccgtagccgcagcccatgcgctgttccatgctcagctgcgcggggatgccgcgttcggcggcccaagcggccacggccttcatcataggcagcggtccgcaggacaagatgatcggcttgcgatcgtaggccttcaggtcgtcgccttgttcgagtttgttgagcaggtcgaccacgttgccttcggcgtcgtcgatgctccacgaccagtccgcgtaccgggagacgtattcctcagcgaagtggtcgttgcggtagccgaatacggcggtggcaaaggaggcgtcgtgttcggcgagcttttgcgcggcgtagattagcgggggcacgccgagtccgccgccgacgagaatgtagttggcgtcttccttgaggttgaagccgcggccgagcgggccgagcacgtcgacggtgtcgccggcctgcagccctgccaactgttcggtgccgtggcccacgacggcgaagatcacgctgacttcgtcgccgtcgacttcgctgacgccgaacggacgcggcatgagcatgaagtcgtcgtgcgtgaacaggttgacgaactgggcgggcttggcgtgggaggcgatgaacgggtcgcggaatgtcagtcgtatcacgcggtcggtcagttccgtgacctgcgtgatttcgacgttgtggcgcggcgggaagaatccggccgcagtcgcctccgcaaccacatcatgggtgggggtgaaagttgtcatttcattcctattcagcacatcaagctcccccctatcaggggagctgtcaaccgcaggttgactgaggggtagttaaacacactcggctccggtttccagcccacactcacgtatagcccacagccggacaatctacctacctatatacggcaacccgcagattatcgcgcatgtcgagcgccgcctggcgcgcgctgctcgccacaaggtccagcgcctcgtcggcggtcatggattcggagtacttgccgctcttcttccatgcgccgatgatgccgcgcgacgagttgacgatggcgccgctgccctgcttgtcgaacatgcctgccacgtccgcggccgtgccgccctgcgcaccgtagcccggcacgaggaagaacgtgtgcggcatacgttcacgcaacgccttgccttcctcggggtgggtggcaccgaccaccgcgcccacgcgggagtagccgtggctgccgatggtctcggcgccccagccttccacgagatcggccacatgctcgtagaccttcgtgccgtcggccaggtcgagcatctgcagttcgctggaggacgggttggaggtgcgcacgagcacgaagatgtccttgtcggcttcggcggcggcctcgacgaacggggtgatgccgtcggtgccgagatacgggttgacggtcaccgcatcctcatgccacgggtcgaagtcgcccacgccgttcaggtggtgggcgtaggcggctgcagtggagccgatgtcgccgcgtttgatgtcgccgagcacgtagaggccctgctgggccgcgtattcacaggtcatcgtgtagatgtccacgccggcggggccgagcgcctcgtacatggcgatctgcggtttgacggcgggcacgatgtcggcgatggcgtcgatgatcgtgcggttgtattcgaagtaggcgacggccagctgcgcggattcgatttcctccggggattcgaccgagtcacgcacctcgtcggcaaagctcgccacgacctgcggcggtaccaacgcctcggtggggtcgaggcccacgacgctggggttctgagtgttgtcaatcgcttcgatcaggcgatccatgctgctccttatgttatctacagacggctgaacatcagctgggagccgatgatcgtggcgagggggcgtccggtgacctgccagccgccgaacggggtgttacgagccctggagtggaactgttcagggtccacggtccattcctcagcggtgttgagcaccacgaggtcgacattgtcggcgtcatccacgcggctcaggtcgagcagtcggttgacgccttcacgctgcggctgagcgtcgctctcccccgcaatcacgccatccggatcatccccagtgggcgcgggttcggcgtagtcctcgaccagcgcggccacgtcggttggcacatgccccatgagttcggcgggtcccacggacatgagctcgatcagacgctcatcggaaatgaagccgccgtcgacgagcaccttgtggcacacgccgtacgcgcattccagtccgatgatgccgttgggcgcctcaaggaagccgagttccttctctgccaacgtgtgcggcgcatggtcggtggccagcagatccacggtgccgtcggcgatggccgcgatggtggctttgcggtccgcttcggagcgcagcggcggattcatcttggcgagcgtgccgtacttgagcagcgcctcgtcgctcaacgccagatagtgcggcgcggtctcgcaggtgattggcaatccttcggccttggccttgcgaatcgcctcgaacgagatggcagtgctcacatgctggaagtgtacgtggacaccagtgaggcgggccgcttctatatcgcgggccacgatcttgagctcggtgtcttccggaatgccgggcacgccaagttcgcgcgagaccgggccttcgttcacggcacctgtatcgtgatgctcgcaatgctcgattaggtacaggtcggaggccttgacgttctccagcacctggtccaggatctccggcgtcacagcggaaccgtcgtcgctaattgcggtgatggggtgcgtgagcatggccggcgtcttggcgtcgtcctcgaatccgggcacgtacctgagccagtcggcaacgtcgcttgcctcatgaccggcgcgatccttggacgcgcacacgcacagatcgtaacgaaccggcaattgaacatcgtgcgcagtatcgtactgctgcaggaagtcgatgacgttgtcgaagccggcatccagaacctctttcgcaccggccgcttccaggtcagacacggtctgcccatccagtgccggcaacgtgttcggcatgatgagcacgttcgtgtatccgccggatgcggacgcgcggcagccggagaccatagattccttgtaggtctggccgggatcgcggaagtggacgtgcgggtcttcgaaaccgggggccacggtcagtccggtggcgtcgatatcggcaccgtcagccacggcggaggtgtcggcgaagtaggcggcagcggtcccgggcaccacgaggtcgatgacttcgccggtgttccagaccttgatgttgcgtagggtgatgctcacagtttggcttcctcgtcgcagtagtcgcagcggtattcgagccgttcagagtgcacgaggtggaacatctgcttgatgccgggctcggtggtggtcacgcagcgcgggttcacgcaggagatcacgccgacgatgtgctcgggcaggttcggctgcttcttttcgacgatcttgccgccgcgcaccacgtctacggtggcctggcaggccacgaagccgagcacgtcgaggtcgatgtccttgtcatcctcgattttgatgatgtccttggagccgtaacgcttggagttggcgttcatgatgagcgcaagcttggttttggccgggtcgattttcaggtattcgagaaccttcagcgaggttccggccggcacatggtcgatgatgatgccgttctgaatgctggtgacttccatcaggcctgaacctccttggggttgagcggttcgtatccgggcagttcgtcgcccaccacggtgctttcgagggccatgcgcacgagcatgccgttcttgacctgttcgaagtaggcggcacgcgggtcgtcgtccacgtccacggagatttcgttgacgcgcggcagcgggtgaagtacggccatggacggcttggcgagctgcagcttttcttcgtcgagaatgtaggtgtcgcgcaggcgcaggtagtcgtcttcgttgaagaagcgttccttctgcacgcgggtcatgtacagcacgtcgaggtcgccgatcacggaggccaggtcgcgcacttccacgtaggagcagttgtcggtggcgttgatgcggtcgatcacgtactgcggggtcttgagctcgtccgggctgataagcacgaagcgcacgttgccgaagcggcacagggtctcgatcagggagtgcacggtgcggccgaaggtcaaatcgccgcacagtcccacggtcaggtcggtgatgcggccgaagcgcgactgcagcgtggccaggtcggccagcgtctgcgtgggatgcatgtggccgccgtcgccggcgttgatcaccggcacggatgcggcgcgggaggccaccagcgcggcaccctccttcgggtgacggatggcgaccacgtccacgtagttggacacggtcttcaacgtgtcggcgatggattcgcccttggtcacggaggccagctgcgcgccggcgaatccgatgaccttgccgccgagacgcagcattgccgtctcaaagctcaggcgcgtacgggtggagggctcgtagaacagcgtggccagcactcgcccatcgcaggtatgggcaacctctttgcggtgggaatcgatgtattcggccttatgcagcaggtcgagaatctggtttgtagacaggccgtccagcgttacgacgcttttgccgaccattggcgtttcttcagacaaggctcaccttttcgctcgtggttttcaggtggccacccttgtgtgacctaatataacttacgccatttttcggacagccgcattcaccgagtgttcacctgaaaatccaacgaatatgctgtgtctgtatagctgatatctgctttggaacgccagagctcattcattaggtcgatttgacgttcattaggtcactgcaccctcgtatctgttgttggaatgccgccattccaacaaggtatgcggcggcggaccgacctaatgaacgatgaatcgacctaatgaacgtagtgaacgcaatacaagaaaggtctatcgctgcgcgcggcgtcggttccgctccagtcgcggtgcgatcacgtgcatacgcgggcgaggcgcggtttgcggctgctgcgttgcggcggaggccgtggcggtggttgccgcagtcgcctcgtcttcggtctgcccgtagaacaggcgctggcatacgtcacggcatttgcgcatcacggccagcaggtcgttctcgaaatgctggccgcggtgggcgccgtagccgaggtagacggcgatgccacccagcgaatagatgtcatcaggcagaatatcggcctggttggcgcgcccgctccacagatagttgccgttgcgggccgcggtgcacaacgtccatgccttgcgcagctgaatcgcatcgatagcgctgatgagcttcttggcctccagcacgtccaatgcctccaatgtgccgttgacgcgcagatctttgatatcgccggcgtgctggagctgcatgagttgcacggtccattccacgtcagacagaccgcccttgccgagcttcagatgacgttctcgacgcacgccgcgcggcagacgctcggcctccatacgggccttgagcttgcggatgttctgcaattcggcctcggtcagctccgtggtcgggtagcgcaacgggtcggcgatgttgatcaggaagtcccgcgccagttcggcgtcgccggccgcgtaccgggcgcgcagcagcgcctggcgctcccaggtcgaggcccaggattcgtagtattcctcgcaggaggcgtaggagcgcacgagcgggccgttcttgccttccgggcgcaggtccaggtcgagttcgatcttgggttccagcgtcgtcgggccttgcaggatgttgcgcaggtcttccacgaccttcttggcgaaggcgttggcttggccgtcgtcggcatcgtcggccggacggtagatgagaatggcatccgcatcggagctgaagttcacttcgcgcccgccgtaacggcccatggcgatgacggtgatgccggccggcgcggtttcgacgccgaacgcggcgatctggtggcgcacggcccaggtcagtgaggcgtcgatgatcgcgtcatacacgtcggtcatggccttgagactgtcggagtcgctgatcacaccgctcatccaagacaggccgatgcgttcgatttcgtggcggcgcatggcgcgcatggaggtggcgaattcgttgatgttcgagccgaaacgttccagcgccgagccggtctgcacatccaatgcctcgcgcgtgcgggcctgcagattgccgtcatcaccgagccaactgatcgattcgaccgacttgttgagcgcgtcgcccaggaatcgcgagttggacaggatgtggcacagacgctgggcagcggaggtggagtcgcgcaggaagccgaggtagccggattcggtgccgaagttctcctccagcttgcgccagttgagcaggcccatgtccgggttctggccctcgcccagccactgcaagacggcgggcaggatgatgcggttgattttggccgcgcgccccacgccggcagtgagcgcctgcacgtggcggatggcggcgtccgggtcgccgaagccgatggattcgaatcgttcctgtgcggcctcgacgctcagcacgatctggtcgttctccatctgggcgttgaccggcagcatcgggcgatagtagatgtcgaggtgcaggtggcgtacttcgcgacgggtgtcgtcgtatttgtcgacgagttcttccgggtgcaggccgaatgcgcgggcgaggcgacgcagctcctggttctggttgagctcatccacgtcgatgtcgcgcttcttttcgaggcctccgaccgaggcccggccgaggtccgggaacaggtgcgtgcgcttcagggaccagatctgctggcgatgctccatcacgcgctcgaagcggtagtcctgggacatgcgcacggcctgtttgcgcgagacgtagccgccttcggacaggcgctgcagcgagtcgagcgtgttgctggtgcgcagcgattcatcggtacggccgtgcacaagctgaagcatctgcacggtgaattccacatcgcgcagaccaccgcggccgagcttgatttcgcgatccttcagaggtgcgggaatcagatcttccacgcgcttgcgcattttctggcagtcgtagacgaagttcttacgcttggacgcgctccacacgaacggccgagtcatatccatgtaggcccggccgaggtcggggtcgccagccaccgggcgggccttgagcaacgcctggaactcccagttctcggcccactgctcgtagtagttcttgtgcgaggagagcacgcgcaccagcgcgccgtccttgccttccgggcgcaggccgccgtcgatctgccacagcggctgctcggccacgcccatgatggcggactggcagacacgctgcagcatggtgcccatcttggtgcccacgcggatcagcgtctgatggtccacgtccttgtcggccggttcgaccacgtagatgaggtccacgtcggagacgtagttcagttcctgtgcgccgagtttgcccatgccgatgatggtgaagcgcacgtgctcgctgccctcggtttcgtggcgggcgatggccagcgcgccttcgagcgccgcgtccgcgaggtcggacagttcgcggctgatggtcggttggatggaggccgggtcgtccgccacggcatcctgggcgatgatggcggccagttggttccggtagctggaacgcaaggccgtggccgcttcggccagatccttggaggcgacaggcatggccggttcgtccgggtccgcgccgaccgccttgagcagacgtgcacggcgttgcgcgtgattgaacagatggctgttgcagttgtcgactgctgcggcctccacaagctgcggcttgaagcgcatgaacttgccc

SEQ ID NO: 680 - DNA, 41873 bp, Unknown
  R14_15m  MAG No. k141_22135
aaccctcccgggtacccgaccaccacgacaggcaatcaggcgaggaatgaactggcaatcattgactataaagaagtagtacaaacacgctcttgagttctcaaaccaccaccacaccagcaagacaggaaaccaaccagaggaaggaacccgccgcgctgagcggcaacaggtgaataacttacacgcatgtccggattcacgcaaatcaaggcgcacaaaaaccccaggaatcggcataacagcgcggttccctcggcgtgtcgcacagagcccactttgctctgatgaggctaggttaacccctcaaatgtttctgaaaagcatcaaatccactattcggctggcgtgtcgcgagagttttcagcttgtcggccctgcgttcatctctcggcaaccacactgccggcgcacaatcggcgcatgacagcgctccgtcatcggatttcgttcatgaatcgcgggtatacctgtagttatgaccaagaagattgctgtattaaccggggcgggcatttccacgtccgccggcatccctgatttccgcggtccggacggtgtgtggaccaagcatcctgaccaaatgagcgtttacgacatcgatctgtttctgcgtaacaaagaagaccgtgagtactcctggcgctggcagaaggaatcaccagtatggaacgcacagcccggcaccgcgcataaggcgctggtcaagctggaacaagccggcatgctgacgctgctggccacgcagaacttcgatgcgctgcatgagaaggccggcaacagcgacagcgtcatcgtgaacctgcacggcaccatcggcacctcgcattgcatgaagtgccatcaggaatatgccacggcggacatcatggcccgtttggatgaagaacccgatccacattgccatcgcaaactgaagtatcgtggcgatatgccatgcaatggcattatcaaaactgatgtggtgtatttcggtgaggcactgccggacggagcgatggagaagtcgtacagcttggccaccaaagccgacgaactatgggtaatcggatcgacccttgaggtgtacccggcagcgagcattgtgccggtggccgcgcaggcgggcgtgcccatcaccatcatgaatatgggtcacacgcaatatgaccatcttgcgagccgcttgattcatgaggatatcgccgtcgcgctgccgaagttggtggacgagacgattgcggagaacaagtagtcctcagcataacgaaagcgccggtgggtggttaagcaactgatgattgttggttaaccacccaccggcgctttcgcgccacctcccgctagcgggaggtattggagcacacttctgcgcggcctcccgccagcggtattggaatcagtagatgcgcttgggctggaatccagcttccctgagtgccacgaggatgcggtcgatgtgctcggggccgttggtctcgaccgtgacgccgagagacaccgcgttggtgtagtggccggatgccttgaactggtcgtggtcaagctgaatgacgttggcgcgctgctcggcaagcagggtggccaccttgacgagctggcccggagtatccggcagctcgacctcgaagttcatgatgcgaccgcgggcgatcatacctttctgaatcaccgcacccatggtcacggtgtcgatattgccgccggacataatcggcaccaccacgtgcgggccggtggcggcggcgaacttgcgcgaacgcaggttcaggtgttccagcgcggccagcgagacggcgccggccgcctcgaccaccagcttgtgcttctcgagcatgagcagaatcatttcgttgatgtcgcgctcggtgacggtgaccagatcgtccaggaactcgttgatcagagcgaagggcaggtcgccggggtgcttgactgcgacgccctcggcggaggtgaccacatggtcagccggagacatacgacccgcggccagcgagtccttccaggccggggagccctccggaatcgcaccgattacgcgcacttcaggcttgaacgtcttgatggcgagcgccacgccggcacccaagccaccaccaccgagcggcacgaccacgtcagtgacgttcggcacgtcttcgaggatctccagaccgatggtgccttggccgcagatgacttcgtaatcgtcgaacggcggcacgtaaatcatgccttccttgtcggcgagctcagcagcgtgggcggcggattcgtcgaacacatcgccgtacagcaccacatcggcgccgtaggccttggtggcatcgaccttcagcggcggggtgatctgcggcatgcagatggtggccttcgcaccacgctcacgggccgcataggccacgccctgggcatggttgcctgcggatgcggtgacgatgccacgggcgatctgctcttcggtgagcgatgcgatcttgttgtacgcgccgcgaatcttgaaggaaccggtgacctgcaggttttccggcttcaggagaatctcatgaccggtcatctcgctcaataccggcgaagggataatttccgtatgacgggcagtccctttgagtcgtccggcggccaacttcagttcggctgcatgatcacgctgcagcgccttcaaaacatccttttgttccatagcttttaattgtatggcgcggggacaccgaaaacagtggcttatctcgctaacgagtgctcatttacggtaattcccgttcgtaatcagctttcgaggggctgatttggcttcgcggggaggtctatctcctcttcgaggggctgcccgatcgtgcaatgcgtgagtatgacacatcatttgcagcggtattatgcggttttcggagcccggctattcaggcaccaaccccctgaaacggagatagacctccccgcgaagccaaatcagccccttgaaatggagataccgcctagcaacacttataggctgacgacgacgccctcccatggtgcaagctcacggccggcaagagcggccacagcgtgcgcggcgtcatacgtgctgatcaccacgttcgactcggcaaggccatcggccactgccaacagttcggcggattcgcgaggcaaatcaacggttcggccggacatgttgaccacgaccagcagcttctcatcgccgagggtgcgggtgaaggcgtagacatgcgcgtcatccgcatcgagcagatgccagtcgccggccgccacgacaggcatgtcgtggcgcagcgcgatgagctgcttgtagaaggcatacaccgaatccggatcgtcgaattcgccggccgcgttgatcgccgcatggttgggattgacggagatccatggctccttagcggcatccggcgcagtgaaaccggcatagacagagccgtcccattgcatcggggtacgcgaattatcacgaccgcgcgcggcgatacccgccaacatcgattcgggcgactgcactttggcttcctcaaccctttgacggtaagcgttcagggactcgaggtcacggtactggtctaggcgcgtgaagtgggcgtcggtcatgcctagctcttcgccctgatatatgtacggggtgccgcgatgcatgtgcagcatcaggccaagtgccttggccgaacgcacacgagattcctccgaggagtcatcaccccaacgagaaacgacgcgaggctggtcgtggttaccagtaaacaggcttgcccagcctgcattcttcacggccgcttgataaccggccataatgctcttgagcttcggcaggtcaagtggcagtggcttccatttgacgccttcgcagtcaaaatcaacgtgctcgaataggaagagcatgtccagctcgccgttggcggggtcggtgatgtattcgttgcgctgtgcggtaacgccgggagcctcgcccacggtgaggaagccctcacggccttcgaacacttcacggcgcatttcggccaggaattcgtcttggcgagggccgtccgcgcagaacggattcgggttggaatagccttcctcacccacgggcagatcgtccagctcggaaccgtactcgccgggcagcttgccagacaggtccgtgcgcttggaaatcagcgtaatcacatccatgcggaagccgtcaacgccgcggtcaagccaccagttcatcatgtcgtataccgcgcggcgcacagccggattttcccagttgaggtccggctgcttcttcgagaactgatgcaggtagtattcgccacgctcagggcaatactcccatgcagaaccgccaaagtaggagccccactggttgggctcggcaccgggctcgccggcagtggtgccgggacgggcgggacgccaccaataccagtcggcgtgctcatcatccttgtttttggacgcttcaaaccaggcgtgttcatcggaagtgtgattgacaacaagatccatcacgatcttgagcccgcgcttgtgggcctcggccagcagctcatccatatcgtcgagtgtgccgaacagaggatcaatgtcctgatagtcggaaatatcgtagccattgtcgtcttgcggagacttgtataccggggatagccacagcacatccacgccgaggtcggccagatagtcgagccgtgacgtaatgcccttgagatcgccgaggccgtcgccgttggtgtcttggaaggaacgcgggtaaatctggtaaacgaccgcattggaccaccacggatttggggtggcaccgttggtgcggatggaatctggaattactgtgcgttgtgaagtggtcatcgttggctcctccattatttatggtctacattgcctgttgctcatagtctaaaaagcgctgaattacatttccattggggaactgcgttggtgtgccggaaacaaaaaccgcaaagagccggaaggcactgctacggctcaattctcataagctgcacatgctatttagcaacatatgggccctttcgctgtttgtggtgggtgactgtgccgtggggtgatgttggtcgggtaggttggaggcatggatgcctctcacctgttcaccgccgcgcttcggctgcggtcgccttggagggtcgggtccgcggacttccgtgacgccgacggcgacgggcgggagccgcacatcacgatcggcttcgagcccggcagagggttcatgctcctgttcgaggcgtgggtgtggctatatcgcctgtgctcgtggatgatgcactcgaggctcgaacctatgaaggagctcgcccgcttgttccgccgccataatctacctgacctgcggcagctcacatattaacggttcttctgattgcgacgcgcaagagcaacttcgggcgcgcttggattgcctgcttgaacccactggtgcggggatagatgatttagttgacacgcctgcgggaatctggtggggatttcgctggcacaccggatttcaagcaaaccccgcctcgggaaccgctccggacctcggcgttggcccggttcgtatgtcaatcgattgccgtctgaaccgggacagaatccgctgtcccggttcgcgatttttgtccttttttacaaacagggacaagccaatctccgcagttcatatgctccgtaatacaaaatcggcggaatagagccgatcccggaatcaacatgttgtcccggttttcacataaaacgattgacattcataccgggacaatgaaaattgtcccggttcgtgaaaatcgcccgaaaccgcgaaccgggacagcggattctgtcccggttcgcgcgtcaaacggttgatatgtggaccgggacaagccagtggcacggcgacacagcagatgcgctcaattgcaccgtaagccgtacggtttcgtcactttttcattcgcacaacgagcaaaaccacatgacctttgtgcgccaccgccacatcaaccgaccgtcgcctttattgtggcggtttccagtatggcaacaggacagaaaagcctcctccggtgagagccggaggaggcttgggtggaagcggacctttacttcacagagtcctgcaattcaggactggcctacggccagacccaacatgacctcgcgagtacgcgacctatccggccgcccgggccgggaaacagcccacggggctgtttccttaatcggctcgtctcgctcgacgcggtgaagtaaagcagcgcctgcgctgttttacttgaccgctcccctcatcacaccaccgacgacccacttttgggcgaagatgtagacgatgaggatcggggccatggccatcaggtagctggagaaggccatcgggtagttggtggcgaactgcgagctgaagacgtactgggcgagcgggatggtctggttcgactggtcggtcagaatgatcaacggcaggaggaagtcgttccaggcccacagtgcggtcaggatggcgatggtggcgttaatcgggctcatcagcgggaagatgatggtccagaaaatgcgccacgtggatgcgccatcgattcgggccgcctcctccagcgaaaccggaatcgaacggatgaagccagtggcgatgaacaggttcgtgcccaggccgagcaccgtgtacaggatgatcaggccgacctggttgtccaggtgcagggagcccatctgcttcgcaatcggcagcatgacgaccgggaacggcacgaacatggcggcgatgaagaagtagtacaggaagcggaagaagcgcttatccatgttgcgggccacagcgtaggccacgaaggtgttggtcagcaaggtgagcaccacggcggccaccgtgatgatcgcggagttgagcgcggccttcgggtagttgaccttggcggaggcgtcggcgaagttgtgccactgccacgaggtgggcagggcgaaggtgccggcttcggccggagtcttcagcgcggtgacgatggtgaagtagagcgggatcagaatggtcaggctcagcacggccacggcggcggtcagccaccagttgatcttgtggtccctgcggaacttggcgggcttgccggacatggacggggtaactgttgcagtagtcatttcttatcctcccctaaatcagatctgttcctggctgcgggagatgcgcagctgtacgaaggcgatgatcgccagcacgatgaagaagagcacggcgtttgcggtctggtaggcgtactcgccaccggtcaggccacccttccagatgaggtaggtgacggtttcggtggaggagttcggaccgccctcggtcaaggcgacgacctgatcgaaggtgccgagcgcgttcttcatggacagcacgaggttgatggtgaagaacggtccgatcagcgggaatgtgatcttccagaacttctgccaggcgttgacgccgtcgatggcggcggcctcgtagatttcgtcgtcgatggtctgcaggccggcgaggtagatgagtaccgagtaggcgatgccctgccagacggcgaggaagacgattgggatccagctgagttgctcattggtcaacagcgaggtggacagccacttgatgcccagcgccttgccgagctcgggcagcgggttcatgaagatgtacttgaacacgtagccgatgaccagcacggagagggtgtaggggatgaagaagacggctcggaagccattcttgaaggcgatcttcgagttcagcagcaccgacaggaacagggcgatcacattaatcagcaccgtgatgagaatggcgatgaggaacgtgaacaggtaggcgtggcccacgcggttgtcttggaagagggcgatgtagttcttcaggccgatgaacttgtaatcgccgtagccctgcgagttggtgaaggaatactttacgccgtcaagaaatggcaggtacaggaagaaggcgaaaatgatagccgccggaaccaccatccagtagtaggcggggtccaccttgcgggtggagaaggcggagaccttcttcttggccggtttcttggcagcggtcttggttgcggttgcgtgtgacatgatgttctcctctcctaccgatcactcgaaggtcctggcttggaccttgtcccattcggtctgcatctggttcaggaagcggtcggtgttgccggaggtcaccatggtctgcaggtagccgccgatgttgatggacgaaggaatgtagtggtcgcagaagtcggccagtcggttttcctcgaagaacgggcgcacggtttccagcgcatcgttgccgaagtaggtgtccttcagcggcgtgatggcggactgggcgtcggcgtaggcgtcaagctgatccttctgcatgaggaactcgacgagcttcatcgcttccttggggtgcttggtgttcgcaccgatggtgagcatcacgtcgtcgccggcggtgaggatctgctcgctggcgtcatcggtggccggcatctgggcgaaaccaagttcgatatcggggttgatcagcaggatctgcgggatggcgtaggtgccgagcgggatgatcgcggccttgccttgggcgaagttctgcgtgccctgctggtaggtgacgccggtgtccgcagtggagtaggtgaagagctcggactccttctcgactgcggtcttccacagttcctggaacgtggtcttgccttgcttgagctcggtgtacttcgattcgggaaccagcgtgccggccagggaggcgagcggtgcctgggtggtccaggcgtcggccacggaaccctgcagcgggttgatgccggcgtccttgaaggtgttgagcatatcggtgaactcgctccaggtggtcggcggattctccgggtcaaggccaaccttgcggaacagagccttgttgtagatgtagccggaggcgttacccgcgaagggcaggccatacaggcgcttcttggaggaatcggtggtctgcaccagattcttggcgatctgcaccatgccggggttgagggtgtccacaatgggttcatcggtgaagtcgtagaacacaccggaggcggcgaagttgccgaagctgatgtcgccgttgaaggtgatcacgtccggcacacgattcttgacgaaacgggtgcgcagatcggtctgggcgttggcggagttgttgatgttgaccttgatggtcgggttctgcttctcaaagtcggcgaccatggacttgaactggtcggcggcctcggacttgaactggaagaaatccagcgtgacggtgcctgcggtgctggagccgcagcctgccaggccgaacccgacggcgatcgcgcacatcacggcggcggtgcgcacggccagacgcttcagtctaggcgttgcatgtggggaatcggacagcataattgttgactcctttatctttcttttcctccggcttcggtgccggcggttcttccactttccaaggtaacggttcggccatttcattcccagcgccagcgagcccacttgcgcaagcaacaaaaagcgcggtattttgtgattaacgcaataaatacagcgaaggggcttgcatgtctgatgtcaacgcgattccacagtggttttccggatccgagcatacgcatcgcgtggcggcggcaattgcccaatacgggccgatagcccgcactacgttggcacagatgctgggactgagccaaggggccttgtcccgcatcaccagcgatctgatctacgccggggtgatcgaggagcttccggccgaggccggcccgtcaggcaagctgcccgagcgattcacgccaagggaaagttcggatcgtcgcggacgcccgcagacttcgctggtgttgtgttcgaacgcacgcaccttcattggtgtcaaggttcatgggatgtcgattgtggccgctgcggtgaacgcgcatggcgaggtggtgtccggccggcacgaggtgccgatcggggcggatcagtcggctgagtatgtggtgtcggccatcacgcggctggtgcgcgaatgttccgccgatatcgcctcttccggactgccctcccccactgcggtgggcgttgcggtaggtgggcatgtggtcgacgattcgattgtgacgttcgcgccgttcctgcattgggacggggccacggacttggggacgatggtcacagaggcgaccggcctgccgtgcggggtgttcaatgatatcgattctctgctggtggatgcctcctggttcgggccgggtgtcggcgtggatatgttcgccgtggtgaccatcggcgtgggtgttggttattcgctggccgtgaacggcaagccagtgcagtacccggataagagctatggtctggtgggccacgtgcttatcgatccggaggggccgcgctgcaccagcggacatatcggctgttcacaatgcttgactgacgattcgatcgccgaacagtactctgcgattgtgggtcgcgcggtcagttttgaggactttgcgcgcgatgccaagggacgcgtgccgcaggccacgcagttggtgaaccggacgtgtttccggttgggttcgctggtggctacggtggcgaacatcgcgatgcccggacatgtgatgattgccggggagtccgcgtttttggccaagctcggcaccgattcgctgcgcgatggcattcgtttctaccgtcacagccagacccagccggtcaagttcacgattatggaccacgactggcagctctgggccaaagccgccgccagtcgcgtaatcgtgaagcatattgggtaggccgttcttggctcccctcagagagggaagccaagaacgttgcttcgccacagttactccgccacgaccagcaattacggacttgcctatcggcaaggctcaatcccaccttcgctcagctgtcgcttcgctcaggccgtggctactgacagcctactaggctgtcagcttaacgccacagccttgagcaatactgcctgctgggggtggagggacgggggacggatgccgtaacgctgcagggcttcgccggtcaggactacgccttcctcgttccaccagccgagagtgctctggccgttggtcagaccggtcaaatccaagctcgggtcgagcgggctgacgcggtaggtgcgctcggggtcaagtccgggcaggtgcacgggcgcggccggataggtctggctggtggtcagctgggtgaagcggtagatggcggcgtcgcggttcggcatcaccatgccatccaagcgcacggccggatcgttggagtcggcgtgcacgcaggtgtcgatggcgaaccagtcgcggtgcttcttgaattcggccacccacacggccagcttggcgagcgcctcgtccggctccttcaacaggttccattcgatgcccatgtggccgaagaacgccatggccatgcgcagttcctggctggtggcacgctgggtggagtgcgcgggactggcacccacgtgctcgcccatcatcgccggcggcaccagcagcgaggtgtagcgctggatgtccgcgcgctcgaccgggtccacgcagtcggagacccagatacggtcagcgtgctctaggatgccgaggtccacgcggccaccgccggaggagcagctttcgatctcaaggcccggatgtgcggtcttgaggcccttgaagatgttgtagacggcgagggtctgcgcgtgcacggccgggcggccggagcggcgggaaccgggctcggtgacgaacttgttgtggtcccacttgatgtagtcgataccaagctcgccgacaagctggtccatgcagccgtagatgtagtcgaacgcatccggattggtcagatcgagcacctgctgagtgcggccctgcagcggcagtcggccggtggtgggcgaaagaatccaatcggggtggttgcgggccacgtcggaatcggggttgaccatttccggctcgaaccacaagccgaattccatacccttggcgtgcacgtagtcggcgagcgccttcagggacttcggaccatcgggccagacgtcctgcgcaatctgccagtcaccgaggccggaggtgtcgtcgcggcgggagccgaaccagccgtcgtccaccacgaatcgttccacgccggagtcggcggccttgtcggcgagcgccttcagcgtatcgaagttgtggtcgaagtacacggcttcccatgtgttgaggatcaccggacggccgtgcgagaacaggcgcgggtgcagggagcgcacgtaggagtggaagcgggcggcgatctcgttgagaccatcgccataggagccgaacagccacggggtgtcgtaggagttctggccttcgccagggccagcgagcgtcacttcgccgccgaacaggagttcgccgccgccgatcacgccggttgtgtagggcagacgttcggcggacagcacggagttgccgctccagcccacgtgcaccgaataggcgtcgccatgctcgaagccgaaaccgggcacgccggcggtcaggagcagggatgcgtcgaagtcagggcggccggcgagctgcggcttttcgaaacggccgacggtcagcggctggcgctgcggactgcgttcacgtagatggtgaccggtggtggtgaggatttcgccggcggattcgggcagcgggaagccgagctcgatcttgccgatctcgagcggggctccggcgtctgcaccgaacaggttggttacggtggccttctgacggaccaggccgccggggagcagttcgaggtgccactcgacttccacgccctgctcctcatcgcgcgcggtgactatgacgccgggcacgcggaccggaccggtggcacgggcatggccggccacatcggtgtagctttcgccggacacggcatcgagggtggcttccagcacgccgccggcctcgatattggtcacagtgaacttggggaagagctcgacgccggcgcggcgcagcaccacgcgctgctcgccgatccagctttcggcctgggtgggcaggatagacggccaggcggtgtcgtcgagcgcgccggacacgcgctgcggcttcagggcgtcataggcggccagcagggtgtcgggcttggccagcgggcggccccagtggacgatgtgcggcaggtcgctgccggcaaacaccagaccgatcgccacattggcggcgggctgggtcaggtagacggcggtgagtgcggtgccgtcagcggcggcgccggtgaaagtggaggtgttctcggccatattgtctccttcgacgtgtgtggatttgcattgcactactggtttcgatggtagaagaaatggaatatgttgccttggtgccgcgtgttggttgcgtgaggtaagtaatgcgtccgtgtctatcgccgctgggcgaagaaatcagtcaggatggactgacactcgccttccagcacgccgccgtgcacttcaggactatggccgatatgcggatcgcgcggaatatcccaaatcgaaccgcatgcaccgagcttgggatcccaggcaccgaacgcgatggtgccgatatgggtctggatgcaggcacccgcgcacatcgggcacggctcaagtgtgacggccagcgtgcaatcggcgagattccaagcgcccaaggcttgggccgcctgacgcatggcgatgatttcggcgtgggcaagcgggtcgccatcagcctcacgcgtgttgtatccgcgcccgacaatctggccggccgcatccagcaccaccgcaccaaccggtacgtcaccagcggctgcggcctgaccggccagttccagtgcacagcgcatcgcctcgtcatattccataccaacgagtgtatgcctttttctcatatcgtctcatgatgtgcataatcggccgcaatcttaacgttttcttcatggttcccatatacttttggtggagaaaaaatacgagaaggcggcaacatggcggtatttgagctcatcctatgcatcattgcggcggtggtggtgagctcgtttgccagtcgcttcgtaccgaaggtttccacaccgctggtccagattgtgctgggcgtgctggttacgtatctgccgtttttcccggatgcaaagctcgacccggaactgttcatggtgctgtttatcgcgccgctgctgtatctggaagcgcacgaaatcgataagtcggcgttgctgaaaacgctggatctgagcctatcgctggctatcggactggctatcgtcacgatggcggcggtcggattcactttgcatgccgtctggccgtccatcaccttagcctcagccttagcactcggcgcggcactcggcccgaccgatgcggtggccgtcagctccctaggtaaagaagcctcgctgacacagcgtcagcgcagcgtgctgaaaggcgaatcactcttcaatgacgcttccggcatcgtcggcttccagttcgctctggccgccgccttcactggcgaattcgccgtggggcaggccgccggcgaattcgtgatctccttctttggcggcaccttatttggcctggtgatagcagcagcggccaactggctattcgagaccgtgcgatccctcggttgggaaaccaccaccacacgtattctgatggaactgttcctgcccttcctgctgtatttgggcgcggaggaattcaatgtgtccggcattctgtcggtggtggccgctggcctgttcatccgattcgaccgtaccggcgtggggccgaatgtggcacgtacgaatatcgtttccacttcagtatggggtgtgctgagtttctcgctcaacggtgcggtgttcattcttctgggcatgcagctgccgcgcgccatgagggccagctggtctgacccgtatatcagcaataccgtgctgatcggcattattctgctggtcactctggtggtaatcgcgcttcgattcttctggattgcggccatgctgcgcgttgcgcgagatacaatcaccggccagcgccgcaaaatgacacccgaacgctggcgctcggccgcagtgatgacctttggcggccccaagggaaccatcacgctgtcattgatgtttaccatcccgtattacattgccggcggtgcgccgttcccgatgcgtgacgagctgattttcattgcgtcaggcgtgattatcgtgaccttgctgctggccaacttcctgttaccgctattggccccgaaccgtggcaaggatcccagcgcggaaatgattccggtgaccatcgatgtgttacgcgccacggtggaggaattgaccggacgcatcacgccagagaatcgccgtgcgattctgatggtaatcgaccaatacaccaagcgcatcggacgattgcagcagcgcatcggcgataccgatcctcagggattcgagcaattgcagatcgaagcgctgcattgggaaaaggaattcgtgcgcgaccgacttgccgacaccaaggcgcatccggcggcggatacggccacgcaagagctgaacgtcgaagcctgcgagcgcatgcttgaccagattatgaatacgctgcgtcacacttccactgatccgacttcggggcatgcggtatcgcagattcgcggtcgcttacgcatgttccagcggcagatgagcaattacgccaaacgcacggtgtccaagattcgccataccacaccattggtgagcgaggatcagattttcgcgcgcacccgcgaactgcaggtcgaggcgattcatcatgttatcggccggcttattgacgagatgggccaggatacgtacaacaccgagcattgttcggcgctgttgctggattatcgtcgcgctgaggcttcattgcaggcacgtccgaatatgagcggcactacggaaaccatcacgcaggtcgaggacgtaaagcgcgagagctacggtatcgaactcggtgtgattcaggacatgtacgaagccggcgacatcaaccgagcccaagcccgctccctgaggcgcaacatctacgttatgcaggtcgatgccgattccggcatctagtttccttggctcccttctctgaggggagccaagttggggattgctatttccgcatgattctcttcagtatgtgcagtagtgcttgcagtgctcacttcgctcatgggagaacagtctatgaccgcgccggccacaagcgccctcgatgtccgattgctgtgacggccgcgccaattccagtgatggcggctgactacagcacgccagaggtaatgtcgttgtcaagcagccactggcgcaaatcggcgaactcctcaagactcacattgtgatccagaccgtggtagctcttggttttcagccacgtatgctcttccaaccaagcggcggtggcgaacagttcgtatttcgggattacgccatcgttcttgccgtacgtatagaacacggggatatcgtaatcggccaggcgagagtcggcgggggccgtgccgggcacctgaccgggtgtgttgaagccggacagggagacgacggcccggtaccgctcggggttgatgcgcaacaaatgcacggcgaccagtccaccttgcgaaaacccaagcggcaccacgtcacggtcggcgggaatgttgccggccacccatcggtcgactgctgtggcggcggcatacgcgtcgtagtcacgatcatcgccgataggcagggcatcgtggaaccacgcgtagttgccggggtcgggactgccttcacgggccggcgcgagtgtcagcggcccgcgcaatgccacgaagtcgttatatggagcgatgaggcgcatgatgtccgccatgtcttcttcgctggatccccatccatgcaggcacaggaacagcggatgcgtggcatgctggtcgaagccgccgcgcgaggtgacgctgtgttccacggtgagtggctcgccaaaacgtccgggcacagtggtggattcgcggccgatcagaggctggctggcattcgcttctttgctcataccaatccaatatagaggtcttgcgcgctgtgcggaaaacgatggaccatgatttcagtcacattgggtaatccgcgccgaatcgccttgggactttccaggggataccggcaatctgtcaggcattaccgctgtttgcggctgcggtgtctgcggctgcggtgattgtctcaagttcgccgccccactgctgctgcagtgcggtcatcttgctgccctcgccgaacaccatccagcgtttgccgttcagcaatcgccaatcacctttcgtttgctcattatcagcgtattggctcagcagttcggaaatcttgctttcgataggtgcccggctgatggctgcggacgattccgattcaaaggacacgaaggccactctcggatcagtgcacatctgtacggtggtgatgcctggcaaaccgcccgcatcaagcccctgccatccttctttgcacgcgccggcagcttgttctatgccttgctccatctgtgcggtatcttcgacgggtgccttgtcgttcgactgctgaatcagtccttccgggaacaatacgcccatggccacgccgataaccaagcaaactatggcgcacaccagtgcgatgatgccgcccgcgcccactcccccgtgagtggcgtaccgaggcatggtgactcgcgcagcgatgaccagaatcagggtgatgctgataagcaccgccgccgtcaacgcaatgtatcgtcctggcactgccgtcataaaggaaatggcgtaaggcgcgatttcatgaaccgccgaggtggccgataccacgacggctagcagtccgctgacaacggcaagtctgcggcacaatatcgacgttgggctgctggcttttgtagcggcgaatcgccggccggcattccgcctggatgggcgtcgattctgtgcacgacgtgagctgcgcgaatcgtcatactgaccatcgccgaagaaatcgtagtcctcatcgttgcgggccatcggtgccccccttcctgccgattacacagccagtgtaccgctatggcttgggaatggcggtcattcgggggaatgattcagggcaaaaaagaaccccggcggttgcccgccggggagagaaaggagagagaagaagaaagggggttcaattgtcgggaactgctgcggctcctgatcagctttccgctgacatttattaggtaaccacccgtttctgtatctaactaggggtttgtctgggaataacctgagagtttttacccttttggttttgacgcacaaagtatgagagcgggggcgacatttccttcttccctccacgtcatcccatgaccatataaaaaatgtacataccatttttgcgggtcgcaaccctcaatagctgcttgcaatgatgagtactggattatccaaccggggcgcataaaatgcgttattgccgcaaccacccgataccaaaacgttccccggcacgctcccagaattttgcgcctagcaagggaatggccataactcggttgaagaagtcaaccagcggacccatgcaaaaagcagtaatcaccgttccgactcctactatcgcgccgcaagagaaaccaatgcccacgcacaacaaatcagtgccgatacgacaaaaacggaacggccatccaagccgctgatgcaggccgagcgcacaagcatcgtacgcggatactccgagattacctgtgtagtacaacgcggtggcaaggcactgtaggacaatgccactaccgataagaacaatacgaaccatcagccccggttctggcagacaccgattcaacaagaatatacaaccctcagtgacgaacccgcttagaaaaatcgtaacaggggtggctagaccgatattctgtctagccactaatgctacgactgcgatgattcccagattgatcaaggtgtacatcattccataccgagccccgactaccttagtaacacccagcacgaacgtggtaaacggatcagtaccaaacgctgatttcgtgaacatcgcaatactggccgcggtcagaagcacacccacacacgacatgacgaaccgacgaggcagacgctgctgtggagcaggcatgtcacgtacttgtgccgaggctttttcacccatatctcattcgttcccacagtgccgtgtcagataccttgccaagctggcttatgagcgtacgcgtaccgatagtaatctttgtggcgcagccggaatgcggcgtcctcgtccacaatgatcgtcgcatgcggatgcatttgtaacgctgacgcaggacagaacgcacttacgcctccctccactgtctctgccacggcctccgctttgcccgcgccgaatgccaacagcaccaaatgacgcgcacgcataatcgttccgattccctgcgtgatgcagtgtgtcggcactttggttacatcgtcgtcgaagaatcgcgcattatctatacgcgtctgttccgctaaggttttgatacgtgtgccagatgccagagatgatcctggctcgttgaagcccacatgcccatccgcgccaatcccaagaatctgtatatcaacaccgcctgccgccgcgattgcacggtcatatgccacgcccgccgccatacgcgtcccgtctgacaaaggtgcacctgccagagtgtcacccggtacatgtacattctctgaattcagccctagaggttcaaccaccgtgcgttggattactgagtgataagactctggatgggacaggggcaaacctatatactcatccaacgcgaatccgcgtacctgagatatgtcaattgacttttccaccaccagattcgccaaatggcgatatgccactagcgggcttgaccccgttgccaaccccagtactgcgtccaatttcacgctgaccaaatcggccacgcactgtgcgtaaatttcaccagcctcatcctcatcacgaacaatgattacttccataacaactccttttttcatttcaaaatattggttaccgattcgcatctcggtaagaaatcaccgcagaagcgatggagacaacgatcccccccctagaaagaccgtcaacgcttaaaacgaagcgtcacaatctgataaggcctaagctctagttcgatgtcagaagctgtggcgtcgacgttcaccagtgcaggacggacagcatcgcattcctcctccagcagaccgacctcacgcacttcgctccactcgaagtccatgtggagtcgcgccttactacgtcctcccaaggattcatacagtcgaacgacaacatctcccgactcgtcttcggcgagtttcaccgcttcgacaatcacgccactaccatccaagctaatcaatggaagcacttcgtgatctccgcacaccggcagagacggaacgttaagcctgtatccctgacgaattgcctcagatatcgtggaaccgacactgaacgaaacggttaacacatgatccccaacatctgtctgcggatccgggtaatgcgtagaacgcagcaacgaaacacgaatctgggtacctataccaccatcagacagacgaatctgccgaatgtcatgcccatagctgccatcgttggcaacggtgatgccaaagccgaattcgccgacgtggacccaacgttgggcagaagtctcgaaccgggcctcatcccaagtagtgttttctgtaatcggccgagttagatggccatactgaatttccgaatcggcggtggacgaacgcacattggatgggaaggcaagcttgagcaacctgttactctctttccactcgacggcggtacgcacgaccaatgaactcacatcaggatcaagccaaatacgttgtgtatacgaagaattaccaatgattcctttcacgataaggacattgtcttccaaatcaacagtcctcactaccgcaggtgcaaggggactttccggatagctacgatcaatgtcccacgcatcccattgagcaggaaaatcaacgaacagctgcaatacgtttgccggcgaggctgggtcaatcgattcgcgcccagtgacattgtccacagcggatacaatccgtccacgatcatccaccacataccgaacacgcccattggaaaacacgaacccctcatcagttttttctggcactactgatgcgcatgctccagaagccttgatggacccagcaggcacgccaagttgttcgaatggaccggcgttggcataaaactgatgggttccctcaccaacaagggagcgaatagcctcatcaatgattgtgcgagtctcctcactaatacgctcatgcatctgggcagactgctcatgtacccaagcgattgaggatcccggaagcacatcatggaactgcagaagaagcagctgttgccataactcttcgatttgccgatacggatactcataccgagtacggacagaagcagtagtggcccacatctcagcagcgcgtaacaacgactcgtttcgccgattccccattttcatatgtttttgagtcgtatatgtaccacggtgcagctctagatacagttccccctcccataccggtggttcctcgagttctgactcagcttgttcgaagaattcgatcggagtcgacatcgtgattttcgggctacctgcaagattgctttgcaagcgaatggcctccagcatctcacgagtgggcccgcctcccccatcaccccagccgaacagcataagactggaacgtcccttgcctttttcggagtaatgtctctccccaattgcgatttcttccggtgtcatttcggcgctatatgtatcggaaggagggaaatgagtgaatacttcagtaccgtcaatgcctctccaaaggaaagtattatgagggaacctgttggtatcattccacgagatcttctgggtaaggaaataccgattacccgcgaggcgcacaatctgtggcaacgtcgctgaatatccaaaactgtccggcaaccaagcaactggctgtaactcaccaaattcatggcggaagaacttcgttccgtataagaactgacgggtcagtgactcgcctgatggaagattcgcatcacattcgacccacattcctccgattggaatgaacgttccctttgcgatcatctccttgacgcgggcgaacaaatcgggatacttctgttttagccactgatactgctgcgccgatgaagccgcaaatacaaacttgtctccacgatgctgcagatccacaacattgctgaatgtgcgcgcaaccttgcgtttcgtttcacggaacggccataaccatgccgtatcaatatgggcctgtcccacggcgtgcacaatgtgggcgcgatcagatgcaggatcagacagcacaggggctaaacatgcgcgcgcatcaaccgcggtaccggctatgttcgacggatccaatgtctccatcgaccgttcaagcgccatcatgatatccgcatgccgggtgcggtctccgtcaagctcacgcgccagcccggaaagaactttaagctcctggatgaggtgccaaacttcaatatctcgtagtcgcagctcgagtgtcgatagcctgtacagttccggcatattcttggaatctcgactgcccagcgtagtgggcgcaaagcttccggcatcctgattgatatcgggattggctgcagcttcgatgtagtaacggaaaccatgtcccggcttcggcactggaacccagctattcattggttcgactgcttttacaatccgcccctcgctatcatagaccagtccttcagcctgaaaaccaatcgcagtggaactgttttcagtcaatcgaaccactaactcgggctcacattgctcagccttggaccatgtttggggaacctctccatcaacgcgcaaccaccatgtatcccaaggagatccccattggtcacctacatggaatacttggtattccgcttcccgcgccacactgaatggcacaggctcatcatgcaccgcccacgcggcaatctcaactgctgctgaatcacggtacagtgccttggctaattgctcggagagtgctcgttcaacacggtggaacactttttcatcattggatgccatcgtcgtctcctctggctctttaactcatctcattgatgattacgcggcaaatcatttttcacagacgctgtgcggaaccacagaatatgtctaaaatctctgattgtcctcatcaccccttggtgccgcctgccatagaataagtaccgccaacgaaacgagtagatagggtgtacagaaccacaggaggcagagaatacaagaccgcgaatgcagctagttggccgtactgaatgctgccatgctgaccgaagaagttgtaaattgcaacggaggccggcaacttttcaggatccataagaagaatgtacggagtgaagaaatctccccatgctcccatgaatacaaacactgcaacgaccaccaaaccgggacgcatcaatggaacaactatctgccaaatagtacgcatcttagaagcgccatcgacccatgctgcctcttccacatcaatcggcactccgtccatatagcctttgaccagccataccgccattggcagcgaagttgccgacaaaaagagtatgacaccaatcgtcgaatccagcagattcagtgacacgaatagcgaataaaccggcaccataatggcggtgatcggcaaacatgtaccgaacagaatgatatacatgaatggacagttgaaacgtgattcataccgcgagatcggatatgcgacaagcacggcacaaaccaaaacgatgaccgtaacggcgatagagataatcagactattccccaacggccgcaacgacatatccggagtcagcaccgcacgatagttttccaaggaaaatatcttaggtatccttgtcgtgaatgtcgcctgatcatcgaatgaggcgaagaacacccataccagcggcagcaggaacgcagcagcaacgatcgtcatgccaatccatgacatagccgcagctacaccagttcgcggggtacttgggatattgagacgacgacgtccgaacggatgtgaagcgttggtcatcattactccttattcgtcttcaatgcacggatatataccacgccgaaaatggccccgacgagcaacatgaccacggagatggcagtgccatacccgatgtcgccgaaacggaatgcggtttcgtaggtatacagcgccagcgtcatgcttttgttacctggcccaccggctgtcatcacataaatcaatgtgaagcaggcaagagtctgcaacgttataagcatcaagttggtgacaaccgtttgcttgataatcggtagttttattaagaagaaatcctgaaccgcgttagctccgtccagtgcagaagcctcggaaagtgacaaatcgacatcgcctagcgccgcctgatagttcatcatcgagaacgccgtgcctcgccacacattggccaaaataatagcgaacatcgggaagtgatacagccagtcagtcacgctgccgccgaacgcctgaacgatctggttaagcgtgccatctttgttgaaaaacgcgtaacaaacaaaactagcagcggtttcaggaagcatccacgcagcaattaccgtggtactcacaaatgaacatgcagctttgggcatacgggtcagcagcaaggcgagcgcaattcccaatgtgttttgcgcaacgatagcgctcatcagcacgaatacaaatgtgagccaaagcgatttgggaaattcagcatcagtaaacaaatggttgtaattgtccaaacccacgaattgcggattgacggctgccgctcccgtcagagaagtgttagtgagcgaaccatacagggaccagaggataggccccaacatgaacacgcagagcaggataatgcacggcagtgttgtccaatattgtctagcaaattttttcatcgtgccgaccttgtaaaaaccaatatgatatgggtgccggtgacagtccttatgggaggaacgccaccggcagaacggtgcgagccgagagataatgtcattccttgatgacgttatcctcgccaacgatctcggctactgcctggtcataggtttgcgctgcctgatcgacggaggctttcccagtaatcacactttccgtagccttttgcacttcattggagaccttggagtacacgctcaagccgggacgataatgcgtgtactgcacaaggttagtcgcatctttcacataaggattctcaggctgattctcaggatccgaagtgacatcggaacgcgggtttatgtccaacgtgtagttggtgtagtactccatcgagttcttagcactcgtagcctcttgcacgaactcgaacgcgagtttcgggttcttgctcttgctacccacaccaatggcccatccaccagacatggaaacgaatccaggatctcccccgttctcggtcgggaacgcagccaccgccatggtcttgtcgtacccatcccattcgtaggagccaccttttgcccaggaactgggataccagctgccttccacagtagctgccatcttgcccttcgggaaccaatcactttgcattttcttggaaaggttagtatcaagcgcgtctgacacagaaggtgcatatcccttctcatacagcgtcttagtgaactccaacgaatctttgaacccctgggagccaatcacccacttctttttagcactgtcatacaatgcgttatcacctagcttcgtgccaaacaacagctggtagaagccctgcataacagttccttccccctgggtagtgcccgcatatatattgaaaggagtgatgcttgcatcgtatgctttgaccttcactgccatgtcaagaatatcgtcccagctcttgggctgccaaggcacttcaactccagctttctggaggatgtctttgttgtaccaaatggcgcgggtatcggtagatagcgggactccatagatcttgccgtcataggtaacggattttttggtcgaatcaatgaatttgtcccaatcattccattgatccacatagcttccgatgtccatcagatatccggcctctacatcagcgcccatctgagacgtatcttcataaatcacatcgggagcagtcgaggccgagcggaatgctaacgcgactttagtgttatagtcttcctcgctaccagcaacgacttgcagctgaatattcgcatcaggatattttttctccatgtcttttttgacctgcttgaataggcggtccgaatccggagccgaggatgtgctccagtacattaccttgatgctgttatcgctactggatgaaccggcaccacagccgctgaagacaagtgaagcagccgccgttgcggctagtacccccataagctttccatacgatttcctggacatgttggctctccttcgattaacgggaataggtatagccgaatgaatccaataagcaatcacctcattgcgactttctcattggaatcaatcatagtttatcatatatttcaattatctgtcatctaaatagatgttcattaatcaagctcagtaaaagtcgctcattatcaggaccaaaactactcctacgatgcaagaaacccaaatgtgtccgtattctaatcacgagagatcagggagagttgacaaaagtcgggctctccctgaaccagaaaggagttaagacgcatctttgctcgagtttgcgcgactttgtaagcgcgatgcagattaaattccgaaacagattttcatgtctcagaatattatgacgtcatcgtcatcgagagagcgcagcggcgacgcccggaatacgtgtcttgtatccctcaagcagctggcgtgcaatcggcacggaacccaccaatggatgctctgcaaatgccagcagcgcctctttgttcgatccggtcaaaccagcggcgatagcatgacgctcaaccgatttgacactctgcatcaaaccaatctgatgaagatccggctgcgcatatagcgacagcggatgcataccgttagcgtcgaccatggttggcacctcaactacagcgccgtcgggcagatcgacaacagtacctctattgcgcacgttgagaatcatgatctggcggtcattgcggctgatggccatcataacgccgagcgcgacgccagcatagcccagctgcgcggggtcaagatccaaatctcgctcagtggcaggcgccccttgaactccgccaagcgcttctgccatgtaactggcatcacgctctttcactgtgcgccaccacagagtggcaacatcgtcgcctttctgcgcgacatgtgcggcatcatggtagaacttggtctgcgtagtcttgagaaaatctccacgagtctgcggcgattccaaaatcctgcgcacagcatctttgttgtcatagtagtaataaagatactcgttcggcaatgcgcctagttcacgaatccagtctttgtcgaagatgtgggcctcttccatcttgttaaggcgttcatcatccgcgagaagatcaggaagcaaatctttcccatccactaccacgcggcgcatccagcccaagtgattcaggccaacgtaatccatctgagcgcgccgataatcagcgcccaaaacaccggccacacgacgaccaagaccagacggcgtatcgcagataccgaccacacgatcaccgagaacagtctgcatcgcttcagtgatgataccagccggattggtaaagttcacgaagtaggcatccggtgctagtctcttcaccttttcggcgatatggaccatcaccggaaccgtacgtatcgcgtaggcaatcccaccaggtcctgtagtctcttgcccaagtacattaagatcaagcgcaacatgttcgtcgcaacagcggccatccaacccgccctcacgtatggcggcaaaaatgaaatcagcgccttcgatgacgggttccaatttcgtagagaccgtgagcttgggcacatcctcaaatccctcggcaagctcccggaggatagcttcaataaccaatagacgagattgatcgatatcgtacaatgcgacctcggtaatcctcggctccccatggtcgcgaagcaacgcctcccagacgaatggagtacggaatccgcctccacccaaaatagccagtttcatgcgattatcacctttctgccggcaagccggctcttgtcaatcacatcctccggagccccggatgttgtgatcattgtgtcgacctggtctaggccacacaactgcatgccccctgttccgggcattttcttctcgctggcgagaagaacaacttttcccgatgcgacgattagcgctcgcttgatgggcgtttcgactgccatatcgtctaccactgaattacgtcgcacgcccgtacagctcaagaacatgatgtcagaactgatctgttgtgcggcctgttcagttagaggtccgaccaatgactgattgttacgtcgaagtacgcctccaatgagcaccacatcgatggcctcatcttcacgcaccacatccagcaccgcgagatttgacgtaacgattgtcagaggtcgtccaagcaattctcgcgcgatcaacggcgtagtcgagcctacgtccagaacgacgatgtcccggtcgttgaccaattttgccgcctctttagccatacgctttcgaaggccgaaatctgagcgctggtccgaatcagacaaaggatcctctactatgccagaatcggtcgtgttctctcggctgcccaaggtgagcatggcaccaccatatttgcgagacaacaacccttcattttgcaggattgacaaatccctgcgaatagtggattcgctcacgcccagttgctctgcaagatctgcgactttcctgccaccgtcagcaagtgtgttaagaatctgcttgtgacgttgcgccattaacaaagtcatgtgttctccatcgttgtgggaatagtctttaaagtcgagcatatattttcatgccgttcatgcacaagatttggtccggagaggtagcaatatgctcttctcatacagtcattcacgattatgtgtagactgccttgtcgcccagtccttgagaaacatccaccgtcggacgaatcgctcgccttgctcatattctagttgatcgattagttctgaaatcctttgtgggctcggcgcacttatagcaccgccaggctgctgcacacagcacgctgcgacggccgtcgccaaaagcaagctctgttccagggtccaccccccaagccatcccgaccataaccgctgcgctaaaggtatctccagccccagtcgggtcaacggcttgaactggaagcgcaggaactttaagccggttacccccctcagcagcagtaacgccttcactgcccaaagtgacaatcgccatgtgcgtgtattgcatgagtatgtccaatgctttctcgacagattggctaccggtataggcggttgcttccatctcattcatcagaaccacatcgacctggcacaaccgctccagtaaatgcttgtcccattccccagcggaatcccaacccagcccggcaaacaatatggcgcccttttcccggagctttaaagcccagtcaggaatggtactgtcggagccgagatcaacaaataccgtgcctgccgctgtatcgtcgtcatgccatttagcgtcaggaagagcctcttgataagtcacaaatgcacggtcctcaccatccgtaattgatacagtgattggattactcgcgccggcacagaatacgcaatgagacaaatcaagattgggctctttcttaagtttttccaccgcaagcatcccaattgggtcatccccaaatggcgccaacaaacttgttcttgctcccaatcgagctgcagcaacggctcggttcgcagcaccaccgggagaaatgatcaaatccttggcaaactcctctgttccaggcgccgggattcggcatcctgaaaatacaagatcagcgaacacatcgccggaaaccagcacatccaccttgccgcacataacccctccttcatcgtcgttgattgccgaatgagcaactgtgactgagtttaactgattttgctcatttgcgcaaatcgataattcaaaaatgcaagctaattacattgcagaaaggcaagaaccacgaaaactcatgcacgaatgagtgtttacggctatgacaggcgctgtattcacatatgggagccaagccttcagacctgtttccggtgcgagcgctagacttgggggcagtatcccgttatgccgcaaggagtgtatatgctgctgtccgatcgcgatattctcgccgcacagtccgcaggtcatatctcacttgatccgtggacccccgaaatggtgcagcccgcttccatcgacgtgcgattggatcggtacttccgtttgttcaataaccacgcctacacctatgtcgatccggcggaaaaccagggcgcgctcaccgaacagttcgaggtggatcccgacgaaccgtggattttgcaccccggcgagttcgcactgggttccacgtgggaatacgtcaagttggacccgtccattgccgcccgtctggaaggcaagagctcactgggtcgattgggtattctgacccattcgactgcgggcttcattgaccccggtttcgaggggcatattacgcttgagttgtctaatgtgtcgacgctgccggtcaaactatggcctggcatgaagatcggccagatgtgcttcttccagctgagctcgcccgctgagcacccttatggctccaagggcaccggctcgcattatcagggccagcggggtccgacgccgagccgttcctacgagaatttctaccgcgcgcacatcgacgactgagcgttgcgacgtaccattcggccggcggatgccggccatttgcttaatcccaaggagatgtcatgaccaacagcgatggtgggttccagttcgacttccagcagcacgaaaagccggtcaagccaacggttcctccgattcccgggcaagagacggcagcatatggcgcgcagccagcgacacaagccacaccggctctgcagttcccgcaatctgtgcaggcagcacagccgacgcagtttgcacagcccacacagcccatcgatccggccatgacgcaaccgttctcgccgcaattcccggctgcggttgccgcacaagcaccacagccggcggcagccacgcagccagtagtatccgaaacaccaatcgccgctgcgcccggccagcagcaatacgtttgggatcagacgacgcaaagcttccgcccggtggaaccgacagcgccggtgacgccagccgcaccagcggcaccggcgacatcgcctgtttcggtagcttcaaacgccgcgacacaggcgttccaacccaatcaggccgagcagcctgcggtagatgccgaggcaacacaagcattccggcctaattcagctgcggccacacaggcatacggcgcatcatccaccgtatccggtgagaccgttgccatgccggcaacgcaagtagcgtctgccgatgatgctgcagccacacaggtgttccaaccggccgccctggccgcttcggcacaggctcagcctgctgtgatgcctccctccattccgttggctcaggtctccgatgaggacgattccgatggcgccgagcctcgtcacggcggtagcggcaaaaagaacaccctcaaaatcgtcggcattgccgtagcggtagtcgccgtgatagcgctggttgtcgccggcctgctctggtggcattccaacagcagtaaggcgagccaagccgtggcactggccgagtgcaaggtagcggccaagcagtacacgaatgcgcagaagaagctcaccaccgccatatccaatggccaaaccagcgcgcaaacatccaccagcgatgtggccgatgccaatacgctcaccacgctgaatcaggcgttgcaagacgccggcaatccggctgacaccgccaagtgcgattccagcctcaacgccactgagctgaagtctcacactaaagagctgcagaatgacgccagcgacatggctgacaagacggatgccatcaacaatgcgatcaaggccgttaatacttcaaaggcgacggccgataccgacacactgaaatcgaacctgagctcggctatttcgcaggcgcagggcacactggatagttccgcgggcagtgtggccgatgagaacacccgcaccgcgctgcaaaacgccatcaccgaggccaatacggtgatgaacgggaccagtccgtccgaatccgacgtcaacaatgcgatttctagactgcagaaggccgagtccgacgtcaccgcctcgatacaggccaagcagcaggcagatgccgccaagcaagctcaggaagaggctcggcagaaggccgaccaagaggcacagcagaaggccaagcagcaggcacagcagaagtctcaagacgggtccacctctactgacggccccgacggcagcaacaactgaggtctgcagcgttctcccgtttcccatggggcggtaacttccccatggggcggttagcgcattttcctttttcgcggaataatgccgttttcagcgaccgccccatgaggaaatcaccgccccatgggataatcaccgccccatgggataatcaccgccccatgggataatcaccgccccatgggataatcaccgccccatgaggagccgtttggatatagcagtgggccgggccctgaacaccagagcccggcccactgctatatgcccacaatcagggctattgcgatggcttaacgcttggctatcgcgcgtagcacaatcttgcgtagctcggaggcaatcagcacgattgcggccaggcagatgcattccacccaagccatcgggctcaatgccacggtgccgaacggaccgttaaggaacggcacgtaaatcaccacgagctgcagcgccacggacaaaccaatcgcaccccatagccacttgttggagaacagacccacgaatgcggactgcagatgcgaacgggaggccagcgcgttgaacagctgggcaaacaccagaatcgtgaagcccatcgtacgggcctcggtcatctgcgcttcatggccgatggcatccaccgagcggtcggtgaacaagccgccggataggtgcatgtccataccaatcaacgtgacgatggccataatgacgccgacgaagatgatgtcgccccacatggaggcgtcaatcacgcggtccgtcaccttacgcggtttacgacccatcacatcgtcggtctgcgggtccacgcccatagccaacgccggcgcggcatcggtcagcaggttgatccacagcaactgtgtggcgagcagcggcacggtgacgcccacggtttccggctggcggatgccgaggaagccagcaaacaccacaccgaggaacacggtgaacacctcacccacattggaactcagcaggtagcgcaggaacttgcggatgttgtcgaagatcacgcgaccctcgcgtacggcggccacaatggtggagaagttgtcgtccgccagaatcatcttggcgctctgcttggtcacttcggtgccggtgatgcccatggccacgccgatgtccgcggacttgactgccggggcgtcgttcacaccgtcgccggtcatggccacgatgttgccttgacgctgcaaggattcgacgatcttgagcttgtgctcgggggccacgcgcgcgtacacggacacttcggacgtggccttgtcgagtgcggcctcatcgggcagctggtcgagctggtcgccggtcagggccttgccgtccttggcgatgatgccaaggtcggaggcgatgcgggcggcggtcagcgggtggtcgccggtgatcatcaccgtgcggatgccggcacgatgggcctcggtcacggagtcgcgcacctcagtacgcggcggatcgataatgccgaccatgccattccagatgagatcggtttcgatggcttcggcctgatcggcgatgtcggacacctggcctgcggcgttgacgcttacaccgggcacatcagccaaagaactggtttccagcggacggcaggcctcgccaagcgtacggtaggcctcggaggagagacgttcgacggtggcgagaatcgactggcgatcgccttcggtgagcttacggacctgaccacccacgcggatgcgcgtgcagtagctcaacagcacgtcgggcgcgcccttggcgaacacggtgagcttgtctgaatcggcgctgtccttggcgatgatggacatgcgcttgcgttcggaggtgaacggaatctcgccaacgcgcgtgtatcgcgtgatcttgcgatcggccttgaccttgcgtgcggccacgatcagcgagacttcggtggggtcgcccacgatctcccagcggccgttctcctcgcgtagttcgccgtcgttcgcgagcgtgccggccacaagcgtggcgacgacttcatcggccacaatctgggcctgctcggattcaggactgacgccaccggtcataaccatgcggccttccggcgcgtaaccggtgccggtgatctgcactgcgccggacggggtgaccacgcgctccacggtcatctcgttgcgggtcagcgtaccggtcttatccgagcagatcacggaagcggagcccaaggtctccaccgaatgcagtttcttgacgatggcgttgtgcgcggccatacgctgcacaccaagcgccagcaccacggtcaggatggcggccaagccttccggcacggcggccacagccagcgagacggccaacagcaaggaatcaatcacgtcatggacgtcgtcgaagccttccagcacggcgagcgccaccagcaccacgacggcgatgacgcacaccgcaatgccgaggatcttggagacgtaatccatctccttttgcagcggggttttctcatcttcggtggcggagagcatgtcggcgatcttgccgacctgcgtgttcataccggtgccggtcacgattgcgcggccggtgccttgcgtcacggaagtgccgttgaagatcatgttggcacggtcgcccagcgccttggcttcggtgagtgtgtccggcttcttaccgaccggcacggattcgccggtcagggaagcctcggcgatgcgcaggctggccgcgttgaccagtcggccatcggcggagactgagtcgccttccgcaaggacgatgatgtcgccggggaccacgtcggcggtgttgatgcgcatgactttgccgccgcgcagcaccgaggtctgcggggccgtcatttgggcgagcgcctcgaccgcggcctccgccttggcctcctgcatatagccgagcacggcattgacgatcagaatcaaaatgatcacgatggcgtcgaacggcagcacttcaccgccttccgcgccgggctgcgcattggccttttcgatgaaccatgcgatcaccgagatgatggtggccgcgatcagcaggtagaccagcgggtcctggaactgggccaggaatttcttccatttcggtacgggcggggcggtggcgagctcattcgggccgaatttggccagtcgacgcttggcttcttcctcgctcaggccctgggatgggtcgacattcagggctttggccacgtcgtcggcactggtcagacttggatcagcttcccccaatagcgcttcctgcgcgcgcacttcttccgattccacgacctcgttcgttgcggtcgcggacactgcggattgatctttgagatcatccataatgttctccttggtattgccgcggagtagtcagccttgcggccgctgccgggttttctctcccggctggacgcacaggactgcgcggttatggacaccggcgcaactgctgccgatgcatacgattgctattattccataactgcgtggcgcacttggcgcacagcgtaatagcgttttgcctagaacaggcgacgcaaccaggcttcagccaaatcaggccaacactgcacgcattcgacgatgtgcgcatagaagccgttgccagcggtttccgcattggccagggacaggccgtggctgccttcggggaacaggtgtgcttcgatgctcacgccggcggcccggcaggcctggatagcattagcgtattctccacgggctcggcttcgcggtcggaggtcatggcgtagccgccaccaggcaaaatcaggatggccgggcgtatgcggtccggttccatctcctcactgttgtcggccacatagccaaagaatcgcgcctcgttgccgtcaatgccagcgatggtttgttggattattgcatgccatacatcatacgcgcagagaatagttctcgataagaaccactcaccatatgcggtcttgcccgtatctccaaaccgaataacgcttacagcgaatcgtgaagaacgtatgccgcactaccgttacagagcattcgacagctcgacatataactcaagaatcgtgagaatcaaagcaattcataacctaggaatagtgagttctacggcattatataacttaggaatcgtgatataatagctcataaatccttgaaaataccaggaatatgagcttaacatgtataagagaaaagtatacgaccatctacggcgatggaaagcagcgagcaagggtactactgcgttaatgattgaaggagcccgccgcgtcggcaaaagcaccgtcgccgaggaattcgcgaagaacgaataccgctcatacatccttatcgactggcagaaggctccgcaggcggtacgagactcgttccgcaacaatctggatcatttggacacgctgttcatggacctttccgtctattacggcgtacgcctgcatgagcgtgacaccctctttattttcgacgaagtacagctcttcccctttgcccgcagcgcggttaaacaactcgttgcggatggtcgatatgacttcatggagactggctccctgatctccattaagaagaatgtcgaaaacatcttgattccctccgaggaagaatcggtgagcatgtttcccatggattttgaggaatttctatgggccagaggagaagaactactcgccgatgcgatacggcaatcttttgcggacaggcgagcaatgtctccgctgctggacaacaaggcggaacgcctgttccgtgaatacatgctggtgggaggtatgccgcaggccgtagagcgttatctgggaacatccgatatgggcaatgtcgatcgagtgaaacgccaaattttgcacctgtacgctcaggacatagagaaatacggcggagattcgaaagaacgggtcaaacgtatcttcgatgaaattccagggcaactttccaagcatgaaaagaagttcacactgtcgtctttaggcgaaaacgcacgcgaacgtgaatatggcgatgctttcttctggttggatgaatcgttcctgatcaaccgctgcatgaatgccacggatccgcatgtgggcctgcgcctacaccaggaggactccacgatgaaatgctatatgggagacaccggcttgttagtaacgcaagtgtttgccgaccgcgcatacacgtcgaatgagttgtaccgcgatatcctgttcggcaagctggaagtgaatgaaggcatgctggtggagaatgtcgttgcgcagcagctccgggcctcaggccatcgcctgttcttctattcccgatattcccgtcaggcgaaggaccgcatggaaattgattttctccttatcggggagtattcaaatgccgccatgaaggccagggtctgccccgtggaggtcaaatcgacaaagagatacaaaacctcatcgctcgataagttcaagaataaattcgacagccgggtcggcatgcaatatgtgctgcatcctagaccaatgcgcgttgaaggagaccgcctatatctgccgttgtatatggcgcattgcttgtgatgattctagaacgtatcgcagagaatgattctcaataagaaaagcgtgaggattacgatgcctcaatcgcacatgcagagcgtcatatcagtgagatcccgccgttgcggaccatgtttgattgtgcggaaaagttcggatgcctcacacttttcttgacgggaattatttactgtgaggcattgcgcaggttggcggccatggcgcggtcgcgcaagcctttggtgagcttgagaccgagggttacggcgatcaggactatcgtgcaggcgatccacagcgttcgaccgccgaagttgctgatggtccagccaccaatcagcggcgccagcgcaatcgataccgaccacactacgttgtagacgccctggtacgtgccgcgtgccgacgcgggtgccatggcggcaaccgtagtggtggcgatagggaatgtgcccagctcacccagcgtccacagcactacggcaagcgcgaatccgccccaggaatgggccgcggcctgcaccgcatagccgatgacggttacggcgaggcccatcaccagcacgcgtgaattgcccatgcgcgagaacagtttcatcgcgggaatctgcagcaggcacaacataccgccattgatggtgagcagcaccgaatactcgcccagccctagaccaaggtccgtcatggcaatgggcaggccggaggtgctttggaagtacacaaggaagtagccgaacatcagcagggagaagccgaggaatggcgtatcagtgagcacgcgccgccaattgcgagacatggagcccttggcactggcagccggtgcggcatccgagtgattcggcccctcgacgccggcgaattccgcatgcgtaacactgcgttcgtcttcatggcgcaccgcacttggcaccgatacagtaatccccaaatgccgcacctcgcggaagaacgcaatcagcaatatcgtgacggctatcatcaccgccgcttcaacgtagaacatcagcgaatacgagatcttgaccagctggttggccacaatcggcccaatcgcgtacccaaaattaatcgcccacgattgcagtacgtacgcacgttgctgacgttcggcgggcaccacatccgcgatatacgcggcgatgaccgggctgggcagtgaggcgaacgcaccatagacaaacagggccgcgcctaaagccacggggtcagtgagcacggaaacgaccagcagggcagccgctgcgccgatttcgccgatgataatcatggattggcggccgaatctgtcggacaaggtaccgccgaacaggcagccgatgattgcgccgaagccgtacatggccacgactgtgcccaccacaccctcatcgaggcgcagcgcggaaaccaaatatatcgacaagaatgaggtcacgaagcgacccatccacagaatcagaatcgccaaccataatccccaatacagcagggacagtccgaatatcatgcgctgcttcttcactctcaataccttaccggctaccgacggcggaatagccgcgttttggcgcggggtgctgggacaatagcacctatggctatcaaaaaaggaccgaccaaggggtcgggtggcaagcatcgcaacaaactgaagggttacggccccactcccaaagccgaggaccgcgtctatcacaaggcgtataaggccaagaaagcggccgaacgtcggcagatggccgacccgcgtctggcagcccgccgtcgagtggacaagttcgcttcggcggatacttcggatctggtgtacggccgtaattccgtgctggaagcactgcgcgtaggcgtaccttcttccacgctgtacatcatgtctcgtattgaacatgacgatcgtactcgcgaaatcgtgaaaatcgctggtatgaacggcctgcacatgctggaggccgatcgtctggagatggatcgtatcgcccgctccggcaaccatcagggcgtgattctgaaggtcgatccgttccagtactcctcgctgaacgagctggccgatcgtgctgagaagaaggccaaggcaatggaggccgcgaattcggcggccgcccgtattgctgcgcgaccgctgttcattgcattggacggcgtgaccgatccgcagaacctgggtgccgtgattcgttcggcggccgcattcggtgccaatggtgtgattctgccggaacgccgttccgcttcagtgaacgccgccgcttggaaggtgtctgccggtgcggccgcgcatatgccggtggcgcgcgtggtgaacctgactaaggcacttgagggcttgaaggagcgtggatactacgttgtcggccttgacggtggcggcgataagctcgtcggcgagactggctttgaatccgatccgctcgttgtagtgctcggttcggaaggcagcggtttgggccgactggtgcgcgaaacctgcgacgcgattgccggcatcccgatcagctcgtctgttgagtcgctgaacgcttcagtggcggcgggtatcagcctgtacgcggtgtccaacgcacggcgcaaggctgcggcggagtgattgtcgcttgaggccgtaataggttgtacacacaaagaagcccctctatttgaggggcttctttgtgtgatgggctcacctacagacagtccaccggattgtccgcttaatgactccacactgccgcatccggatcgtcatcggggttgtagccgtcgtcgtccgggtcgctgtaggtggattcgtcgtcaatgacgccggaatcggcctcttcgttaagttcggcgagtgccttggaatcaaggttgtagctcggcagaacgttgtcgatgtagctggtcacggcctcgcccatcggcacgtcgtggccggccttctccgccaggaaccagcgatggtcaagcacctcatggaagaactgagcaggctcgatctgggagcgatattcgcgcggaatcatacgcacggtcggctcgaacacctcgcgcatccaatcggtggccacgatttccagatcctcgccctcacgccacgtggaggcacggtaggcgtcaaggtcgttgagcagacgacgggcctggttctcctgcacgtcaaggccggtgaggcgcagcaacttgcggttggcgtagccggcgtccaccacgcgcgggcggaccagcacacgcttgccgtcctcggcggtcttcatttccagctcgtccacgtcgaagcccagctcgttgagcttgttgacgcgctgctcaatcttccacatttcgtccgggttgaacttgtcggtgtcggtcagagcgctccacagcgagtggtagcggtcgaccaggcggttgcccacctcgatctcatccacgtcgccgggcagtagcttgccggacgccaaatccataagttcgccgatgatgttggtgcgggccaagtcgatatcgtattcgcgctggccgtcggtgagctggacttgcaggtcaccggtctcggcgtccaccaggaaggcggagaaagcgtcggcgtcgcgcaggaacaggacgttcgacagggacacatcgccccagtagaagccggccaggtgcaggcgcaccagcagcacggcgagggcgtcgatcagtcgttcggcggtgtccgggcgcaggttgcgggcgaacagcgcacggtacggcagtgagaacttcaagtgccgggtgaccagaatcgcctccagcggctccccttcacgggtgtgacggccggtgaccacggcgatcggggtcacagttggcagttcgagcttctgcagtcgacgcaggatctcgtactctcgctcggccacctggcgcgtgatctccttcatggcgtacacctcgtcgcccacgtgcacgaatcgcacgacgtggcgggagatgcctcgcggcaggttggccagcaggtcctcaggccaggtggccaagggcttgtgccagggcagcgtgaacatctttgggttcgagctggcggcggtgattttcagtgcttgcggttccgctgaatcggcgtgttcgtcttcggctttgac

SEQ ID NO: 681 - DNA, 3458 bp, Unknown
  R14_15m  MAG No. k141_22302
cccagcaacgacttcagctactacgatcagatgctggacaccgccatcctcctcaacgtgattccgaagcgttacgagcgtctcgccttcgataaccaggaggacacgctcttcgccatggcccgcggctaccagggcgacaagggcgacgtgaccgccctgccgatgaagaagtggttcaccaccaactaccactatctggtgcccgaagtcgagtcggccgcggagatcaagctcaactccaccaagccgttcgacgagttcaacgaggccaaggcgctgggcatcgacaccaagcccgtgttcatcggcccgtacacgttcctgaagctcgcccgcaccccggaagccaccgaactcgagctcgacaagggcctggtcaacgccgtggccgccgtctacgccgaagtgctcgacaagttcaacgaactcggcaccgcatgggtccagctcgatgagccgtacctcgtgctcgacaaggagccgggcgatgtggagctcttcaagaccctgtacaccaagatcctgtccgccaagggcaacgtcaaggtgctgctcaacacctacttcggccacatcgccgacgtgtacgaaaccgtcaacctgctcggcttcgacggcatcggactggacctcaacgaaggccgtgaagagaacctcgaagccgtcgccaagtatggcgtggcctccaacaccgccatcttcgccggcgtgatcaacggccgcaacatctggcgcaacaactacgccacctccctcggcctggtcgacgccctgaagcaggtcaccgccaacgtggccgtctccaccgcatcctccctgctgcacgtgccgttcagcactgaaggcgagaccggcatctcgtccgaagacctcaagcacttcgcgttcgccgtggaaaagctgaccgagctcaaggaagtcgccgctctggccgacgccaccgaggacgagaagaaggcatccgccgccctcgccgccaaccaggccctgttcgacggcacccgcgtggccgccgacccggccgtcgccgagcgcatcggcaagctgtccgacgccgactacgtgcgtcagcctgcccgcgaggagcgtcagaccctgcagcgcgaggccctcggcctgccgctgctgccgaccaccaccatcggctccttcccccagaccaaggagattcgcgccgagcgcgccaagctgcgcaagggcgaggtcaccaaggaagcctacgacgagttcatcaaggcccagatcgacgccgtcatcaagaagcaggaggagatcggcctcgacgtgctggtccacggcgagttcgagcgtaacgacatggtcgaatacttcggccagaacctcaacggcttcctgttcaccaagaacgcttgggttcagtcctacggcacccgttgcgtcaagcctccgatcgtctggggtgacgtgtcccgcgccaacccgatcaccgtggaatggtctgcgtacgcccagtccaagaccgaccacgtgatgaagggcatgctcaccggcccggtgaccatcctcaactggtcctggccgcgcgaggacatcacccacgaggagcagaccaagcagctcgccctcgccatccgcgacgaagtgctcgatctcgaggccgtcggcatcaaggtcatccagatcgatgaggccgccctgcgtgagaagctgccgctgcgcaagtccgactggcacgtcaagtacctcgactgggccgttccggccttccgtctggtgcactccgccgtcaagccgaccacccagatccacacccacatgtgctactccgagttcaacgacatcatccgcgacatcgacgcgatggatgctgacgtgatctccttcgaagcctcccgtggcgatctggtggtgctcgacgccattcatgacgcgcacttcgagaccgaggccggcccgggcgtctacgacatccactccccgcgtattccttccgagaaggagatcgaggatcgtatctacgagatccttgacaagatggacgtcaagaaggtgtggatcaaccccgactgcggtctgaagacccgtggtaacgccgagacctggccgagtctggagaacctggtcgccgccgccaaggccgtgcgcgccaagctcgacaagtagcggaaatcaccgagctccctctgtatgagggagctcgggtttatgtaaggaaatcagcatgcattccccgatgttcacccttgaggtctttcccccgaagcgcaacgctcccgtggacaccatctatgacaccctcgacggcctggaggggctgaaccctgacttcatttccgtgacctacggccacggcacccattcggatcgcaccgccaccgcgcgcattgctcatacgatcagcaaggagtacggcattcccgcagtcgcgcatctgaccgcgttgtattccgacaaggcgaaaatcgacgaggccctcgacatgttcgagcaggccggcgtgagcgccgtactcgcattgcgcggcgactacatcgacggcgagcagctggtaggcgagttcaaccacgccagcgacctcgtgtcatacatccgctccgtgaagccgggcctcaaagtgttcggcgcctgctacccggaaggccactaccaggctgactcgctggaccaggacatcgaaaaccttaagatcaaggtcgatgccggcgtcactcacctgatctcccaactgttctacgacaacgaggacttctatcgcttcctcgacaaggcgcgcgccgccggcatcaccgtgccgatcgaggcgggcatcatgccggtgcgtggtgccaagtccgtgcgtcgcatggccgaacgcaacgcctcgcgtatcccggacaagctcaacaccctgctgaacaagtgggaggacgacatccagtccctgcgtgccgccggcatcctctacgcttccgagcagatcgccgacctcgtggcccacggcgtggacggcgtccacctgtattcgatgaaccaccccgccaccacgcgccgtatctggcgcaatgcggaaccgttgttcctcggtacgcaaggttgacgcatatcgcagcgcggcgcatctcaatgcgtcgcgccgcacgttaatctgctggcgaaacccagagttcccccagcggccgatggatatcatgaacgtacaagccaaccaaagcgatggaaggaagtccgttatgtgcactggtgtccgtttctccgatgatgagggcaacacctatttcggccgtaatctcgactggagtttctcatatggggagaccatcctggtcactccgcgcggctaccgctatgacacggtgttcggtgcgggcggcaaagcgaagccgaacgcggtgatcggcgtgggcgtggtcatggccgataggccgatgtatttcgactgcgccaatgaacatggtctggccatcgccggcttgaatttccccggctacgcctcgttcgtccacgaaccggtcgaa

SEQ ID NO: 682 - DNA, 3963 bp, Unknown
  R14_15m  MAG No. k141_22311
caccctcaagtacggtccgaacggtgagcgttccattcagggcatcaagcgcatctccaagccgggccttcgtcgttacgcgaagtccgactccctgccgatgccgctcggtggcctgggtatcgccatcatctcgacttcttcgggactgctgactcagaaggaatgcctcgaccgaggcattggcggcgaaattgtcgccttcgtgtggtgagaaaggagagctgaaacatggcatcgcatattggtaagctccccatcgccatccctgctggcgttgaagtcaagattgaaggccagaacttctccgccaagggcgctaagggttctgactcctacgtggttccggaaggcatcaccgctgccgttgaaggcaacgagatcgtcctgaccgccgctgatgacctgcgtccgacccgtgccaagcacggtctggcccgctccatcatggccggcatggtcaagggtgttcacgatggctactccaagactcttgagatcgtcggcaccggttaccgcgccgtcgccaagggcaagggcatcgagttcttcctcggctactcccacaccatcaccgtcaacccgcccgaaggtatcaccttcaaggtgaccgacgccaaccacgtggttgtcgagggtattgacaagcaggctgtgggccaggtcgccgccaacatccgcaagctgcgcgctccggaaccctacaagggcaagggcgtcaagtacgccgatgagcgcatcctgcgcaaggctggaaaggctggtaagtgatatgagcgtagctattctcggaaaaggcaagaaggttgctctcaagcgccgtcacatgcgtatccgcaagcgcatctccggtaccgccgagcgtccgcgcctggtggtcacccgttccaaccgtcacatggttgctcaggtggtcgacgacaccaagggcgtgactctcgtgtccgcctccaccctgcaggccgactttgccggtttcaagggcaccaagaccgaggccgccaagaaggtcggcgagctgatcgccgataaggccaaggctgccggcatcaccgaggtcgttttcgaccgcggtggcaacaagtacaccggtcgcgtcgcagccgttgctgatggcgcccgcgagggaggtcttgcactgtgagcgacaacgaaactaaggaaacccaagtggctgaagaaactcagaacactgtggcgaccgaatccaacaacgaggaccgcaagggtcgtcgtggccagcgcggtgaaggccgtcgcggcgagcgtcgtaaccgtcgtgaagaaaaccacggcgacgagctgctcgatcgcgtggtgaccatcaaccgtgtgtccaagacccacaagggtggccgtaccttcagcttcgctgcactggttgtggtcggcgacggcaacggcaccgtgggtgtcggctacggcaagtcccgtgaagtcccggccgccatcgccaagggccagctggacgccaagaagcacatgttctctgtgcctcgcgtccgcggcaccatcacccacccggttcagggtcacgacgctgctggcaccgtcctgctgcgtccggccgccccgggtaccggtgtaatcgccggtggctccgtgcgcgccgtcatggaatgcgcaggcatcaccgacgtcctgaccaagtcgatgggctccgccaccgccgttaatgtggtgcgcgctaccgtcgacgccctcaagcagctcgaagagcccgaggagatcgccgcccgtcgtggcctggcgctcgacgaggttgctcccgatgctctgctgcgcgcccgtgccgccggcattgccgaggctcgcaaggctcgcgaagaggctgctgccgctaaggccgccgaagagaaggatggtgagtgatactcatggctaagaacctgaagattaccctgcaccacggcatcgtgaaccgtaccccggctcagcgcgccaccgtcaagaccctcggcctcaacaagatcggtaagaccgttgtccgcgaggacaccccggccaaccgtggtctggtgaacgccgtgcgtcacctggtcaccgttgaggaggttgactgattatggcagataacgaaatcctgcagatgcacgacctgaagcccgccccgggcgccaagaaggaccgcacccgtgtgggccgcggtgaaggctccaagggtaagacctccggtcgtggcgccaagggccagacgaagcgtaaccacgtgcgtccgggctttgaaggcggccagctgccgctgtacatgcgcctgccgaagcttcgtggcttcaagaacccgttcaaggtcgagttccaggtcatcaacatcgctcgtctcgtggagctcttccccgagggtggcgaggttgctgtggccgacctgatcgccaagggcgctgttcgtgacaacgctccggtgaaggttctgggcgacggcgagaccaccgtggctttcaccctcaagggtgttaaggcttcggcttccgccaagtccaagatcgaggccgccggcggttccgtttccgaggactgattagtcctacggggagcgcaataggctgtacaacccccgcccgccaataggtggacgggggttcccttttctcaaaaattgttgttctgagcgcagagaagcagtctcaacacaatgatcgttttgagtatgcttcccccgttcagtacgacggagcataattcagataacattcgcgagacatgaagtggccgaagtaggcactgtagactatgctcattcgttagtttgtgtatttcgcgtgattggcgcgctattgggaggaaatctaggtgaggacactaatccaggccctgaagaccaaagagttgaggaagaagattctcttcgtcctgttcatcatcatcgtctaccgcatcggttcgttcattccgacccctggcgtggactacaacgtggtgaacaagtgcatggccactgtcggcagcgcctcccaggagaacttcatcggactggtgaacctcttctccggtggcgctatgctccagctgtctatcttcgcgctgggcgtcatgccgtacatcaccgcgtccatcgtggtgcagctgctgcgcgtggtcatcccgcgcttcgaggccctgcataaggagggccagtccggagaggccaagctcacccagtacacgcgttacctgaccatcggcctggccgtgctgcagtccaccaccatcctggtcaccgcccgctccggtgccctgttcaactaccgctgcgaccaggtcatcccggacggctccgtgtggaacctcgtggtcatggtcctcatcatgaccggcggcaccggcctgatcatgtggatggccgagctcgtgaccgacaagggcatcggccagggcatgtccatcttgatcttcatgtccatctgctccggcttcctgccgcagttgtgggagatcggctacggcaccaacggcaagaacggcgactggaccaagttcggcatcgtcgtgggcgtgctcgtggtcatcctcatcttcgtcgacttcgtcgaactgtgccagcgccgcgtcccggtgcagtacacgcgccgcatgatcggccgtaagatgtacggcggctcctccacctacctgccgctgaagatcaacatgtccggcgtcatcccgccgatcttcgcctcctcgatcctcgccatcccgaccctgatcgcccagttcggcaagtccgaccagtcctgggtcaagtggatcaacgccaacctggcgaacaccacatccgtgtggtacatcgccctgtacgcgctgatgatcgtgttcttctgcttcttctacacctcgatcacgttcaacccggacgagaccgcggacaacatgaagcagtacggcggcttcatccccggcatccgcgccggcaacgccaccagccgctacctgacctacgtgatgaaccgactcaacaccgtcggtgccgtctacctgctgttcgtggccctgattccgaccgtg

SEQ ID NO: 683 - DNA, 3360 bp, Unknown
  R14_15m  MAG No. k141_22394
cggcagacgattcggagacatcaagccgcataaggcgaaaggggcagcaatgccagcatcaacaccgtcagcgaggctgacacctgagcacatcgcccatgtgcgggaactgcgccgcgcggccatccgccgccggcagatcctcgccgtatgcctgcttgccataaccgtgttggtgtttgccgtatcgttccccctgcatttcagcccgctgcttgctcttattccgttcgtgctgttgttgctgctggtggtgctgggagccaatgcctcacgccaggcccggcaatgggagcgcaaggtggtccgctacgagcgggcccatagcggtacgggctggtccaagaaaccgtctgccgagtccaaggacagcaagcgcgtgaacaaggccgaaccggttgcggccgtaactgcgcctgccgagcatgttgaggatgctgccaccgaggtcatggaacagcggcagattcgccgcgcgttacgcgatgccgagattgagcaggccaaggccaaggcgttgcgtcagtccgccgccgcatatcaggccgcggcggagcacgccaaacagtctgagaagtctgatactgcacagtccgccgccgataagcctgccgccgaaccgtctgctatggtcgatgaatccgctgaccgtaagtccgctgccgaaaccagtgaatcttccgccgcgcccgatgcctccgctcgcacggataagtcgactaagtcggataagtccgtcgcccctcgagttgaaccatcgcttacggtgcgtgatgagcgtgatgagcgcgacgatgccgctgccgacgctacgtcggaactggtcagcgtacgccctgcccgagcactggatgtcttcgatatggccacctcgcaggatctcatctccttcactttgggcggggaacataacgccgacaacgctccggaaagcttggagatcaagtcgacccgtcaggtgtccaaggcggaacctgtcgaacccgcagtggcggaaaagttgattgacgaggcccgagccgtcaaggccgcggacgatgccaaggccgccgatgcgggcaaggctgtcagtgccggaaacgctgtagacactgagtcggagcagcgcgatgatgccgatacgaacgccgctacggacgccgatgacgaggctgcaaacgccgcccagcgagccgcattccacgaatccgaggagcgtgccgacgtcgaagcgccagcggcgaccaccgattcgttgggcgcaggcttggactccattcttgcccgccgcggcaactgagcgttgcgattcgccgattttctctcacagcgttagcactcgagttggcagagtgctaataatcgcgctacgatgtgtcctagcgcaaagggacaacgcaagtgatcgtcagcctcttgaggcgttctggcgcggcattatcgaactacaagtagatacgaggtgacccacagtgtcgattaagctcacaccgttggaagacaagatcatcgtcaagcaggccgaggcccagacccagaccgcttccggtctgtatattccggacaacgccaaggagaagccgcagcagggtgaagtcctggccgttggcccgggccgtcgtgacgacaagggcgagcgcatcccgatggatgtcaaggtcggcgacaaggtgctgtactccaagtacggcggcaccgaagtccactacgagggtgaggactacctcatcgtcggcgcgcgcgacattctcgccatcctcggctgattagtcgcctagcgaacttcaacaaccccgactgttcccacgaacagtcggggttttctcttgtcaggcggaaaggggctcccctcagagaggggagccgaaaaccgctcccgccaaacgcccagccatgcctgctatgcataaaggtgcatgcgcgcagcgtagttgagttcggcgttgcaccgcatctacactgggtaacggattggggtccctatggaagaggctcagtcggcgacttggccgagcggcttaagacattttgcacaagacggcagtaggtcgacggtatgttgtttttttccgtgtcgcaggttcgtggtgtcgtcgctgtgccaatggttgtctctctaccgacgctgagtgccgtggcatgaggccagcgtcggcagtgggccacgaaatggcgatgtgccgatgctgagccgcgttggcgtcgttatagggccagtttttggaccattgccgacggcaaatcggcgttttgtgtcggcgacggtccaaaaactggcggtctgccgacgataagtgccgtcatcgtcggcagaccgccaggtattgtccctgtgccgacgtaaaaagccctgccatcgtcgtcaccgagccatcttgtgactcactgacggcggcagcagggcggaagaggccgaaatcatgcgcgcggtgcggtctcacacctcgaatccggcctccaccagcgcgtgatcgatgtcgcgaatcaaatcgtccgtatcctccagacccacggccagacggaagaagccgcggtggaactcaggcgggtacaggtactggcgctcgtcatcctcaccgaggaacacgatcagcgattagtcatggccgagcgagacggcagacgtaatcacattgagcttggaaacgaatcggttgtgcccgtcgtggtcggtgtcgaggccgaacgacagcacgccgccgaacccggagtccgggcgggccagctggctggccgccacctcgtggtgcaggtgcgattccagaccggggtacgccacgaaacgcaccacatccagcgattcgagatgcttggcaatcgccaaggccgaggcgtcgtagggcagtgcgtaggtgttcgccagcgtgatggggcgacggatcgcgccggtttcggcgtcgaccccgttgccgaggtgaatggccagcgtgccgaatccgagcggctggtcgtcgaatgattgtccgtgatgtacaagatcagaagccatgcgcccagcatgccggcatgcgctgtgccgccgcaagcaggcggcgccactcgaaaaccgcgccattgcaaggttctggaacaccatataagaaaaatgattggtagaagtgcggggtgcagccttggtcggggctgtttgcagggccgaagcggaccctgaaaccacgctgtgagacacgccgataaaaccgcagaattccgcggtaaaacaaggttcgcgtagaggtcgatttgcgtacttggaaaatatgtggttatatagccaagttgcctgttgaggtcaaacaccgcggcgggaaacagactggcggatttcccaagcggtcaaagggagctgactgtaaatcagccgcttcgtgcttcagtggttcgaatccactatccgccacg

SEQ ID NO: 684 - DNA, 15061 bp, Unknown
  R14_15m  MAG No. k141_22666
ctcctgttcgagttgtatgggcggggaactcgaggtcggccagaatgtgtgtccggaatggccggtcaggccttgcggcacaacggttgagtgactttcgagttggcgtggcagattgggtggatgaacacaccttgttgcgccgtgtgcggcgagccgatgaagcggaacggaaggacgagctcgggacggatcaggtggcggtgccggaacgccggctgtgggagctcacgcacccagtcgcgcgacaacagcgcccgtgatctgcggtgcggtctggattggctgttctcgaagcagtcgcaggccgagcaccggctgccggcacgcacgctgcgccgcaggtgcgagctcatgtggggcctgtggccgcccgtgccgctggtggacgaggtgcatcatgtggtgcatgtggacggcatccacctgcaccgcgacgcggtggtcctgatcgcggtggccggcgggcacgtgatcggctggcacgtcgccaaaagcgagaaagcggcggcatggcagtgcttgatggcgcgcatcgcaccaccggacgtgctcgtgtgcgacggcgggggcggcgtcctcaaggccgcgaaggccatgtggccggatacgaggatccagcggtgcctgttccacgtgcaggccaacatcctcgagctgaccggcaggcggcccagactcgaggcgggcggacggctgcgccgggtggccctgtccctgccccgcgtcggggacgcgggcggcgcggccgaatggctggtctcctacaaccagtgggagcaggacttcgcctcgttcctcgacgagaagagcgaatacgccgacggcggcgtgaacgacatgcaccaaaggctcgtcaaggcacggcgcatgatccgcaggcgcatccgcgagggccacctgttcacgttcctcgacgaggggctcgcgtccgtcggcccggtgccgtccgccaacaacctcgtcgaatcatggaacgcgcgcctgcgcgacatgctgcgccgccaccgcggactgcggctggtcagacggctgaaggcgatctgctggtggtgccaccagcacacggaacgtcccgagaccgacgcgtggctcgcggccaacgcgatgaccgacgaacgactcgagcgcctctaccggcaggcatgggaaagaagcccgcaaggccagtacgagacattcggcatccccgcaagatacggcaccggcatcgactggaacgagttccacacacgggtcgaatggcagtcgaacgactagaccgccggacacacattttggcctataacccagccttgcattgaccggccagcccgccggagtaggtacgtgacggatatgcaaaagccccgcacaaggcggggcttcattgtggtggctccgaacggcgtcgatccgttgacctagcgattttcagtcgctcgctctaccaactgagctacagagccatgaacagtcaaaaacccggataatccgggtttcataaccattccagcgaccccggccggacttgaaccggtgacctccgccgtgacagggcggcgctctaaccaactgagctacggggccattgttctcacttgcgtgaggcaacagatgtatatattactgaaattcgccggtcgtgcaaatttcggcgtgttccgcgtaatttcaaggtttttgctatcaccagcacacggacacgtctgccataaacatccacaaacgacgaagggcgcgaccggaaccccggtcacgcccttatgaacagaagcacttcacggcatccaccgcaaagcaatcgtcaatctcagtcagcctgcttccaggtgtcgacgtcgatgtggtgttcggggttggcctgccaggcatcccacgcggacttgacgatgtcttccacgtcgtacttggcgtgccagcccatctcctcgttgatgcgcttcggggagccgatcaggtgcggcgggtcgccggcgcggcgggccatgacagcctcggtgaacggcagaccggtgaccttcttgacttcgtcgacgatctggcgcacggaggtgccttcaccggtgccgacgttgaaggcgtcgtacttgcgctcgtcacggtcgaggtacttgagggcggcgatgtgggcgtcggccaagtcggagacgtggatgtagtcgcgcacgcaggtgccgtccggggtcgggtagtcgtcgccgaagatggcgggggccttgccctgcttgaggcggttgaacagcatcgggatgaggttcagaatagccgggtcttcgagttcgaccgggccgcagccggccacgttgaagtagcgcagcgcgcagaagcggatgccgaacggctgctcgcaggcgcgagccatccactcgccgaacagcttggtctggccgtaggggttgatcggcagcatcgggacgacgtcctcaggcaccacatcgaccggcggcacaccgtaggtggcggcggaggaggagaagacgagcttcttggcgttcttggactgggtcatgccggtgagcacgttgagcatgccgttgatgttctgctggtagtaccacagcggcttctccacggattcgccgacctgcttgcgagcggcgaagtggatcacggagtcgacgccttcggcatcgaggatttcggccagacgctcgccggcacccggggcggcgatatccatgccgtacaggcgggagccttcgatgcgagtgggcttgccgtagctcagatcgtcgacgacgacgaccttttcgccggcctgatggagtgcgtgaacgacatgcgcgccgatgtagccgcagccgccggtgacgagaactgtcatagttgacctttccttgtgcgggttgcaagtgtcggccgtgtggagttcagcggctgttcacttttggtccgctttgttaccttttgaaacaatttgagtatatcacacgaacataatcgcacaaaacggtggtgtcgtccggcaatatctgcattcattaggtcgatttggcgttcattaggtaggtcggcccggagccggcccgcacggacaccgggtaaatggcttgatatggtggttggtatcgcacaccacccacctaatgaacgccaaatcgacctaacgaatgaacagcggtgcggcgcacaaggaaaatccgaggaatatatgaccgatcccgaatccacagcaatcgattccgtcaccgcgatggccgcggaccacaccgaggcaccggcgcaccccctgcacaaggtgctttccttcgtgcgccgctccggacgtttggacgatcgcctgcagcgcgcctgggacaactatgccgacacatatctgttggatattgcggccggcaacctgctggacgtgcgcgaaggcgtcacgctcgaccgcgcgttcgtggagtcctcatggggcaacgacaatccgctcattgtggaaatcggcaccgggcagggagaaaacgtggcggccgcagccgcggcccatccggagacgaacttcctagccttggaggtctatgaccccggtgtggcccacacgctgctgctcgccggcaagcaggggctgaccaacattcgcgtggcccaggtcaacgcgcccgagctgttcaaggtgaccgcgcccggcaccgtggccgaggtatggaccttcttccccgacccatggcccaagaagaagcaccacaagcgccgcatcgtgcaggaggccatggccggcgacattcatcgcgcgctggtcacagacggcgtctggcgcatcgccaccgacatcgaggactacgccctgcacgtgcacgaggtgatggacggcctcgatggctggaagaacctgggcagcataaccgtcagcctcccgctggagcacgtgggcaagggcaatgccgacatggccgccgacatgccgcacgccgacttcaccgaatccgagcggttcgagggccgcgtgctcaccaacttcgaaaagaagggcctggccgccggccgcgtgattcacgacttcacctatcaggccgtcgccctgcactgattgcgacacgccgaaatgccgtcgatttgcataaccgaacaacctcccgtaaagtaactcgagttgttcgcccccatcgtctaacggttaggacaccagactttcaatctgacaacgagagttcgactctctctgggggtacgcttccgctcctgtcgccatcattgtgattcggcaggagccttttgttttcaacgggttgcacctgccggcgatgtggcgtgccaggagcgtcgaggtcagggctgccaccaacgatgcacctttgtcggcacctgtgttcgtgtcgtcgttgttgacgatgtcgtacagcgtgtcgtcgagcagttcggccggtggcatgccgagggtgacggctgcggctgcgatggcattgaggtcccatgcggcgtcgaggttcattctggccgatatggtggccttggtcacgccggccgcctcgcacagggtctgctgttcgagtccttccttggccaggtgcagtcgcacgttccatgcggcgacttcccgcaggcgttctgccagctcgatggcctgtgttcttgccgtggtgttgccggtcatgtccgttcctttcgtctgcgtgcccttggagcttgtgcgcaccatgctatgggcggtgcgcttggttgcgcaatacgaccgcctccccagttcggtctggtcgaactgggccgggaaaaacatggaaaacgaaagcgctccgcaccgtgttggcgcttggtgcggggctgatcgacaaccttgggcgggattccgggcgattcaagtgacaagagtcccaggattcgccctccattgaaagagagttatcgcaatgaccaatcctatcatcgcttccgccccgcgtgcggcgggagccatgaaaaccatcccgtcgctgcgtgtgcggattgctcgcgcacacttgctggcggtgctgctgcatcccgcgcgctcgtcgcgccgtcgccgccggggcgtctgagatggtccgggctgtggcggcggtggccgtcgtcgcaatcgttgtgtgtctgctggtggtgtgggcgttgtgccgtgcggccgcgctgggcgaccgcatcggcgaacggctccatgacgctaggggtcgcggggaggatgcgcgatgagcgggccggcggagcagtgggcgtggcagttgcaggacgagcagctgagcctgtcggagaagttcgtgttggtgtatctggcgcgaagggcgtattacgacgacgggtgcggcgcgtggccgtcggtcaacaccatcgcggcgcattgccattgcacgcgccgttccgtgctgcgcgcgttgaaacgcttgcaggagctgggctacttgcgcgagggcgaccaagagctggccgcgcgcaatccccgcagccacgaacccatccccaggggccatcgctccaaggtatgggacgtggtgatgaagggcgcgcggaccgagccggaggacatcaccgatcccggcgagaccagcgcgggcaagggtgttccggcgaagcctagtgcggccggaccatcgcggagcaaggagtgcgcgcggggtgacattgtgtcacctgacgcagtgtcacctgacacaatgtcactccagggcgattccgacggtggggtgacatcctgtccgaagagaggtgacgtcatgtcacccaatagacaagtgataaccaatgctccccttgtcccctacggggacattcccctcgccggggaacaacccgaagaggaacgaagcgagcatgatgccccggattggcgtctggcgctgccacctcggggagtgcgcgacccattgtggacgccaggggcggaggatgcggacgagcgggtgcgttcccgggccttgcaggaggttcgcgtgctgacgctgatccatgaccgcgtggcggccatcgacccgaaggcagccaggccggcgtcgatgcgagaccgacgcaaggtccacgagctgctgatggaacgctctctgacggaggtcgagacgatccttgattgggcgtatggcaatccgcgctggatctcatggctggtggacggcacgatggtcgaacgctacttcgcgcaggtcagcctcgacatgcgcaccaagcgggcacgaggtccgcagcattccggcagccatgccgctgctgccgagctcacgtcggtccatgatccagaccggccggtggcggttagttcgggcttggcctggcgggtgccggtctacggcggcggcatcctgtcgatcgcattatgccaggcgcacctcgacggcgaaaccaagcaggcagagtgtccggtgtgcgcctacgaccggcgcaaccaagccacccacgccatcggcctggagaaaaccggccgtgccgaagacaaggaatcccacggggaggccaggccatgaccgatatggcggatgccgcgccccgttcgccggaggcgtggaagagcatgggatgctgcgcggatttcccgcagccgtgggccgacctgatgtggggcctggagttcgaggacacgcatcccctggcccgcgtgttccggcaggcgggcgcgtcggtatgcgagcacgactgcccggtgagggccgaatgcctggcctacgccggtgccgccggcttggaatggggcttgtacggcggccgttcgtgcaccgaccggcgccagatcgcccgcctggcggaagccgccggcgtgccctgccgcgaccgcacggtgccctgggcccggcgctggggcctgttcgtcgattggctccaagcccatcccgaggtcttcgacacggcccggggcaaggccagcatggaacgcgggcaacgccgatggcgcgccgcaggccgcgcccaacccaagaatgagccgcatgaccgtcaagtcatcatgcaagcaggaaaccaagcaatccgacaatcaagcaatcaaacaaccgaccatgccggcgatccggcgaatggtcccgaatccaaggaggaagcatcatgcgagtagcgttggcgaacgcaaagggcggggtggccaaaaccaccagctgcatctatctggccgccgtgctggcccggcgcggcatcgaggtggcagtctacgacgcggacccgcagtccagcgccagcctatgggcggccgccgccgaacaggcgggagacccgctaccattcgacgtgctgccggccaacatggccaccctcgcccacctaggcggcgccccggccacaaaggaatggtcgatcatcgacgcccctccgcaaggcccgctgctcgacaagacgctggccgtggccgatttcgtcatcctacccacctcggactcgccgatggacctccagcaggcatgggacacgctcgaccgcgcccgacatgccaccagggcggccctgctgccggtgcgcgtcgaggcgaacaccaacgcctgggcccagaccctagccacgttggagcaaaccgacaccgcgcgcttcgacaccttcatcgccaaacgacaaccgatcaagacctcgctcggcatgaaccccaaacaactgtacgaataccgggaactggccgacgaactgacgcgcatcgccaaggaggaactggcatgaaaggcaactaccagccactgccccgacccgtgcccttcgacaaagtcctcgaccaacaggccgaagacaaacaacccaccgggaagaacaacgccggcgaaccgctggtcatgctctccctgcgcctgcccgtccggctgaagaaccgcctcaaaatcgccgccgccgaacacggcacgccatgcaacagatcctgcgccacgccatcgaacacgaactcgaccgactcgccagcaacgactgaataagggacaccgtacatgccgagatgcgaggattgacgaattgatagttgctatggtaaaatccaactaaatttgatggaacacctgacatgccaaggtggttccgaagcaggaaggccttagagcattggtgatttgagcagtggcggattgcatgaggagagattccgcgtgttctgcgcattatcgcgcgtatctgccattgtaccaatcgcaatgcctgattcgatgaagttctcgttagcatagcgactttcggtgccgtcacgaggactgctttctgaatgcagcttggcaataaatggcacagtccgccacttttcgatagtcacagtttgattaatgcgccttatcgaaagaggcttccatgagtcagatattgacactaaccgatatttcctactgctatccgggcgcgccggaaccattgttcgaacatctgtccgcgacattcgcggccggctgggccgcagtgctgggagacaatggcattggcaagaccacactggccaaactcgcctgcggcatgctttcccccgattcggggacagtctcgccgaacccgtgcaagatggcagtcgcctactgtccgcaacgtactgatgaaacgcctacgaatctggatgatttcgcggcggattggacgggcgagaccatcgccatccgcgacgcgctgaacatcggcgacgattgggcataccgatacgagactctctctggaggcgaagccaagcggctgcaaatcgcttgtgcgctggccggcgatcccgacgtgctggtgttggacgagccaaccaatcatgtggacggcaggacgcgccaagccatcacgcaggcgatgcgtcggttcgatggcataggcatcgtgatctcccatgatgtcgaactgatcgacgcgacgtgttcgcgctgcgtgatgctggagcgccgacatgcgcgtgggcgtaacatcacggcggcgaacacctatcagggtggatatacccaggccgcgcagcagatgcgcgacaatcaacgtgccgatacggccgccatacagtccactcgaaaggagctgcaacgcatgcagcgcatcaagcgggagcgggcgcagcgtgcgcgcgaactggatatgcggaagaatcagggaatgcgcatcgatatcaaggacatcgacgctcgcaaagccctgaaaaacctgaaaccggctatcggcaccactgtcgcacagacaagcgcgcaattcgacgggcgtatcgccgccgtcaccgacagacttgctcacctcagcgaagcggccaaacgctacgacggcaccatctggatgaacgtcatgccgagctcacgcagggaattgacgcgcatccccaacgaccacgccatcgcggaccaacccgatatgctgagcatcggcccgcgcgaccgcatcggcatcagcggtccaaacggcagcggtaaaaccgcattgatacgacgattgatcgaagcgctggagcgtgatgaagcgcagcggcattcggagagaatgccatatctgtatattccccaaaattccagcgacatggataccgccaacgcaatgaaccgcttgcatgctttgacggacgagcaacgcgccattgtgctcagcgcctacgcccaacttaacgccgaccccgacagactgctcgccggcggcaatccctcgccaggcgaactacgcaaacttctgttgtgcctcggcatgattgaacagccacagctcatcatcatggatgagccgaccaaccacctcgacctgcactccaaacaggcacttgctaatacgctatcctcctatgcgggcgcattggtcgcagtcagccatgacgaatggtttctgaatgccgtcacatcgattcgatggcgatgcgcgtcatgacgctatctatgagtttacgttccttcgtaagacttggatatcggcaagacgcattccttttcgtatgaagctgtatcgatggcaatgaccgagcaagaggacaccagtatgacacgaccgattatgccgcgagcacatggcaaaaaacttcacatggaggcgaacatggctcatgttcctccggccatcgcaatcacggcgatgcgaccggaggaatatccgttgctcgtcgagttcctgtatcaggcgatccatgtgccgccgggaaccccggcaccggacaggagcgttgtcgagctgccggaattgcggcgatatatcgagggattcggacggcctggcgacgcctgcatggttgcccgcgccgagccaccgaacggttcgcaggccgtgggtgccgcatgggcccggatcttcccgaacaactccgcaggctacggcaccatcgatacggcaacaccggaagtctccatatccttgcttcccgactggcggaaccgaggcatagggcaccgcctgatgacggcgttactggaccgactgcgaaccgatggtcacgccgcagccagcctctcggtccagcgcaccaacgccaacgccctccatctctacgagtcgcttggcttcaccatcattagcgaacacgacggtgaactggtcatgcgcgtggctctcgcggattgagacagtgttccacacatcatccgcatggagccagtgcgtaagccacccactgtgatatgtgcggctgcaagtcccgcattcatacaagcaaacaatctgacatacagatgcagtctattccttattatgttttcggctttgctcttgataagagccagcaccaccatccatcctcgatgaatgtgggcaggctttcgcaatgtgccacatgacgcaacgtgtagtcggcgtgaaccgcaccaccgcgcaggtgttcacgcatgaagctcacgaatgatacgacctcgaaaagctttttgggaggctcgttcccaatcttgtcctcagtgtgcagcctgtcagtctgaagtcagctttcaactggcaaatgttcaaagagacgggctagcgcagtggatagatccgctccttcgaaagcaaaagtcgcagcagcacgtgtctgcttgtccgcgttgaaggcaagcgagacaccgacggctttgaacagcggtaggtcagaacgactgtcaccaatagcgatgcaattcgaagcttcaactcccaagcattcacattgctgcctcatgaatgttactttggtttgttcatcggcatatgccgctgttttaccaataaacacgccatccttgacagcaagttctggaccgcaccatgcttcaaatccaaatctctgcgcaaggctctcggaaacgactgtccaagcgcaggatgcgaggactggcttgattcccctcgacttgcattccgcaacggactgtgcgattccttgcacaagcgggagatcgttcaaccatccgtgaatttcacttacccgatggccagtgtatccacgagcatcaatatcgcataccgtgtcatttccgatctcaccgcgtgcgtatcgatcctctgcatctcgcatcctgtcgccggtacccaaccggtccgcaataaatgcgccagagctaatgccgtatgtgagcgttccgtcgatatcaaaaaatgcaattcccgccattcatccctcttcatttactggttcagcccgaacctccagccggtaactaagccaatagcgtatcaaaaggcacacatatcagaaaagaaaggcagatagtcccattaaaccgtttcatgcgattgcagttgtccgccgctggctacggctggcagggggaagctgggaaaggcgtcccggcggaaggcccgccggtgcgttcttcttccagggacaaggaaggatgcgggcggccgtgaatggtcgcccgcatttttccgtatccgtgtgaaacgggagggagcgcatcatggggcgcttccgatgaaaggacggatacgtatgtcaggtgggaagaagagcaggcgcacgatgctgatggccgccctgaccgcaggagcgttggccttgggatgtctggcacccgccgcgttcgccgagggcggcggtggcggttccggcgagggcggtggcggttccggcgggcaggttccatcgcagaccgccgacgtgcattggatctacaaggattcctggcccgccactctggagggcatgaagcaggcgatacgtgattcgggcaccaccctgtcttccgatctggaggatgggtcgaatcagttcgtggatatgaacgccatcctcgccgacgcgatctcggagtgcaaggcctcgtacaccggggagggtgacgcggaatgccggatggttgccgtcggctacgcgcgcctcggcaacggcgtgttcagcggctcctatgtcagctcgaacgcgcgtcagcgttgggaatcccaatgggcggccgaaggacgtggcacctaccagtaccaaggccagtcgtacatgaccggcaccacatggaccgaccggcttggcgtgcgttcggtggacagtctggtgcaggattccatcaatgccaatcccgatgcctcgttccgtgtggtcgtgttggccaagaaccagccgcccgtcgattatccgttgaccgtcaccacctcgcaccgtcagcagaccgacatgcaggtcggctcgaccacgccggtcggcgacaccatccacgcggacaacggcggttcgtcgatcaaggagagcctgcgcggcaccgcgatcgtgcattacgatggcggcccctacacgccggcgggcagcgtgagcaagccgatcagcttcaccaatagcggcgacaccgtgatcgacaacctggcctcgccgggtgatttcggcatggagtcctgggccgagggcacgtattggatcgacatccaagtgcccgaacagggaagcatgcaggcggccgtggacaccacggaccgggatccggcggagacctggaaggtcagcgccgtgccgccggcagatccggtcaagagcatcgaggaaggcgtcagcgccgaccggatgaccaaccgcaccaccatcacgtatgggaccgggcggggcggttacgagctgagtttcagggacgtgatcgaacccaacggcgtcgatcacacggtggatgacttcacgcttgtggacgccaccgacagcaatcgcgatgtctccgatgagttcgagatcgtctgggaccgcgcgtcgaacacggtcagcgcggttcgttcggccgacaggggcatgatgccgttcgatcatgagtatgtgttcggctttgatgtgaccgtcagcctgccatccgattaccagaacatcagcgaccatgcgtggggcaagtggaaccagctgcccgaggccgatgcgggagaacgcgagttcgacacctggcggcccaatcccgacaaaagctggatcatgcttgatgccgatggcaagtggcaggccgtgatcgaccccggccgcaccaaccagaccggcggcgacggcaaggtgttcctcgatggagaccgtgtggcctccgtggtcaacggcaccgtgccggcgaacctgatccaggccccacagacgctcaccttggtcgatgattggacggcagccgattacctgttcgacgccgatgaagcggcggcagtccgcgcgtacgaggcggactcgggcaccgatcgttccagcagcgtgagcgacatcgccaaccgtggccgtgacatcaccgaccagtggggcatcacgatcgatggcaccgtggtcaccgccatggccaaggcctcctaccttaccgggttgaagggcttggcgaaggccaggcagatcacgatgctcgtgcccggccgcgcaaactacgccaacggggccggggcgggccaggtgcgcgacgacttcgacatcgaagcggacgacgagatcacgttctgcaccgccggcaagaacggcgcggagctgaccaacgccggttcgcagaccatcaacacccacacggtcgggaccaacgagccgaaggtctgcggttacgtaccgcccgtggtcaaggatgtggtcggggaatcctcccaaggcggcggccaggacagcgtggacggcaagatcgtcttccccggccagcgtctcgaataccgtctggaaacccagccgcacctgcccgacagtctcgcctacgccatcgtcgaggtggcggtcaccgacacgtatgacgagcacttccagccggacaagcagaccctggaggtcaccgacctgaccaccggcaagttcatccccaagagccagtaccgcagcgagtggaacgacgcgaaccatgccgtgcgtctcgtgttcgccgacgactatgtgcgggcgaactggctggcgggcgcgaatcccaggatcatcatcaggttcgagggcgtcgtggccgaggatgccccggccgacaccgtggtcggcaaccagtgggcgttgaccttgaacaactcggtcacgccaagcaacaaggtatggaacgatccgcccgacttccagccgggcaaggaggacacccaggccgacccgtccatttcgatcgacggcaagaccgcgttgctcggagaccgcatctactatcggatcaatctcgacgccaagcagacgaaccatgcctacaaggtgtggcggctgggcatggtcgatgactgggacgacgaatacctcgaactcgacgagaaccatatcaccgtgaccgacaaggccaacggcagggatgtgaccgaccggttcaacatccaggccatcgacggcgtggcatacgtgttcgccaaaaccgttgacaccgaggttccggcgacgggagagaccatcaagggcgacccccagccagccgatctcaagatctacgccgcgcttggcgacaaggaccacgacccgttgaaggacccggccatcgaccagtcgcttctgggcacctcgtatgaggtcacgctgccgatgaccgtcatcaaggtcaccgacgattacgtggtcacgaacacggccacccagctggtcaacgacgtgcgcaaggacaccaaccaggtttccaaccccttgaagccgatcaacccggccaaggatgtcgtggtcaaggtggacgggcagagcgtggatggcaagagcatctatctcaacagcctgttcctctaccggctcgacagctccacgctgccgcccgaccgcgcctacccgcaggtctccgactggtccatcagcgacccgctcgacacccggtacgacaagttcaccggccaatgggccgtctacgccgcccgcgacctcatcaaggacggcgagaccctggccgagcggggcgaacgcatcgccggctccgacttcgacgccagccgtttcggcggagaactcttcgagctcgccacc

SEQ ID NO: 685 - DNA, 18877 bp, Unknown
  R14_15m  MAG No. k141_22891
gaccggcaagccgatcctgttcgcctccaacggtgagggcctgaaggatttcgaggtcttccacccggaccgcatggcctcgcgcatcctcgacatgggcgacatcatgacgctcatcgagcaggcgcagaagcagttcgacgaggaggaggcccgcaaggccgccgagaaaatctccgaaggctccttcggcctggacgacttcctcgatcagctgcagcaggtgcgcaagctgggctcgatgaagtcgctgctcggcatgattccgggcatggcccagcaccgcaaggaactcgagcagttcgatgagaaggaaatcgaccgcaccgaggcgatcattcgctcgatgaccccggccgagcgccgcgatccgtcgattatcaatggttcccgccgcgcccgtatcgcctatggttccggcgtgacggtttctcaggtgaacgctttgctgcagcgtttcgagcaggccgcaaagatgatgaagcgcatgtccaatcgtggcggcatgggcggcggcatccccggcttcggcggcccggctatgggcggcggcaagaagaagggcaagaacaagaagaaaggcggcaaatccggcaatccgatgaagcgcgaggccgaggagaaggcattgcgcgacaagctggccggcaaatcctccggttcgaccggcggttccgccttcgccaagaagccgcagaacccggccctgcccgccggccttgaacagatgatgggcaacgtcgatggtggcactgaactgccgccgaacctcggcggaggccttggcggactgttcggccgctgatctcacaacttggctcccctcgcagaggggagccaagttatatctcggttcaatttgtatttcgaaaggaacttccatgacgacaatcttcagcgcggtggcaatcatcgcactgttatggacggccttaagcgcgctgcccgccggtctcgaggcccgtatgccgcttccgtacatgattgccctgactccgctgctgtgggttcctttgatgattctggccgcggtcgccgcatggcaacatgaatggactgcgatgtcgtcgcttattgtggtcgcgctgattgccagctcacagcgcatcaactactggggtacgtcaatcgacccagccggcaaacgcagagaatcccaccgcgaaacagcccgtgaaacaacttcgccgacgctgtcaaaaagccataacagcaatacatcgagcacctcaaacactccgaaggaaggacccgaaacagtccccgatgggcaccgtgaaacaacgcgtgaaacactctcgccccagttctcggttatgacgatgaattgtcgatacggacgcgccgacgccgctgaaatcattcgcaatattcgcgaacgcaatatcagcgtattggccttgcaggaagtcaccgacgacctcatcacacgtcttaccgaagccgacatcaacgaactcctcccctaccatcagttcggagacgccaaagagaccgataatggcggattcaacgtgatctattcccgctacgagccgagcgcagcggtgcccaacgcggtctccatccctgccgccgacgttcccgccatcaccctcaaaacctccggtaatcgcacggtgacgctttgttcggctcacccgaaatcgccgatgcgcggctgcgcggattggtcggccggcattctgggtctgcgagaactcgcccgtgcaaaatccgtcagcaatcgcaacatcgtcgtcgttatgggcgatctcaactcgagcaccgatcacccgagcttccgtgcgttgctcaagtccggattcaaggacgcgagtctgattcaagccgccggcccgaacctcaccttcccgcgctggctcaagtggccgcgcatcgaactggaccatattctgttcacccaagggctcagaccgtccggcgtgacgtccttcgaagtgccggacaccgaccatctggctttggccgcaacgctcaccctgcggtagcgggcgcggcgatcgatcaggccttggccgtgtggcgcgaagcgggcgggaacgtctggaagacccccgcccgcagccgggtggttcgccgtcagaggtccatggagcggatcagattcaccatttcgatcgcgccctgcgcgcactcggaacccttgttccccgctttggtgccggcccgttcgatcgcctgttcgatggaatccgtcgtcagcacgccgaacagcaccggcacaccggtgtcgaggctggtctgcgcgattcccttcgagacctcgttgcacacgtaatcgtagtggctggtgctgccccgaatgaccgcgcccaggcagatgatcgcatcgtagcgcttgctcttggccatcttcgacgcgatcaggggtatctcaaaggcgcccggcacccaggccaccgctatgtcctgttcgcggacattctcccttttcagggtgtccagcgcccctgccagcagttttgaggtgatgaactcgttgaacctcgccacaacgatgcctatcgtgatgttttcggctaccagatcgccttcgaacgtgtgcatttattcctcctccatgttcaggatatgtcccatgcggtttttcttggttttgagatagaaactgtcgtaagcattggcttcgatttcgattggtattctgtcgcggatctccattccatagtcttccaattgatacactttgtcgggattgttggtcagcaggagcatggatcgtatccccaaatccctgagaatctgcgctccgatgtagtactccctcgcgtcaccggggaatcccaacgcgagattggcgtcgagcgtgtccatgccctcgtcctgcagacggtaggccttcagcttgttgaccagaccgatgccccgcccttcctgacgcatgtacagcagcacgcccgagccatgctccgcgatcgtccgcatcgccgcgtccaactgctgaccgcaatcgcaacgcaacgagccgaagacgtcaccggtcagacattccgaatgcacccggcacaacacatcggtcccatcgcccagattccccatgaccagcgcgacatgatgctcgccgttcaacctgttcacatagcagtgcgccgtgaattccccgtatcgcgtgggcatcgccacggtcgagacgcattcgacgagcgtatcgtgcgctttcctgtattcctgcagttccttgatggtcaggagcgggatctgatgctcctgggcgaaccgggtcaggtcgggggtcctcatcatccggccatcgtcgtccatgatctcgcagcacaggccgcattcacgcaatcccgccaaccgcatgaggtcgacggtcgcctccgtgtgcccgttccgttccaggacgccgcccttcttcgccaccagggggaacatatgccccggtctgcggaaatcgaggggttccacgtcatcggagacgcacatgcgagccgtcaatccccgttcttcggcggagatgccggtcgtggtgccacggtaatcgatggacaccgtaaaagcggtttcatggttatcggtgttgtgctcgaccatgggcggaagcatcagcttgtgggccagttgctcgctcatgggcatgcagatcaatcccttggcgtgggttgccatgaaattgacgttccatgtggtggccgactgcgcggcacagatgagatccccctcgttctcccggtcctcgtcatcgatgaccagaacgagcttcccttcccgcagcgcctgcaacgccgcttgcaccgactgatggttcatgattcatgcatcctttctcagaacccgcaccgggacagcagatcctgcgtcagtcccgtccgggtcgtcatcatgttccgcacgtattttcccaatacgtcgttttcgagattgaccacgccgccgacccgtttctcgcccagcaccgtctgcgccaaggtgtgcgggatgatcgataccgagaagtccctttccgtgacctccgcgaccgtcaggctgatgccgtcgacggcgattgagcctttctcgacgatgccttcgagtatctcgtttcgcgccgcgatccggtaccacacggcattgccttcgcgccgcacggaggatatgctgcccgtgccgtcgatgtgcccggtgacgatatggccaccgaaccttccgttcaccggcagggcccgttccaggttgacgccgctcccgtggcgcaatacgccaagcgaggttctgcgccacgtctcattcatcacgtcgacggtgaagcgtcgccggtcgaaatcgacgaccgtcagacagatgccgttcaccgccatgctgtcgccgatatggaggtcctccatcacgttcgtggcatcgaccgacagcgtgcagttggcggcgctcctccgtatgtccgccaccgttccgacttcctccactattcccgtgaacatgaatacaccacctcgctttccaccagataatcctctcccactcgggagcaggcgcggggccggagcatgacggcgtcggaaggcagggcgactccttggccgcccaccgggcttttcgcggtgccgccgaatatcttcggcgcgatgtacacgtgcgcctcatcgacgatccgctgttcgagggcgctccaactcatcgcgctcccgccttccagcagcacgctgtccatctgcatatcccccaggcgccgcaccacgtccgccagatcgacgtggtcgcccttccttccgacggcgagtatttcgcagccgtgccgccggtagtcctccgccttgcgttcgtcatcgcaggcggtggcgatataggtcctgacgtcattcgccgtctgcacgatccgcgaggtgaggggcgtcctcaatcgcgtatcgcagacgacgcgaaccgggttccttccgtgtgccatgcggcatgtcagcaacgggtcgtcctcgatcaccgtgttcacccccaccatgaccgccgcgacggatcgacggagctgatggacccgacgcctcgactcctcgccgctgatccaccgtgattgattggtatgggtcgctatcttcccgtccatcgtcatggcgtatttcatgatgacatacggcgtatgcgtggtgatgtatttgctgaacacccgtatcagatgccggcactcgtcggccagcacccccacatcgacccgtatgccgtggtcctcgagcatgcgcacgcccttgccggacaccacgggattgcagtccaaggttccgacgacgacccttgcgatgccgctttccacgatcgcctccgtgcatggcggcgttttgccgtaatggcagcacggctcaagtgtgacgtacaacgtcgccccggcgggcgactgcgtgcaatgccgcaacgcgttcctctcggcgtgcaatccgccgaacatctcgtgatacccctgcccgatgatccgatcgtccttgacgatcaccgcgccgaccatgggattggggttcacgtatccggcccctcgcttcgccagctcgatcgcgagtcccatgtactgcgcatcgtccatgtacgcctccaagcatgttgcgcccatacgctatccaaggcatacaaaagaaggttcatgcgaacacgaaaacgccctgaaatgatatggcatcatttcagggcgtacgacaaagcatgaacgtactttcatcttctctcatccagactgtactgtcggctttggaatctcaccaaatcatgccttgcggctcgtgggctgtaccaccggtagggaatcgcaccctgccctgaagatagttattcgttttgcccgtgattgtactcgccgacgctccccctgtcaacggaagcggcctcacgcagcgcccgggccttctgcatcgtctcgtcgtactcgaagtcgaaatcggattccacggtgatgcctccgcccacgccgagcgacgtctcgcctccttcacgcacgatggtgcggatcacgacgttgaaatcgcaatcgcccgtatcggagaaatacccgatgctgcccgtgtacaatccccggggcgcgcgttcgagctcgtcgatgatctgcatggcgcgaaccttcggggcgccggtgatcgaaccggtggggaacgcggcgcgaaccgcgtccacggcgcaacgatccttgcgcagcgtcccctcgacggtcgcgacgagatggaatacggaaggatacgtctcgatggcaaagtcggggtccgtgccgacggaacccggttcgcagacgatcgacaggtcgttgcgttcgaggtccacgaccatcagcagttcgctgtggtccttctcgctgcgggcgagttcctcgcggttcgcccgatcctcgtccggcgtgccgccgcgtggccgggttcccttgatgggccgcgtcaccacatgccccgagcgaatctccatgaaccgttccatgctcgaacagcacacgtcgagacccggtgcgcgcagataggcggaaaacggggccgggttgtgggtgcgcagataacggtagatggcataggggctcccggatgtctccaggcgcaggcgctgcgccatgttgacgacgtaggcgtcgccggcgcgcagatggtcgacgagacgggccagggcgtcgccgtacccggcccgcgtgaaatcggaggagcatggggcgagcgaacgtcggcgcgcgggatgaggggcgggcgggcatgaatccaccaggtcctgcgcccatgtcagggcgtgggcggccgtcatcgtccgcccctggcagcaacagaacaacgcccgcgaccggacgtcctcgatgagtagcaggtcgtagaagaccatgctcgcctccggtgtggccgcgacgggatcgtgcctggtcggcacgccgcacgattcgcggccgaaatcgtatcccagatacccgatcgcgcctcccgtgaggggcagacgcggatcgcgcgcgccatcgcagggtccaagccgcttcttcacgacatcgaggaaatcaccctccacggcaacgccgtcgacgaggcatccgccccgcccatgttcgatcacaagataggggaagagtcccaggatcgagtagcgcccctgcgcccccggcatcgaggagtccaggaacgcgaagcgttcctcgccgcgcacgcactccacgatgtcggcaagcggtcggaacgtcctgagcttgaacacctgcgcgctcaccggaactccttcgtctgcgcccggacccgcgtccgcgccaccatgcgggcgtaggtgtcgttcacgtcgcgcgacacgctccccggttcgaattccacgccgccgataccggccacgggcatggcacccatcagggagttggtgaggaacacctcgtcggcccgaagcagctcgtcgggcatgatcgggcgttcgacggcccccgtgaacccgatcacggcatggcgcatgaccccgggcagcagaccgcaggagacgggaggcgtcacgacgtctcccctgatgacggcgaagatattggagacggccccttcggcgacctcgccccgcgtattgaggaacaacggctcgtcgacggcgcggtcacgggcgcgacgcttctccatgatgttttcggcatacgccagcgtcttcatgcgcgcgaggggggaggattcgttcctgcgcacatcggcgaagtcgcagcggaagacgcgcttcgcccccggcgcggcatacgggttgcgtctcaacgagacgacgcggttgcgctcggtgaccgtgagcttgagggccgaatcgtccgatgcgccgagtccggcgcatgcgcggagaaccatcgtctccagatcggcgcgacgcgcctcgatgccgaggtatcgcaacgtctcacccaaacgcgtcagatggtcgtccagaaacacgggcgcgccgccggataccgcgatggtctcgaaggcccccatgccgaagaagaatccgtcatccgcatccacacgcgcccgggcaccggggccgatcacgcactcacccatcgatcagcgccccctttcccgtctcgcactgccatcaatcaggctatcagtcatgaagacggtaggtgcgccgccgacacgccgtccgtccggcgattccgtgcgtcacgaccggaccgatgcgcaatatccggcttccgcgttacactagtacggttattcgcgcgcgcgtggcgccctctacaccccgagccgcgaggacacgtggattccggccggccatgccccacatggcaaaccgagaacccgcacacctagcattacaaggagagccattttggcaaccaagattcgtctgaagcgacagggcaagaagttctacgccttctaccgtgtggtggtcgtcgattcccgcaagaagcgtgacggcaaggtcatcgaggagatcggtacctacaaccccaacacccagccctcgaccatccagatcaagtctgaccgcgctcagtactggctcggcgtcggcgctcagccgtccgagcccgtcttcaagctgctgaacatcaccggcgactggcagaagtacaagggccttgaaggtgccgaaggcaccctgaagaccgttgaggctggcccggacgccgaggcccgcatcgcggccgtcgagaaccaggctcagaagctgaaggccgccaaggccgaagctgccgccaaggccaaggctgaagccgaagccgctgccgccgctgaggaagccccggctgaagaggccgccgaagaagctccggccgaggcctgagcggaaacgaaaggctagctatgcttgcacaggctgtggaacacctcatcaagaacatcgttgattttcccgacgatgtttccgtcaagtcccatgagaacgcgcgcggcgaactgcttcgcgtacgcgtgaacccggaagacatcggccgtgtgatcggccgtggcggccgcaccgccaacgcgattcgcaccgtgattcaggcactgtctgaccacaaggtccgcgttgacatcatggacgtccgtcgataaccgataaggaacaattcacagcatggcacagcaagacatgcacgacgaccctcagcagctcgagttgctgagggtcgctcgtattggccgcgcacagggcctgaagggcgaagtcaccgtgcgcctgtacaccgatgatcccgagtggcgcttcgagccggactccgtgctctacagccaggatggcgagaccgagtacatcgtcgagggctcgcgcacgttcaaggatcgttggattctcaagcttgagggcgtcgacgaccgcaatgccgccgaggccctaaacggtgtcgaactctatggcgaggccgacgacgcagaagatatgctcgaagccgacgaatggtatcccaaggatcttattggccttgaggcccgtctagtcgagggcaacggtctgggactgcccgccggccaagtggtcggcaaagtggtggatgtggtcgactcccccgctcagtccctgctcaagattcgtttgaccgagccggtggtaaccggccagaattccaagggcgaggatgtggtcgaaaagaccgcattggtcccgttcgtggaggccttggtccccgacatcgatctggaggagcaatacctcacgctcgatccgcccggcggtctgattccgggattgtaaacctcatatacgcgtgagaccaaaggactttctggctatttgttggcagaaagtccttttgcgtatgagcagaaacatcgagacgctaaaccttcctcattccggtatcgcatagcagataatcaatagtatactagtgaataaatgattttattcatggaaaactatatgttataacactcggagtatcgcaatgaagtatgtgcccaccaccaccaaacgcgatttacgcatcctaggcgaacagttctcgcgacagcgcaaactactgatgttgacggttgcggatgtagcacaccgctctggtgtcagcccgaccacagtgtcaaatctggagcaaggcaaggctgtccggtcagattcgctgttaaccatcgcgcgcgtgttgcaacttgctgacacactcgtagccgcatgcgacccctattccaccgatcttgggcgtctccgcgctggccaacaactcccgaagcgcgttcggaggtgaatccctgatggcaaaaactatcgaatcaactgtactgattacgctagggcctggaatggaagctcctgccggcacattgtatgcgactggcgacgacctatcgttccgctatgattcgacgtacacaatcagcagcgattccttcgacctcttcccatctatgccccgctcgttggtcccattcttcttctctggacttggtccattttcggattctgccccagaccgttggggcagaaaggtgttttcccgcagtcttaaacggacgcgtgtcagcgagtcggaatatttgttcggcgtcaacgatctgacaagacagggtgccattcgattcattgttgatggcaagccagcggcaggagatgaaggagtacccgtactgtcaaagctgccggagttattggacactgcggatgcggtggaacagaaccgcgaggtaagtgatgtctccttacgcaggttgtatcgggcaaccggctcactcggaggcgcacgacctaaagcttcggtgtcggatcgtaatgcgctgtggctggccaaatttccgaaaccgaacggcgatgattgggatgttatcggctgggaagccgtcaccttggaaatcgcgaacatggccggcatcaaagtgcccgaacatcgcgtcattgcaataaaggattcggaggagagaagccggaccgtgctattgactcaccgttttgatcgcgtgcctgcaccatcagttgagcgaatggagcgattaccttatatatccgcaatgaccgcgctggaagcaagagatggggacggcggagactggttggatctagcagaatttacgcgtagggcaggaggagacaccatggagctgtggcggagagcaatgtttggcgcggccatcggcaacactgatgaccatctacgaaaccacgggtatttgcgtaagaataattcctggcaattggcacccgcttttgacatgaatcctgaaccattcgatccgtcgctacccgactcacaccagatgtcattattaggtgacaccgaagtcgatatagataaattgatgtccgatgagagtctgtctttgttcggtgtcagccgtaaatatgcggatcattggttgccgacattgcgatcagccttatctcaggcattatctcgagccgcgatgcgccgcattgacatgcattccatcaatctgatggccgaacgttttgataaggcggttcatgctctgcagtagagcgatggggatctaccgcaaactgttactcgtctcgtggctccggcctcggtatgtctctggtatcgcttaaaaagtcgcggcggtcctcacaccggagagcaacgattgcgatgactgcgtggccgacacgtcatacggcagctgattggcatccgactgctaaaggtcagttcaggcagatgacaaagttccgagaattctttccttacgttttctccatcggttacaggcacgttcgatacgtttatagccaattagctcgaacggcaccaaatgaaaaatccttgcctacttccctattcgagcatccccaaaagggcacgccaccgctgcaatggcgtgccccgaatagagcgccgctgggctcagagcgcagagaagccctcttcggcaatcatgcgcatccagatattgaggtgccagtcctgatcattggccaatgggtcggcctgatgcatggaccgcccatcgacgttggagggaaacacataggcacacgtggcggaaccatccgcgccatagttcgccatattggcctcgaaaatcgccttggccaaatcatcggtacgtgcggagcgcctttcttgcggcaaccgtgccagcacttcggcggtcaacgtggaccaataatgagggaacacatcaccgaattgtcggttgatgccgaaccaatacccatcccaatgtcgaatcgccacaccgtagagacgcgagtccggctgcggaccgctgaacgccaatagccaatccaatcgctccacggcaccatccagatattcggcgcgcccggtaatgcgatgcgcttccaacagcagactcaccaacggcgcagtgatggactgttcgtaagacacctcatggtagggcaggtcgatacccaatcccaggaagtagtccgcactgaccaccacacgatcgagcagacgttgggtctcctcggttcgcccggtctgcttaagcacacgcgccaaggccgcactggattcggcgaactcgatgctcaggaagtgttcgccgccaatttcggccgcccgatcggcgatgttcaccgccatatcgagatcgtgcgcatccttggtggccagataatgttcggtgaagaaactgataatccacgggcagtcatagatacggcctccgaatttggattccggcagccccgagccgcgacgtaccgcgccgctggcgtcgatgagcgcggactcggcgaacgtgcgccacgcatcggcggcacgctgggccggctctcgtagggactcgtcaagcagcccaagattcagcgcacgttgtagcaataccggcatggcgatacgctcggaaccatccgaccagtcatcccaactgggatccagcacatgctgcccggtgcgggtatcggtagccacgatggccccagccaacgcgccgacgcgctcatacgccacctgatgctccaggatgtatcgcgcacggtcgttgacggtatccctcaacgtcttgtggaagagtacttcggtatgtgcacgatggtctccatccacaagctgcagttggtaggtacccgcctgttcggccgtcaaccgaactccgctcacagtccgttcgacggtaagaccgtcatccagcgccgtaacagcacgattcgtggcgatatcgatatgcccgcccacagtggcgcttaacgaggagaacgatgcaggagcaatcgtagcggccaggaatgcatcctcgtccgcataccatcccagttcccacgtcagcgcatacgaggcccccggctccagcgtgatggtcggctgcccgccgaacgcatcgggattcagcgcataatcggtgacctgcagcacaatgtgcccgcggatatccgaatacgtgacctggttacgcgattggatggcataggcattgattgcgccttccgtaacgatcagccccaagcgcgcaccgcggccgtccatcggctcggccagcacccagctccagtcgcctcccgcgaatatatgcgcatgcacacattccctcaacgctttgcgagcgcccggataccggtcgttcaatggggtctggatacccaagcctgtgatggtcaccggctggttcgaaacgttgcgccattcataacgctcggtcagccgttcgccgctactgcgggtaacgtccagggcgagtcccgcaccgcacagtgcgaacgtctgctgttccagaccattggttatgccatatacctgcggcgtgttccactgcgagccaccactggtagtgaccacatagccgctgccccaatactggtccgatgtgtgccaagagacactgtcgtccagcagataatgacgattgggattatcttcgttcacaaaagcgatgggagcaccggtggattgatccagaagaacctggccattgccgaacggcagcgaacttccagcgaattgagagaaatccgttgaggcaccggcttctgcagtagcacgttcgatagcggcttgctgtgcagcattctgtacgtcactcatgactgatctcatttcgtcctcagcccttaacggagccggcaaccaacccggagacaatccacttctggcagaagcagaagaaaatgaacaccggaaccagggcaagcaccgtgatggtcatgaacagaggccagttcgtggagaactgctgcacggcgttgtatacctgcagcacgacggtctggttatccgtggagctgaggaacacactcggcaggaggaagtcgttccaagtgcccatggtttggaatacgacgacggtggtcaatattggggtgatcagcggcaacacgatgcgcgagtagatgcgccatgggccggcaccgtcgattttggccgcttcgaacaattcctgtggcagggacttcatgtagccgacgatcaggaagtagcagaacacacacgagcccatatacagcacaatcaagccaagcagcgaatccacaagtccggtctcggactccatgcggtacagcggcagcattgtggcctgcacaggaatggcgaaggtgaccatcagtacgccaccgacgatggcggtgaacttggatttcttgtataccacgccgaatgcggccatcgaaccgaccagaacctgcagcagcaccgccaccacggtgacaatcagcgtgttgacgaacgcacgaatgatggtgccgtcggcgaaggcctccttgtagttctccagcgtccactgctccggaagccccaatgggttcttgatcatatcgattgaggtcttgaaggagctgacgatcacatagtacagtggcacggcgcaaatcagggccaggccaagcaccacgatggtgcgaaagattttgcgaacgagttcacgctgagacggtgtcattggaacctcttttccacggcgttggcaatgccggtctgcgcggcgatgacgagaatgcaggcgatggtgaagcatacggacaacgccgagcccagtccgtactgactttggccgatacctttgaggatgatggcctgggacagcgtattggtggcgtatccggggccaccgccggtcaaggtgtacggcagatcgtagattttcagtccgccggtcatcaagaggaacatcgagacgacgatgccggggatgagctgcggcagagtgatatggaagaactgctgacgggaattggcaccgtcgacacgagcctgttcgtacaggtccgccgggatggtttgcagataggcgaggtacagggtggcgtgccagccgacctgcatccatacggccacgaaaatcacgcagaaccgggcccaattgtcatcggccagccaagggatattcggtataccgaataccgcgatgactttgttcatcacaccggaacccagtggagagaagatgtactgccaaattagaccaatgatggcctgcgccgggacaccaaggaagaagaacagcgaacgggcgaagctacgtccccacatggctttgttgagggtcacggccagcggaatggcgaaacaggtgaccaacagtgtggtgccgaaggcatacagcagggtgaagcccagggcggatagcagcgacgggtccttgaagatcgcagcgtagttgctgaaggccacgaagctgaagttttcggagtatccgtcgtaatcggtcagtgaatagaagaacgactgtgccaacggcacgacggtaaggatgaagaagatgatgatgattggcagaagaaaccagaatgaggagaggttttccgcccataaggatgatgcacgcttggattttggtttggaagcatgcccaatggttgcagcggtcatgggaagtccttgagaattatggtcgatttgacatagcaaggccgtgcctgccgccgaacgggcgatcggcacggccttgtcaggaggagagaaaggaactggtggtgtgatgggttacttcagcgtcgcccacttggcgtcgagagccttggcagcctccttggcggaaatctggccctgcacgatcttctgctgctgggcgatgtcctcggtggacatcaccgtaggggacttcggccagttgacccagtagaacttgttctgcttgaagtagttatccactacatccttcagttcggcaggaggttcggcattgtacttgctcgacagcgacagggtgccagcggcagaggtaaacgcctcgaggccctcttcgctgttgagataggcaaggaactttttggctgcggccttctccttgtcggaggccttggacgcgatggcgaagccttggtcggggccaccgttgatccactggccgtcttccttgctgtaggccgggaacggtgccacgccgaagtcgatgtctgacttctgcagatcaggcagatcccatggaccggagcgcatgacgccaagattgccgctcacgaattcctgcttgacctgatcggccgacagaccaacggatttctgaggaattacaccggccttggcggcagcttcccatctcttgaataccggagtccagtccttggtgaaagtggacttgccggaccagatgtccgcgtcaagatcgccggacttaccctgctcgccgtaatagctagccagcaagccggtgaacgagccagcgatctgagtattgaagtcctccaggaaagcggtgcttccgttggagttgatcttcttacccatctcgatgaattcatcccaggtcttggggaatttatcgcatccggccttcttgagaatgtctttgttgtagaagaacgcgcccacccatgcggaaaccggcatgccgtaggtcttgccatcctgctggaacaaggcgaagtttgtgtcgtcgatgccatcgaggaaatcctcgccggagatgtccaacgcggcaccggatttcatgacatcggtacggttatccatcgtcagattgaagatggtcggcggcttgccaccagcaagacgggtttgcagtgtcgagatgtactgtgccggatcctggccatactgcacgtcgagggtaatgtcggggttcttcttctcgaaccccttgacgacctcaccaatctggttgtccttgaagtaggaatagaacgaaatcttggttttcccgccacctgcggtaccggaaccgcatgcggccatcggcacgaccatggctgccgtagcggccaccgccacggctgactttagggcgaacttctttgtattacccctcataactaagtcctttcagttagttatacgcttcaatattgatgcgcataaatgaatatatcattgaatccgacgcacgcaacaccggcgtgttgatgcgcataaactacgcgacgtcaagaaccacacgaggccgagaatcggacatactccttagctacggatggtgatatgcggaggaaccagcaatctttcaccagttttatgtccatcgatccgatcgaacagtagccccatggcggctttggagacggactgcggcactggatccacattatccaccggcacgcgcaactcttcgtcatgaccatccacatacaccgcgaccagggaaaaatcacgtccaggctgaatctgcatttccacacaaagctgcagcagcgaatctaacgcatgaggggtgcgcactgcaataccaccatggcattgagccattcgcttcaattcatccttcatcgcccagatgcccctccatcctttttcacgcgggatgaatatctcatattccatgcccagcacttgagccaccacacgagattcgctggcgaagaacttagcaaacgcataacggtcgagacttcttccccagtccccaacaaggaccatccgctgcgcccctcgttccgccaaacgattgacggccatctgcgccactcgacgataatccacatcaacgcacggcaggccatgtgcgttttctggcgtacccaccagcacaacgggaatatccaatcgcgctatctcaggcaggcgttcatcatgccactcgacgtcgaacaccaagacgccatcgaccacgccttgacgcaccatacggcacagtccctcaatcccctcgtcggccggaacgagcatcacactagacccccgctttctcgcctcctccatgattaccaccaggaacgggcgaagctcggccaaatcggtattctcatccatatgcaccagcacaccgatgacaccgaccttgccacccgccaacgatcgcgcattgatattgggaacataccccaactcatccatggccttgcgcacccgttttttggtggcttcggaaatgggcctgctaccgctcatcacatacgacaccgtggcctgagacaccccggcgcgctttgccacatcccttgcagtaaccatccatacacctcgtcgcttgccgcccgtcaccgtagatcaggcatggaacattcaccctccagcatattgaagtgtataaacatatgcacactgaccgatgccatcccgcatatacacgacgacgaatcgtaccgctagttatccacagggttatccacacaccatgtggatcaccccggaagctagaaccgcattgtccgcactactaaccgacgcttcagcaaccgacacgaccgccaaagcataagcgtttacccacgagccgcagcggtgacgcgagccataaagcggtcgaggaattccgacacgtcgacgccgagcgcaacctgagtgtgcttgtcgaaatcttgcagccgcgagcggtcaccaatggtgcggccacggaacgggccctccaaatcgacctgtaggttgaagccgaacgtggtgaccaatgatgggtcgagcgcggcggccacggccagcgggtcgtgcagtccacatccgcggatctccggctggttcttcaggtagaagtcgatgtagtagtcggtcatggtgacgaggaagtcaccggccggcgttcccagagcgtcccattcatgagctttctcgcaggtgagcgcggtctgatgagtcacgtcgaggccaatcatcgtggtgcgggcaccgcacttgaacaggtaatcagcggcctcgggatcctgggagatgttcgcttcggcggccgggcttacattgccgggcagcgtcaacgcaccgcccatcaacgtcacgttcacgccggaatccttcaggtccggagcgttgcggaatacggtggccatggtggtcatcgcgcccgta

SEQ ID NO: 686 - DNA, 32365 bp, Unknown
  R14_15m  MAG No. k141_23010
atccgcgcattgcttccgtccgtctcgatggacgagaccatgctgatttcctacgcgcttatcgccctatctgtgggcactcctttgggatcggcgttcctgctgattcaacgtacattctatgcctttgaggacggcctgcaccccttcttgtccgcggtgatgcagtatgggttcacctcggtattcatgatcatcggcatgatggtgcttcctcctgagcattgggtactcggcatcgcctgctcggtgacactcggcggattactggcgttgcctctgacgttgatgatgttgcgccgcaagttcgaaggcaatcttggtggtcgggagatcacgaggacatatgccaaggccattgtggcggcgctggcttccggagttgtggtctggctgatcaaacgaccggtagtcgcactgttcggcgcggatattcgatcggtaggcgggcacatgagctggtggtctgcgctggccatctgcgtggtgctcaccatcgtgctggccgtagtatatgtggctgtgttgtgggtgatacgcaccccggaactcatcagcgcctatcactcgatactggcccgtctacacaagactccggccagtgaggacgttgctgtgacagcccagccggaaaaagtcgacgatacgcaaatcaatcctgagacggagcccgtcaaggatagccccacacgtagaatatctaagaccagtctcgaacaccaatcacacggagccgaacgcactatgaaaccgcaactcggagacacgattctcaaccgatacaccttggtatcatcgttgcgtgaggagcctggcattcaggcatggaaagccaacgaccgtgtgttggcaaaggattgccagctgttcatcattaccaatcgcagcgctttcgccgcaatcgatgagctcgctggtcgcatcgccgccactcgccctgatcgtgtgattcccgtactgaaataccgtatggaatccgacgtacttctcattgtcatgccggtggacagcggccaatgcctgactgactacatggtggataccgacaagccgctcagctacagcgccatccggtcgattatcggagaatgcgccaacgtgctgcgcgaggtcattgcggatactcccagcagcatcgtcatcacaaccgacaccgttcgagtgactacctccggtgtgcagattgccgatgcaccatgtgccacgatgctggccgacacgtccgctactgatctgcgtacggacggtcctgaacggtatgcgattcgcaagcttgcggcattgctctatgccctgctgacacgcacgccaagccaagcgacacccacattcaatctgcgcgccttgccgcaagacacccctggcgaattccgcgtgatttgcaagcgtggattggccttaagcaagcccgacgagcacacgttgccgatggctgcccttgtagaactcgacgccttgttgggtaattggaagccgctctctgaactgagcgatgctgatatcgctttgccgagcgtggaaagcgattgctcgattaccaaggcgatactgaagcccgccaacgagaccgatatcgtgcctattcccagcacgttgattaacagcagcagtcttccggaattgtctattaccccttccctgccggttcagccggccgccgtccccgctccgcacgcgatgtcaccggctcctctgcctgatgggtccagtactgctgacggcaaccagtctcaatctgacgcccgccgtctgtttgacttcaacctttctgacgcctgggagcacgagaatctttccggtgaagacaccggtgactggtacagcgaaatgaatccggcccccatcggcggtccgggtgataatactcggttgacggtgcctattgttaccggcggtatttccgatgccaccgtgggagagacgaccagtcgtattcccgtgttcgatgtcagcggccgtgctgtggcccccggtgaggaatcgctgcgtgccttggaagaggagcaggcccgcattgccgaagtaagcgccattcctccgagcttcacaccgaaggatgtgccggatgacgaggatgacagcaagctgcccgatgaacatctgttcggcaaactgtcgaccaaggtcgttgccatcattgtggctctgatattggtagtggcagcggctgtttgggcagtgcatgcgttccgatcctccggagacaatcctgccgatgcttccagcaactccagtgaaggtgactggcccgatatcaatgctgacgctgtgccattcggtggcagcaagaacgcgacgaacggtggcaccactgacgattcctcaaagtcgagtgatgccactcagagcgaatccagggactcggcatcagacaagtccaagaagtccgagactgctgattcgtcgtccaagaagaccaaggccaagaagtccggcgataaggattccagcgctgctccgcaaccgcgccatgagaacaacacggcgtttacgatttccagcgccaacttcctgtcgaatcctggcggccaatccgggtacgcatactacatgcaccttgaccagccgcaggatgcgtaccgcatggttatcaccatccgcacatccggtggtaagggctatattcgcgcaaataccactggagaccccactcagggcgagcaggtggccgaattcacctttgctgaaggtggcactactgaggtgaagttcaccaaagccgtcaatacgcaggatctgctgctgtgggtgccatcgggtagcctgccgcagaaccagctgtacatcgagaaggtggaggtcttctaatcggcatctataccgataactgacccaagaagggcggtaccgttcgcatacattcgacggtgccgccctttcttcgcgtctggctgaatgacatggaatatcgtatgggggtgtgacaatgtttcacgtgaaacataacgtcatcattatcggttctggtcccgctggctacacggccgccatctatcttggccgtgcaggtcttaatcctgttatggtcactggtgcgttgtcgccaggtggacagttggtcaacaccactgaggtggagaacttccccggattcccggaaggtattcttggcccggatcttatggatcgcatgaaggaacaggccaagcgcttcggtacaacctatatcacagacgatgtctcttccattgaggcgtgtgagagtgattcggtcaagccgacctatcgtgtaacgctctccgatgactcccagttggaggcatcagcactcatcatcgccacagggtcgtcattccgtaagcttggggtgcccggcgaacaggagctgtccggacatggcgtctcgtactgcgccacctgcgatggcttcttcttcaggaacaagcctatcgtggtcgtaggcggtggcgattcggcttttgaagaggcattattcctgacccggttcggttcttcggtcaccttgattcaccgacgcgatagcttccgtgcctcgcagatcatggtggaccgagccaaagccaatccgaccatcaccctgctgaccaacacagtggtgacctccattaccggcacctcctcccccacacagaacaccggtgcacctattgccattcctggcttgacaatcaaacgaccggctgtggcaccggccagtgtcagcagcattgccgtacgtaacgtggtgaccggagaagaaagcacgctggacaccaacgccgtattcgtggctatcggccatacgccagccactgattttgcagctggtgttgtggaccgtgacaatgatgggtatgtcgtggtgcagggtgccagcacggtgaccagtgcgccaggcatctttgctgcaggcgattgcgtggatcgtacttatcgtcaggcaatcagcgcagcgggcatgggctgccgtgcagcgctggatgcgcaggcctatcttacggactgattgcggcgacctgatgatggcttgctgttctgactgctgcctgtgacataggagcagcgctaggtcagtgttacagcatgccgcccttggatagtacgcaccggtcaaaggcataaaaaggcccctcaggcgacggagaatcacgatgtgtgatttgtcatcctccagcctgaggggttttctattgcgacaggggctacaacgcaggcatacgcccctgccaggaatcacgcagaggctataacgtcttgcgcgtacaacgcactgcacagcaataatgccggcgacaacacgaatgttcttatcgtgttacacccatttggaatcggcatcgccttggctcggcaccagcagctgcaggatgcgatccatatcctctggtgacgagaagacgatttcgatgcgaccatgcttggtgctgcccttaatcgacaccttggtgtcgaaatgattttccaaactctgctggatggcggaaccaacccaaggattggtcttggacgtcttgggtttcttcggctgctctcccgacgcaatcttcatggcgacgatttcttcggtgctgcgtacagaaagaccttccgcaataatacgagaagccagcttgtccatttcctccggatcgctcaggcccaatagcgcacgcgcatgaccggacgatagcacaccggcagccactctcttttgcacagaggccggcaggttcagcagtcgcaaggtattggcgatttgcgggcgagacttggacaccgacttggatagttgtacttgtgtcaacccgaactcttcaatcatctgctggtaggcagccgcctcttccagcggattcaaggccacacggtgcaggttttccagcaatgcatcgcggagcatatcatcatccgcagtggttttgacgatggcgggaatcgtctccaacccagccaactgagaagcacgccaacggcgttcacccataatgagctcatacgggctgtccaaatgaccggcaaacggattcgtgttggattccgtctcgtcgtgcttggcggctttggccgcagcaatccggcttgccggacgcttgcgcacgactatcggttgcagcacaccaacttccttaatggaagcagacagctcattcaactcatcctcatcgaagatggtacgaggctgatgtgcattgggcccgatatcagacagtttgagttcagccagataaccaccggctaccggcttgagctcgtccttcttatctgtgtcagcggtctttgccgccgatgcagtctgagatgtttcacgtgaaacatctttgacagtgacggatgtacgatgtgctgtctgaggcacagacggcttgccgccctgctgaggcgcggcgaccttaccggtttgaggtttctccgtaccgaaaaacaggtcgctaggatgagtaatgatgtccaatgcgggcatggatgcgcgtttaccggcggctttcttggctgccttgctggatgataccgtctgaggcacggcaggctttgattcctgctgggcagtagccttcttggcgggggctatgtcagcagtggccgccggagtagacgaatcctccgcaatcattgcgggctgctccgccactggttcctcccctggcaatgtggggaacaaagcgccaaggcccttaccgagtcgtgattttgatgccattacttgttcctcctcgcatcaatggtgtcaaggacttgttgcgaacgctgtgcgatttccaaagctgcttcaccatacgatatggcacctatgccacgaggatcataggcaatcaccgattgggagaaactcggcgcttcggagatcttgactgaacgcgggatggtggtattcagcacaatgctgggatagtgtcccttaacctcgttatatacttcacggctcaataacgttcggcgatcaaacatcgtgacgagcatggtggacaccagcagtactggattgaaatgctcctgcaccaaaccaatcgtgttgatcagctggccaagaccctccaatgcgtaatactcagcctggataggaatcagcatctcggtcactgcacacatggcgttgatgaccaagaggcccaagctgggcgggcaatcaatgaacacgtaatcatagtgtttatctgattgacgcaggtagaggtccaaggcctccttcaacaatgtgtttcggttgggcagatcagccacttccaactcggcaccgctgagatcgattgatgcaggcacaacatcaagtgtgggaaaatcaggacagaccgtgataacatcacccagatcggaacgcccctcgataacgtcatagaccgagggctctcccgatgcatgagatacacccaacgccgtagaggcattgccctgcgggtccatatcgatgaccaacacctgcgcgcccttgttcgccagcgccgcagcggtgtttaccgtggatgtggttttacccactccccccttctggttggccacggcaatacgacgggtacgttgaggtttggggaaatcggttttcttgagtacatcgtagcgtgagctttcatcagccatctggctgccaagcactgaaccgtgaccatcgaatattcgctgaagcgtttcggaagccgattctataggttccgactgatgatccttggtggacatcgctcctccttgcacagacgtaagttccagtgttctcattcgtatggacatgatgctcgttatccacaattgcgatatgcaatgtggataagtgtggataagtgtgaatgacgttgagtgttagattatgtattcgcagacgaaaaacattgaaaaatcagtgttttcatcattctgcacatcgtcccgtaaaaatgtggataacttttacgcacatatggaaatgtggataactcaatcagtactccactcatcgcttatccacaatcaccacgtgggtaggctcaagatccggtccgacagccgcctcaacgacgcgtggacgacgaccaccgaattttgcaatctccttgccagccttgtcgatttcagcctgagcagaccgtcccttcagtgcgatcaactgtcctgacggtttcagcaacggcaacgtccagccagagagtttggtcataggagcaaccgcacgacacgtgacaacagcgaacggatgaatttcccgcttccgtacctgctggatgacggcatcggagcgtccacggataatctcaacgttctgcagttgcatcaggtcaacacattcatgcaaccattcgattcgccgctccatcggttcaatcagcgtgaagtcatgatcaggcaaacacgcggcagccaccaatccaggaaaaccaccaccactgccgacgtcggcaactgttttgaagcgaataccattcgtcacattccgaacgtacggcacaatcgcagcggaattcagaatatgccgttcccaaatgatatcgacgtcacgggggccgattaatccacgaggttcaccctcttcggcaatcttggcatggaaacgctccaacttcggcaacgcatcacccaagacctcagcaagtacaggtgacccctgcagctgatccgtcatagccatctccctcaccatgtttcacgtgaaacaatcaacatggaaaaggcgtcgctcattacgacgccattctccctacggtcactcttgtttgtttagagacgacatccgttgaacgtccttgtcatctcaaaaactcgtcgacctattactcctgatcaagctcgtcgtcttcggcaacatcctcgattttgttcttgagatacaccgtcacgtaacgatgaggctcctcaccgtgcgagcgagacttcagcccctcttcccgaaccacatcgtgaacgactttacgttcgaaggaattcatcggcttcaaatcatacggctcgccggaatccttcactgcgtcaatggcatccagggcgatatcacggaggtgctgacgcttgcgcttcaggaaaccgtcaacatccacaatcagatgagaacgctcgccggtcttctgctgtacagccagacgagtcaattgctgcagagcatcaacgacttcaccattatggccaataagatgtttgatgtcggtatcgtcatcagcaacgatttgcacggtggggcggtcattacgcacgcccatctcaatgtcgccctcatagtcggcgatatccagtaggccttcaaggtaatccgcggcgatgtcagcctcttcgttgagctgatcgatcgacttcacgtcatcctgtgccatacgctactccttcatgtcgtgtttgaattccaagtctaagccctgctcccccgaacagagaaagtaatgtcggtgcgtgttgaatgtttcacgtgaaacatcgaacgcgcaccgacatggtcgtcacttctttttgcgcttacgcacgggctgttgacgctgatagccctgagtggccttacgctcagcctcttccttggccttggccaatgcttcttcttccagagagggcaggccggcctttgcgcggcgagcattctcattacgatgatcgcgcttctccttgtccgccgcagccggagagccaggggtcgggaatgcatacacctgccacagcgtacggcacaagttgcaaacgttgttggtcagccagtacaccaacacggcgaacgggaaggaaacacccgagaagatgtacatcaccgggaagagccacagcatggccttctgcatggtctcggtctgcttgttcatcgaagcagctgccatgttgcgcttcatgttgatgtactgaatgagccacaagcagaagcacatcaggaacacgaagataccgatgaccaccttgcctgcagtagatgcgcgggtgaagttatcggtcacactgacaatgccgaacacatcggtttgggtgaattgcttggcggttgctacgtcgaacgcgcccaacgcaccgcgtttaccgttggcaatgtagggaatggccgacagcgtatagaacatggacatgaacaccgggccctgaatgagcataggcaagcaggagccagccggattggcgtcattgtcttgatacagtttcatggtttcacggctcatggcctccttggaagcctgatccgtcttgcctttgtacttgttctggatgcgcttcatcttcggcgccaacgcctgcatcttgcgcatcgacttcatctgcttgcagaacagcgggaagatacacgcctgcaccaccagcaccaggatgataatggcaagcacccatgagacaccaatcgggctcatgcccagcatcgcgaagaagtcatgcacgatcttcatgatccaggtctgcaaccactcaacgggagtcaggattttatatagaaatccccaaaacccgctatcaagcagaaattcatttgagttcatcgttgggcctctctttgggttgtggccaatggtgtcagtcggggctcttcatgagccttcgaccacgaaaatctgtaaaaaatggaataccgttgtggaacatcgtcgattcccccacgactccacggccggcaacgcagtaatctcagcatggcgagcactccccctttgaacgcgccataccgttccaatgcctcaatggcataattcgagcacgttggataatacttacaacaaggcggtgtgtttgccgagatgtgctgttgataccagcgcaccccaccaatcatcaccgccttgaaagaagctgtcatgcctcagccaccttatgcgccactgtggcaaaagccttcgcgatctgctgatctagcgaagcgaacgatgcggtcgcggcactgggcttggcgcgcaaaacgatatcgcaatgcgcgggcagcagatcctcatgggctctggccaatacacgaaacctacgcttcaccgtattacgggtgaccgcatgtcctaccgatttggagacagctaatcccaaacggcgatgcaccgtccggtcgtcatcatcatgatggtcgtcgggcaccaaatagtgcacgacgatatccttgccacctgctttgcgccggcgtttcagcacggtgacgaaatcacgatggctttgaagccgctccacctcgactatgcctgtggcactgatcggaatgatcaggcggagagggacttgcggcccttggcacggcgacggttgatcaccgcacggccagaacgggtgcgcatgcgcaggcggaagccgtgcttcatgtggcgacgacggttgttcggctggaacgtcctcttcataatccattgctcctaggtctattcggcaacgcttcgcgctgccctcacgtgagtcaagctataccaaagtactctcacccctaccctcaagtcaaaacggacggagtattttcacatttcgacacgttgcgagacacgcctcaaatctcttataatcggcggaataccaaccattcacggccaaaagttatccacaaattacatgtctgttattcacaatccagttatttcaacacgcgacacggtggataacttgtctaaaccagagtaaatattatctgttgtacagatttcgccacaccgatagaaggggccaccatggttaacgcttccggcgaccccgtaatcgaggccgcccacatctggtcagacacgctgacggtgctcaaacacagcgcttcgctcagcccacgagaaaaaggctggttggaaggcgttgttcctgaaggcgtcttcggttcgaccatcgtgctgtgtgtggacaacaacgatacgcttcaagccattcagggtgatttgaacgattccctgcttcaggcattgcgtacggtaaccggcgaaaatatgtttcccgcgttcaaggtcgtgccgaaaaccgagcccgaaccgctttcggcggcaaagccggcgcagccatatccttcggaaatttctccgaccgtcgccgagttcggtaaagaatcctatggtgcaaagccggtagccgcaccgcgggaaccgatgcccgccaccgagtcgcagttcccggtcggtcagcagaagatgaatcgcgatcccgagactcatctcaataagaacttcacgtttgattccttcgtgcccggcgattccaaccgttttgcccgtacggtcgcactggccgtggccgaaggttccggtcaggatttcaacccgttgtgtatctatggcggatcgggcctgggcaaaacccacttgctgaacgccatcggcaactatgcactggtcaaggatcccgggctaaaggttcgatacgtcacgtctgaggaattcacgaacgaattcatcgacgcgctgcaaaacccgaaccaaagccagggtcagattgctgaattcaaccgtcgataccgacaggttgatgtgttgcttattgacgatatccagttcctcggcggcaaggaagccaccttggatcagttcttccatacgttcaatgcactgcatcaggcaaataagcgtattgtcattgcttccgatgtggcacccaagaatttgaagggtttcgaggctcgactcatctcgcgcttcgaatccggcctgaccgtagacgtcaagccgccggatctggagacccgaatcgcaattcttcgtatgatcgcctcgatgaacggttcgaaaatccccagcgatgtgttggacctcatcgccgaacgcttcaccgagaacattcgcgaacttgagggcgcgcttacccgtgttacggccgtggcctcgctgagtaatcagccggtgacccgcgccttggccgagcagacgttgcaggacttcttcaccaccgatgtggaaatcaagcccacggacatcatcagtcaggtggcgaagtacttccacctgacgtttgaggatcttgtcggtaaatcacgaaccaaaaacgtggctgttcctcgtcagatcgccatgtatctggctcgcgaaatgaccagtatgagcctgatggatattggccaggtctttggcgggcgcgatcacaccacagtaatgcatgcctgcactcgaatcagtgaccgaatgcagcaaaaacaggagatctataactacgttatggagctcacggttcgcctcaagcaaagcaacaccaactgacacaacgcttctgagagacgaaaaacggcacttttcggactgactttccgaaaagtgccgtttttggttgctcaggcggattctggtggatacgtcgaggcaacggattcgagacatcagattcctcatggctcccctttgtgaggagagctgtcgtcgcagacgactgaggggagtttcgaaggggaacacgcaaaaaacccatgaaacgagagaatcgattctgaggaccgattttgcgggtttgggcgagcgagacgaaaaaagtgccgaaaacggtctccagaatcgattctcctcgacgaaaaacagccttcaacacgccgtgcgaaagtacgaaaaccaaaaaagttatccacacagttgtgcacagatgtgggtaaactcggcggataactcgtggattacccactgttttgttgtggaaaactcgtgcataaccgcgacctcgatgtggaaaactcaaattcgacgaactggctgtggaaaactcgcccacttatccacaagccatgcagaatttgtccacaattttcagggacttatgaaccgttgcatttgtagggctcacccctacttatccacactatccaccggccttattacgacgattacttactcagttacgtaaaaagcatcatcgccacagtaacagccggtcacccatcgtacgtaagttcgccacctaacggctagaatatttctcagccaatccgacgaagggaacaatcacacatgaaagtcgaaatcgatactgcagccctggccgacgccgtagcctggacctcccgagtcatcgacgcacgtccctccaacccgattctcgctggtgtcaagctggaagccattgacggaacgctgcaattctccgccttcaactacgagatttccgctcgccaccacatcgaagccggcgttgacgaagccggttccgtactggttcagggcaagctgctggccgatatcaccaaatcgctgcgttcggagaaaacgtacctggtcaccgacggctccacgctgaccatcacgtccggcaagtcgaagttcaccttgcagctcatgcccgacaccgagtacccggatctgcctgtggtaccggccatgctcggccaagtcgatgccccgactttcgttcaggcagtgaaccaggcatgcgttgccgtctcccgcgaagaaaaccgcccggtactgaccggcgttcgcatgcaattccaaggcgacaaggtcgtcatgacctccaccgatcgcttccgtttggcccgcgccaccttcacttggactccgcagaacccggacgtcgacaccaccacgctggttcgcggctccctgctcaaggatgtggcccgtgctcttgacgagcaccagaacatccgccttgatttcgatgccgatagcccgacgctgctcggcttcgaaaacgccggccgcgtctccacctcccagctcatcgacggtgaattcccggcggtcgaccgcctgttcgccgacgaatacccgattcaggccgtagtcaacaagcaggatctgctcgacgccatcagccgtgtggctttggtcgccgaacgcaatgctccgattcgcatgaccttcaccggtcaggaagtggcgctgtccgccggatcggtcgacgaggcccaggccaacgaaacactggacatcgacatggatggcgacgacatcaccgtggcattcaacccgtcctacctgaaggagggtctgtccgccgtgaccgaaccattcgtgcgcatcaagatgacgaccccggtcaagccggtcgagttcaacggccagcaggaagctgattccgacgagtccatggactaccgatacctgctcgtgccgatgcgcttcaacaactgagatccctgaatttccaacgattcgctaatgcacatctcccgtctcgcactcgaccactaccgctcatggagtcaagtagtggtcgatttcgtaccaggcgtgaatatcctgttcggcaagaatggcttgggtaaaaccaatctggtggaagccgtcgaagtgctgtccaccggatcgagtcatcgcacgtccagcacgttgccgctgatcgaacgcgggcagaccacggccaccatccgcgcgaacgtcgctgatgatgccggtcaaaccactacgtatgaagcgtcgattcatgcgcgtggtgcccaccgagcccgcatcaactcggggtcgtcgctgtatctgcgcgatatcatcggcaagattcccagcgtttccttcactcccgaagatcagcgattggtgtccggcgatccgggagcacgccgcgtcatgatgaatcaggctgcggctctgctcgagcccggatacatgcagacgttgcaacagttcacgcgcatcgccaaacagcgtgccacattgttgaagcaattgaatgccaatgccaacaatggacagccgatggatgcggttctgagcggtttggaaatctggaccggccagttcatcgaagccggtgtggcgttgacccgtatgcgcgctcatgtgatcggtctgcttgccgagccatttgccgcgatttacgccgacttggccggtgccggcgagcaggtgacgctcacatatgcgccttcattcgacgaagtgctgatgttcgacgatccacatccgcagatcagcgagcattttcaacgcatctaccccggtgaaatggctcgcggcgtgaaccttatcggtccgcagcgcgatgacatgaaccttgagttggccggtattcccgcccgcgagttcgcttcgaacggcgagatgtggacgatggcgttggccttgaaaatggcattgtttgaaatcgtgcgtgaccggttgggattgcagccgattgtgattctcgatgatgtgttcgcccagcttgacgacagccggcgcacgcagattcttgatttcgccagaaaacaggatcaggtgctgattaccgtggccgctgaaggcgatgtgcccgactatgaatcggcccatcgtatcgacgtggccacactggccgaacccgcttccgtaatactgccaactctgggcaatttgtccgattcgcgggaaaacgagagtttgggtaagtatgacggaaaacccgcggtggacagcgcgtccgtagaacggaaagtgtcatgaacccgccgatcgcccgccaactcaacctggacgagaccaaactgccggccgaaatattcgagcggctctcccgtcgcggggcgaccttgaaggactacagacgccgccgtgaagaggccatcgaaaacttcggcaaaccggggcgcgatccggctgaactgggcagcgtgatgaccaccatcgccggcaatggcgtctgggcggcgaatatgaaacttgcgcaattgcgcaaccattgggaccaagtggtggggcaggccatcgccagccattcggcagtcgccgatttcacggacggcgtactgaccatccgtgccgaatccacggtctgggccacgcagctgacctaccttatcccccaacttaccgataccatccgtcgcaatctcaaaggattggccatcgccgagattcgcgtgaccggaccggccgccggatacacgcgcaaatgggctcggcggcggtagccaagataccaaacaaattcgcagaagcctcgctatggcgctcgtcgggttagacgagtaaaatcacatgcagtatggtcaaatggccagaagagccctttacgggcctcgtaagccatatcgcctccgtgaatgaccttcatgacggaggttgaccctgtagtcacggaaggaagcctgttggcagacgaaaccagcaaagaggagcagctgaaggcggctgcggaacgcatcaacaatgcggaattgaccgaaggcgaacttgacgaatccatggcccccgagcattatgaggcctccgatctgagggtgctcgaaggactcgaggccgtgcgtatccgccccggtatgtacatcggttccaccggcccgcgcggtttgcaccacctggtctatgagatcgtcgataactcggtcgacgaggcgctggccggatacgccagccatatcgaggtcaccattctgccggacaacggcatccgcgtggtggacgatggtcgaggcatcccggtcgatgaggtgcccggcgagggcgtctccggtgtggagaccgtgatgaccaagctgcacgccggcggcaagttcggcggcggcggttatgcagtgtccggcggtctgcacggcgtgggtatctccgtggtcaacgcactctccacccgcgtggacatcgaagtgcgccgtcagggcttccactggacccagacgtacatcgaccagcaccccaccgcgcccttgaagcagggcgagccgatgaccgaaggcgagtccaccggtacgtccgtgactttctgggccgacccgaagatcttcgagaccaccatctacgacttcgagacgctgcgttcccgtttccagcagatggccttcctgaacaagggcctcaagatcagcctgaccgacgagcgtgagaatgaccaggccggcgacgaggtggccggcgacgccgcggacgagcccggcgcaaagcaccagaccgtcacctaccagtacctcaacggcatcaaggactatgtcgactacctggtcaaggtgcgcaaggccacgccggtggaagaggacgtcatcagcttcgaggccgaagacctgaagctcggcatctccgccgaactcgccatgcagtggaccaccgcctactccgaggccgtgcacaccttcgcgaacacgatttccaccaccgagggcggcactcacgaggagggcttccgcgccgcgctgacctcgctggtcaaccgttacgcgcgtgacaagggcatcctcaaggacaaggacgagaacctctccggcgacgacgtgcgtgaaggcctgaccgccgtgatctccgtcaagctcaccaacccgcagttcgaaggccagaccaagaccaagctcggcaactccgaggccaagaccttcgtgcagcgcgtgatgaccgacaagctcggcgactggttcgacgcccacccgaacgaggccaagaacatcatccagaaggccatcgaggcctcccgcgcccgtctggccgccaagaaagcccgcgagaacacccgccgcaagtccatcttcgagtccgccggcatgcccgacaagctcaaggactgccagtcctccaacccggaagagtgcgagctgttcatcgtggagggcgattccgcaggcggttccgccatccagggccgcaacccgatcacgcaggccatcctgccgctgcgaggcaagatcctcaacaccgaacgtgccagcttggaccgcatgatgaagtccgacaccatcgaatcgctgatcaccgcggtcggcggcggctatggcgaggacttcgacatctccaaggtccgctaccacaaggtcatcatcatggccgatgccgatgtggacggtgcgcatatcgccaccctgaacctgacgctgttcttccgctacatgcgcccgatgatcaccgccggctacgtgtacgtggccatgccgccgctgtaccgcctgaagtggaccaagggcccgcacgacttcgtgtacaccgacgccgagcgcgaccgcgtgctcgccgaaggcaaggccaacggacgccagctgcccaagggcgaaggcatccagcgctacaagggtttgggcgagatgagctaccaggagctgtgggagaccaccatggaccccgagcaccgcattctgaagcaggtgcacatcgaggacgccgccgcggccgacgagaccttctcgatgctgatgggcgatgaggtcgaaccccgccgcctcttcatccagcgcaacgccaagaacgtgcgttggatcgatgcgtaacggaatcctccaacctccctcgtcagagggaggtacacaacggacttagacaactaaaggaacaacagtggcagatgaaaacaacaccggcgacgagcagttcacgccggacggctcgatggagccgttgagcccgcaggaggcggacaccaccgactacggcctgatggataccggcgaacgcatccagcgcaaggacctgcagcaggagatgcgcgagtcctatctggcgtatgccctctccgtgatcgtcgagcgtgccctgccggacgtgcgcgacggcatgaagcccgtgcatcgccgtgtgatctacgcgatgtacgacggcggctaccgccccgatcgcggctacaacaagtgctcccgcgtggtcggcgacgtgatgggtaagtaccacccgcacggcgatttcgccatctacgacaccttggtgcgtatggcccagtcctggtcgatgcgcaacatgctcgtcgacggccagggcaacttcggctcccccggcgatgacccggccgccgccatgcgttacaccgaatgccgcatggccccgctggccatggaaatggtgcgcgacatcgacaaggacaccgtcgacttcgtgcccaactacgacggcaagacccaggagccgaccgtgctgccggcccgcttcccgaacctgctcgtcaacggttccgccggcatcgccgtcggcatggccaccaacatcccgccgcataacatgcgcgaggtggcggacggcgtccactgggcgctcgaccacccggacgccagccgcgaggaactgctggaaaacctgatccgcatcatcaagggaccggacttccccaccggcgccaccatcctcggccacaagggcatcgaacaggcctaccgcaccggccgtggcctgatcaccatgcgtgccgtggtcaacactgaggagatcaacggccgtatgtgcctggtggtcaccgaactgccctaccaggtcaacccggaccgcctcgtcgtctccattcgtgaggccgtgcgtgacggcaagatccagggcattgccgacatgcgcgacgagacctccggccgcaccggccagcgcctcgtgctggtcttgaagcgcgacgccgtgccgaaggtggtcctgaacaacctgtacaagcactcccagctgcagcagaccttcggcgccaacatgctggcgctggtcgacggcgtgccgcgcacgctgagcctggacgccttcatccgccactgggtgaaccaccagctcgacgtaatcgcccgccgcaccgcgtacctgaagcgcgaggccgaagagcgcgaccacatcctgcagggctatctcaaggccctcgacatgctggacgaggtcatcgccctcatccgcgcctccgaagacaccgacaccgcccgtacgggccttatggggctgctggacatcgaccaggtgcaggcggacgccattctggccatgcagctgcgcacgctgacccgcatgaaccgcgacaagatcgtggccgagcatgaggaattgcagcgcaagatcgccgactacatcgacatcctcgccaagccggaacgccagcgcaagatcatcggcgatgagctcgacgagatcgtggccaagtacggcgacgaccgccgcaccaagatcctgccgttctccggcgagatgaacgtcgaggatctgatcgccgaagagaacgtggtggtcaccgtgacccactccggcttcatcaagcgcaccaaggccgacgaataccgcgcccagcaccgcggcggcaagggtatcaagggcaccaagctgcgcgaggacgacgtggtggatcacttcttcctgacctccacgcacaattggctgctgttcttcacgaacaagggccgcgtctaccgcatcaaggcctacgagctgcccgagggttcgcgcgactccaagggccagcacgtggccaacctgctgcagttcgcgcccgacgagaccatccagaccgtgctgtccatcccgaactacgaggtggccaagtacctggtgctcgccacccgttccggcaaggtcaagaagaccccgctggccgagtacgattccccgcgccagggcggcctgatcgccgtgcgcctcatggccgacgagaatggcgagaacgccgacgagctcatcggtgccgcgctgtgcaacgccgaggatgacatcatcctggtctccaagctcggcatgagcctcaagttccaggccgacgacgagcagctgcgtccgatgggccgccagaccgccggcgtgcagggcatgaagttccgtaacgacgacagcctgctggccatggatgtggtccctggcgactccgacaaggacctgttcgtggtgaccaacgagggcttcgccaagcgcaccgccatcagcgaataccgtctgcagggccgtaacggcttgggcatcaaggccgtgcaactggtcgagggccgtggtgccctggtcggcgcgctcgtggtgtccgaagacgatcaggtcatggccatcatgaagtccggcaaggtgattcgttccaacgtggacgaggtcaagcgcaccgggcgcaacacccagggtgttaccttcgccaagcctgacaagggcgacacgattctctccatcgcccgtaacgaggagaaggacgagcccgaggacagtggcgatgccgcggcgaacggcaccgccgagaccgcacaatccggcgagaatgtgaacaacgcggacgaggcgtgagcagcgtcctgaaaagctggtagcctcgcatacagcagaggctaccgccaagcctgttaaggagaaacgatgagcgagaatctcgaagacaacgagccccggatcataccgccggcagtcggcaatacgcagaacgatcatgtcgagccgctgatcggtactgagcacgctccccgcgtggcacgctccgtgtccagcgatccggaagaatccacgttgccttcttcaggtgccgccactcccgtgcgtccggcacctcgccgtagcgcccccagggctcgccgcatgagcttgtcgctgacccgcgtggatgcttggtccgtggccaaggtgacgttcatgctgtccatcgccgtggcgattattcaggtcgttgcctccgcgatcgtatgggtgctgcttgatgtggtcggtgtattcagccagattacgcagattgtgtcttccaccggtcttgatgcaggcggtttcgatctcaagaacgtgttgtcccttaccaccgtggtctccggcgtcaccatcttctcgattgttgaagtggtgatcttcaccctgctggccaccattgcggcactgatctacaacgtggtcagctcgctggtcggcggcgtgcatgtcacgctcggcgacgactgatatagctatactggcagaactcccctcagtgaaccgcaccccggttgttggactgaagtaattcagattcgatgatcggaggtgcggtttcttatgtgtggggttcgtaggcgtcgttgctgggccgagacttgggactccggcgacgctgggggtggcaggcgtcggtgttgggacaggttttgtatctctgacgacgctgtggagggcttaccgtcgtcagcggtacagatcttggagttctgccgatgctgagggtgtgttctgtgtcgtttgcgtccaattcttggccctctgccgacgctgggcacagcaagcgtcgttgctgggccaagttttggactgccgccgacgcagagaatgcacacagcggtgttggtctgccagcgtgtggcagcttggcgccgttgaggaaggtctatgtggtgtggttccgccaaaggactggcaggttggcgctactgaggggactttatgggctcttccggttttggcgtgtaggggccgtgcggtttcattcactttttcaatcacacaccgaatcaaaccgcacggcccctacgcaccaaaatgcgaagagccggtttcgctaactagtgcctatatgcctgcaatcaggctgatttgtgctgtcaggctggctggcgtcagcggttgatctgccgatgttgctgctcgtcagtctggactgttgggctttcgttttgacagcggaaggaagatcctcctcgcggtagggcaacaattatcagtatcataattaaggtaatcgtgattacattaaccatgatactcttattattgggcggtaggcggatcggagggctgcaatgtttgtcgcacgagagcacgagttacaagtgctggaaaagctgtttaccagtgattcattcgaaatggtggtgctgtacggtaggcggcgtgtagggaaaacggcgttgatcgacgaatttgtcaaagataaacgcgtgctgtacttcacggccatacagcaaagcgccaagatgaatcttgaagatttctcaagagcggcattgtcgttctttggtatgccggattccaccccgtcgtttggcaggtggtctgatgcgttatcgtttgttgctgaacgtgctgcacagactgacgaacgtatggtgttcgtattcgatgagttcccttatgcagctgccgccgagccagcattaccctccatgttgcagatagcaattgaccatggattcctcgccacaaaagtgacgatgattctatccggtagtaacgagggattcatggaaaacgacgtattggggcgtaaaagcccgctatacgggcgtcgtacagcacagattcgactcctgccattcgactatgcggatgcggcaaaatttctaacgaacacatctccgcaagaactggtccaatactatgcgactttcggcggtacgccatattatctggcccgtatacaggaagccgatggctttgaatccaatgtgctgcgcttgatgttcgacaacttgggcgtactgcgtgaggaacctatgatgctgttgcgtcaggagcttcgtgaaccggcatcgtattattcgatattgcaatctattgcgggtggtaattcctcgccaaagcttatcgctgaacatgcgggtgtcggatctgattcgattggagcatatctgaaaacgctggtcgatttgcgcttaattgagcgaaaagtgccgtttggtgaagatccgagtaaatcgcgcaagggaatgtatgtggtgagcgatcccttctttgcatattggttccgctttgtggggcgcaacatgagcattttggatggtaatatcagcgaggaggttacgagcagactcgcttttggaccagcgtttgatacctatgttggtcaacaatttgagacgatttgcctgcaatggcttattcgaaacaacgctatgggcaacctcccctttgttgccactcagttcggcaaatggtggggcaatgatccgattgctcacgagcaaaccgatatcgatgtgattgctgcggattcgctcgataaaacgattctgttcggtgaatgcaaatggcgtaattcattcaacgaaacggaggctattgaaaagctccatcagcgtgctggcttagtccgcggctatcaggcaggtaatgcgtggcttatgctgttcaccaagaatccggtgagtgagtccacgcgaacccgctacatggatgatgaacgaatggtgttcgtttccgcggaagagttatacactgcgtgatgcattactgggtgattgtgacgcggtatctagagtcctgccgacagccacgtggcaattacgccgaatcacgcaccaccaaatcggtgttcaggtgcatcacgcgcggtgaagagactccgttgatggctttgatgaccacgtcggccatggtccagcgcgctgatccatgtgctgatcgacggtggtgagttccggggttatggaggtggaagctaagttgttatcgggcttacgtatttggggatagcacttgttgctcgttgtacatatagcaatgcccttgcctcctcacgggaagcaagggcattacgctactgcttagtactgctcagaggcaagcgtcacagcacgccctgggcaaccatggcgttggcgaccttgacgaagccggcggcgttggcgccgagcatcaggtcaccctcgtgaccgtattccttggcggcggccagggagttggcgacgatctcttccatgatggacttgagcttggcgtcgacctcttcgaaggtccaagacagacggtagctgttctggctcatctccaggccggagacggccacgccaccggcgttggcagccttggccgggccgtacagcacgccgttcttctggtagacctcgatggcctccggggtggacggcatgttcgcaccctcgacgaccacggtcacgccgttgtccacgagcttctgtgcggattcgccatcaacctcgttctgggtggcgcacggcagagcgatgtcgcccttgacggtccacacgcccttgctgccctcgtggtactcggagcccggaacgcgctcggcatattccttgatgcggccgcgctcgacttccttgatctgcttgacgacctcgacgttgatgccgttcgggtcgtagatgtagccgttggagtcggagacggtgacgaccttggcgcccagctgctcagccttctgagcggcgtaggtggccacgttgccggagccggagatcacgacggtcttgccctcgaaggagtcgttgcgcagcacgcgcagggcttcctgggtgtagtagcacacgccgtaaccggtggcctcggtgcgggccagggagccgccgaattccagacccttaccggtcaggacgccggagtactcgtcgcggatgcgcttgtactgaccgaacaggtagccgatctcacggccaccgacgttgatgtcgccggcgggaacgtcggtgaactggccgatgtggcggctcagctcggtcatgaaggcctggcagaagcgcatgacctcggcgtcggacttgcccttcgggttgaagtcggagccacccttgccgccgcccatcggcagcgtggtcagggagttcttgagaatctgctcgaagccaaggaacttgacgacggactcggtcacggtcgggtggaagcgcaggccgcccttgtacgggccaatggcggagttgaactggatgcggtagccgcggttcacctgaaccttgccctcgtcgtcaacccaggccacgcggaacttgatggcgcgctccggctcgacgatgcgctccagcacaccggccttctcgtactccgggtgcttctcgacaaccggctgcagggtctcgaagacctcgcgaacggcctgcaggaactccggctgatcgccgtcacgggcaacgacctggtcgtagacacgcttgatgtactcgtcagtgagcatgattctcctcgatttggtagggaattaagacggttttattctatgcgcgcaggcccttgttgcatagagtctcgctcggataacgggaaagctttcggcgtggttatggagtggctcaagtttccgtttgttagatttttcgggcgattgttggatgtctgtctatgcgtgaatcgggtcgaaatggaagccgcatcacaccggaggcacgttcatatagtggacataaaggcggacttgggtgatgtcagatgtgtctgttggggatcgtgcggtctgtggggtttgtggggtgtggctggaccgtggggtcgtatggtttttgtgacctgtggggtttgtggggtgtgtggccgcaggtcttcggcgcgcaggttaccgggttcgcggtcagtgtgcgaagtaggtctgcagaatcatcgtggtctcggtgcttaccggcaccgtgcggtggatgagattgagcagttcttcaagtgcggtaggggaagccacgcgcaccaccagcacgaaactgggggcgccggccaccgaatagcaggagacgatgccgtcgatattgttcagcttgtccggaatcgaggattcggctgagtagtcgagcggggtcacgttgacgaacgcgctgatgggcaagccgcgctgctcttggtcgatgatggccttgtatcccttgatgatgccgcgcttctccagcttctgcacgcgcgactgggcggcggagactgacagtccggtcgcctgggccagttgcgcgagcgtggcgcggccgtcggcctccagcatggtgaggatgcgctggtcggtctcgtcaatcgcggtcatgatgtcttctccgttcgttgtgctctgtgttcactgtacctgttgccggaatgcgatggctttccgattttgcctggtaatttcagtagttcttcctgtgttttctgttgtgtggtggaatgtttacgtttaaagtcctaattggatgtaataattccttttgaaataagagaacgatgaaataattccattgaggagggatgatatgcagaagttttccaacatgtctctgtccgaagttgcatctgctgctgcgcctgctactatgcctgctgccggtcgggttgctgtgccgaccgccgagcccgcgagcctgtccgccgaagccctgaatatcccgcgctccggcatccgagacgtattcgaccgtgtagagcgcgtgcctgacgcgatttcactgaccgtgggggagcccagcgccacggccgcgccgcatatcgtggcagccgcttgcgaggccgcacaggctggccgcactcggtacaccaacgtgcttggcatccccgaataccgcaaggccgtggccgattactccgcctgtgtgaagggacttacttatgatcccgaaaccgagattcaagccgttgacggtgccacgattggcctgtttctggcgctgaaagccgtggtgggcaccggcgatgaagtgattattccctcgccgttcttcacttcctatgacgccgaagtgatgctgtgcggcggccgcccggtcaccgtggcgctgcgtccggagcacggcatgcgcgtgaacgcggcggacatcgaagcggcgatcaccccgcgcacccgcgccgtaatcatcaactcaccgggcaatccgaccggcgcggtaacctctgccgccgaactggcgcgtattgccgaagtatgcaagcagcacaatatttgggccatctccgacgaggtttaccatccgttcgtgtttggggaaacgttcggggaaacgcttgggggagaggcagccgtggcaccatcgatcgccgcggtgccgggcatgaaagagcgcaccattgtggtggaaagcctgtcgaaaacctatgcgatgaccggctggcgcatcggctacctgctggcacccgaagcggtcatcgaacagaccggcaaaatcgccgaactcatgcactcctcggtgaactccttggcgcaatacgcaggcgtggcagcactggctggcccgcaagataacgtggccgccatgcgcgaggaataccgcgccaagcgccagatcgtgctggacggtctggccggatgcccggtattgcgtctgatcgaaccgcaaggcgcgttctacgcctttgtggacgtacgcctgactggccttgactccggtgaattcgcagaccgtctgctggacgaagagcgcgtggctgtggtccccggcgaggccttcggcgaggaggggcgcggcttcgtgcgcctctcctacgccggagatgccgacgagctgtgcgagggcgtcgcccgtctgcgcgcattcgccgaacgggtatggaaccccatcaccggccaccacaccgccacctatcaccccatggaggtgctggcctgaggcttaaagcgaggctagaccgccattcggcctcgtcggcgcgagcgatggcctgcttcttggctcgcagcaagatgtagccgagtaccagaacgttggccagagctcgatgttggcatcgcgtcaaaacaaccgcattaaggctgccgcgtctcgtatcgttacgcgtaggggctggctgaggcgtaatgctgaagagtaacattgaagcgatggcaatcaagccgatttgagggagagaggcacacgatggcgtactgcggccactgcggaaatagagttgatgggccggcacgattttgcccggcatgtggagcgtctgtagacagcgcaccagttgcgacggcaccagtaccggccgcatcgccagccgtaccgcctgcgtcgataccggcacctgctgtgccggcgtctgcggtaccaccatcgataccagccgcgccggttgccccatcggtttacgccgcgtccgctgccccacagccggcaccaaccgttcccctgccggctttgccgattcccgctcctgccgcatatcaggcgactgatgcaaccgccgtcctggcaccgcagcgcaaatccagcaagaagctgatcgccgctctctgcgcattgcttgcgacgattctggtggcggccttggcgttcatcatccccaacttcaccgccgtcaaagcgatgctgggcttccggcccaccaatccgctggtcgtcaccttcgacgcgatcaactcgctgtccactctgcgcagcaccaaatacgaactcagaacccacagcagcactggcgattctcttgacgcgcggatgtctggcatgtattcgctgggcaaaaccaccaacgaatcctccgcgtccttcactagcaaaacagacgaatatgcaacgaccttcgcttggtacaaaggcgcattcgccgggaaatccgtttggcatgacgacgacccctactacatctactacccggccgaccaatatgaagatgacttaaggaacggcgttggtagtgatgtggcggacttgatattgaacgtcaaggatgcgttggtcaagaacggtgcttgggacatcaccggcgcggagcaaacgttctacgatcagctggacaagatgaacgacgatgggtactcgaacgacatcgaccgggtcaagggcacgaaaacgtctgccgaggtgaaggccgaggccagcaaattcatccaacaatatttcggcgtggagctggaagataagaatgtgcgcagccagctgttcccgaagacatcgtctgccaagtctgccggcaatacgcagctgtcgtaccaaatcgatatcaaagcgttgtctcagcatttcgtgaattactggatcagtcatgaagcgcagtatccgcatctgaaatcctgggtgattcagcaaatcgaggatgccggcgtggacgatgctgaagatgagtaccgtcaggcgctcgataatgtgcgcaactgggatttcggcacggatgaagagccggagatgccgactatcaccgtggatctgaactacggcagaaagcgtctgatgaattcgattgccataagcgtgtccggcaaggacgaatacggcgactcctataatggctcgctatcgttgacgctcagtcagcagaacgcggtgtctgtggacgaccccgatttgactgatatggtgagcaaagccaaggacaacaacggactggatttgtcctgaatatggtgcgtgggatgttgcggcggcgctaatttcctcggtgggctatcacgcactcttcccgcttgcagcggtctgctcgctgattggcgcggtgctgatcgtcttcatcaagtcagtgaagtaaacatacttattcatccctcttccttccataacaaacgagcggaggggttgggccattgttttgcggtgtgtccagtctctccgctcgtttatttgcttgattctgtggaatggaaggggcatgctctatgtcaaataagataatgcggaagggctgttctgcgtgcatatatcttgctgaacgtatttgagggtactttctggttaaagacacgccctatggtgggcagaatgctgccgttgtgtctggcgtcggtcgcaggacatgttgtatcatgagggcacaagcttaattcagccgtcctcaatctgattagtcgtcgggtcggattggcgtgatcggcttgcagggaatcatccggctcttccggttttggtgtgtagaggggatgcttataggtgggcttgtatggtgtgtctgaagccgccggtgtggaggaggctgcgggtgacgtagttgtcgaggttgcggaagccgagggcgatgccgcgtagggtctcgggcctgccgttgatggcctcggtgggaccgttggcggtgccgtgggcgcggtcgtcggatcgatcgtccccggtgccggcaccgtggtcggcgcatttgtcggaacggcgattggcactggagccggatggctgataagtagcggcttagacgcactttacgacaatcaggtgcacagaggcggtggagatgacccgggcagtcatttcaaggataatctcgggttttggaagtgggggtatctgttggcgttgttcactcggtatgtgttggtggggcgtcttgaggacggggcgcaggtgttctgggacacgctggagaagacgccggtcaagcgcaagctggatttcggcggcgattccggctgggcgcgggctggcgcggcggccggcggcgctgccgccgcggctgcgcccggcctgatggtcatgatccacggcatcgcccggctgctcaccccggacacgaagacgcaccacacgcataccgatgacgtgacgctgctggcttttctcagaccggtcactatatcccgcgacgcatggaacacgtacgtggcggtcgccgtgatgtggctggccggactcctcctgtactggggtttctgccggctcgtgttcggccggccgaacacctacgtccccgcctcgctggaggacttggcattcgcctcctccgtgcccgccacgaagctgcgctacatgttcggcggccccatcgtcggcacgctgttcctcatcgcgatatcgggcttccccatagcgatgacatggatgttctggtcgagcgcgcaatgggtcgacaccggcagatccacacctgactggattggatggttggctttcttctgggcgttcctcgccacatgctccccgattctgttggccttgcgtttcgtcggaccgtgggactggcggggacgtttcagcccgcgcgcgggcgccgaacgctggagccggctgaaatgagcacactgctgatgggggccgggatgggcctcatggtcgcaatctcgctcgcattcatcctcgcgttcaacatgtcccggctccgctggctcatggaccacgacatccacccgctgctcgaggagcacggactgcgcgaacccgacgacgggttcacgtcctccggcgccaaggagcgcatggccgcgttccactcggacgtcgcggaggcgctggcagcgccggaacgggaacgcgaagcgagggaacggcgacgattcactgtgttcgacccgacggtcgacaagttgccgctgccggcgggcccctacccgttcgaccgtccgacggcgtcctgggcacgcgacatctacgaggaaggcgattgggcgtacgccgacgcatgggtcagggggcggaggaagccacgcgtggtgcgcgagcaacgctacgactcgtggcgcaacgaagtcctcgcccgccacggcctgaccgacgcgccatccgccacgctcgaacacatcgaacacgccgctgcacgcatccgcgccctccaccacaccagcccagccgaagcctacaaacaagcctgcaaggaagccaccggcaacacggtcaacgacgaaaccaccggagaaggaaaagaaaacggctcttccggttttggcgtgacccgcagcctcctccacaccggcggcttcagacacaccatacaagcccacctataagcatcccccctacacaccaaaaccggaagagccaattatctgccggtaccttccacccgagaggaaggtgtagtcctccgggtccgggcgatatcgccgcaaggcgaaggattttcgtgtaccgttccgtgaagacggagcgacaatgaccacgcggttggtctgaatcctcgaggggtggtccttaacaggaccacccctttttcgatggagagggccatggcgcactgggagaatccctcgaacaagaacgcaaaaaccctcagaatcggtattattccaagggttgtctgtggagctagccgggttcgaaccggcgaccctctgcttgcaaagcagatgcgctaccagctgcgctatagccccgtgagaaaaaaagagcggctcgcagccgcttcattttttctgtgggcccgggaggacttgaacctccgacctcatccttatcagggatgcgctctaaccagctgagctacgggcccgatccatacgcttcaaaagcgcacaagtaattacaataccattgaacggcggtatgtcaataacggcgtgtcgtgattgtcgcttgcgccatgattgccggctcgacggtcaatgtccagcaacgccacagccaatgcccagctatgtaaccttgcgttctcacaccgtaatgctgcggttacacctccctctctgcgcagaaatgtccaatacatatgaggcttctgctgttttcgtgggttgggttcttggttgtggtgggcgtatgtcgagtccgccgcggcggagcatgacgagggcgatgggattgttcgcgtggtggaagccgtaggccatgcggatggtgaccttgatcctg

SEQ ID NO: 687 - DNA, 7218 bp, Unknown
  R14_15m  MAG No. k141_23582
gacacccaccccaataacaaggccatgcagcacgtgctcgaaagctccggcttcgcccgttgcggcctgatccagctgctcgaccggccggtcgacaccaccagaatcgcctatcagcgccacgagtggtgagtgtggctgtcgccagcgtgttcggttccgcggtggagctggtcaggtaaggtccacgtcgtcgcgcacgtacggtccgtcggccgcccgttcaaactcgtgcatatcgcaaaaaccgtacgctgaaagtaactcagcgtacggttttcacgaaagcagccatcgactatcggtcagccgatagacctcagtcctcagtcgcagcgaccttggtgtcagccccggccttctgctcaaggccgagcttggagcgcttgcggctgtagccgaagtacacgatcaggcccagaccgaaccagatggcgaaacgcacccaggtctcccagttgagaccggcgatgagcacgaagcagaatacgatggtcagaatcggggtgaccggcacgcccggcgcgcggaagccgcggggcgcattcggctgggtcttgcgcatccatagaataccggccgacacgatgatgaacgcggacagcgtaccgatgttcaccagctcgaacagcacgttgatgttgatgaagccgccggcgaacgcggtcagcagaccgaagaaccaggtgcccttgaacggggtgcggtacttctcgtgcacgtggccgaagaacttcgggaacaggccgtcacggctcatggcgtagcagatacgggactggccgtacagctgtacgagcatcaccgtggtcatgccgatgagggcgcctaggttcacgatcaccgcgagccagttcatgccggtctccagaatcacgccggccactggggcgtcgatgtacttggcgaactccttgtagggcaccacgccggtcatgatcatggtcatgacgatgtagagcacggtggaaacggccagggacagcaggatgccgcgcggcagtgtcttgttcgggttgatggtctcctcggcggaagaggacacggcgtcgaatccgatgaagctgaagaacacgatggatgcggccggcacaatgccgtacggctgggtggagccgggctggaaagtgtagatgccgtacggggagaacggctgccagttggacggcttgacataccacacggcgcacacgatgaacagcacgatgatggcgagcttgatgagcaccatcacgtcattggtgcgcttggtctggttgatgccgatcgagagcacccacgtgatgatcagcacgatgacgaaaccgggcaggttgaagtaggtggtgacgtccgggttggtgccgtaggcggcggtcagctcgaccggcagatgcagtccgaagccttccaacaacttgttgaagtatcccgaccagccggcggacacggtggccgcctgcagagcatactccagaatcagatcccagccgatcacgaaggcgatgagctcgccgaacgccagataggcataggagtaggccgagccggacaccggtgccatggcggcgaactcggcgtagcacaggccggcgaaaccgcagcagacggcggccagcaggaacgatacggacagggccgggccggcggtgagcgcgcccttgccggtgagcacgaagataccggtgccgatgatcgcgccgataccgagcatcgtcagatcgaaggtgcgcatcgtgcgcttcaggggagtggattcggcgacaagctgatccacgcttttcttacgaaacagatccatgttcttctctcatgaaacttaagatatggggctagaccggacggatttccgggatcccggcacgcctcaacgccgggaatcaaaggcggcttccgagaaaccgcatatcggtcattagtgtacgactgccgggcgaaaacaaacgattgtgaccacacgtcacattcctgcgcaacaataggtgcctatgagcatgaacgcagcacccgaaatcgcattctcgtccgagcagggcaaggccaactatgcggccgcccgccgccaataccccgcacaggccatcgtgaacctcaaaaccatgcgcgacaacatggcccacctggtctccgtggtcggcggcccgaactccggcacggcggtgatgggcgtggtcaaggccgacgcatacggccacggactgctgcccgccgcactggccgcgctcgccggcggcgcgacatggctcggcaccgcgcaatcgcatgaagcactgctgctgcgcaaactcggcatcggccccgaccgttgccgcattctgacttgggtctacaacggcaccgaagcgccattcgatgagctgatcgctgccgatatcgacgtatcggtcggctccctgcccggcatcgatgccgtggccgccgccgcacgcaagctcggcaagcccgcccgcgtacacgtcaaggtcgattccggcttcggtcgcaacggtttcacgccggctggattcgacgccgcgctcgccaaactcgtgccgctcgccaaagagggcgtgttacatattgtgggtcagtggagccatctcgccgtggccgattcgcccgatgtgcccgaattcgtcgcctccaccgaccagcagatcgcaacgttcaaggacttcacgcgccgcatggaacaggccggcattccgccggagatccgtcacctggccaacacggcggccactttggaccgcccggagattcacttcgaactcacccgccccggcatcggcctgtacggctacgagcccgatcccgcgatgggcaccccgcgcgactggcatctgaccccggccatgcgcctgcaggcgcagctcggcacggtcaaggatgtggaggccggccatggcatctcttatggccgcacctacctgaccccggacaacacctcgaccgctattgtgccgctgggctacgccgatggcatccaccgctccgcttccggtttcgatatggaaggtgccaagcacgtggagaagccgggcggcccggtgcgcatcatgaccactgaaggtccgaagctctaccgcgtgtgcggccgcgtgtgcatggaccagttcatcgtggacctgcacggatccgccgccgaactcggcgttcacgagggcgacacggtcgaactgttcggcccgggccgcggcgaggattacgttgagcctaccgccgacgattgggcccgcgccgccgacaccatcagctacgagatcttcacctgcctgcgcaaccgcatcccgcgcctttacgagcatgccgccgaagtgctgcccgccgccgacctcgccaagctcgacccggccacgctgctataaggtgcattaccgccatacggtggcaccccgtaatcccttcttcccgaatatgtgccgttgacatgtgctgagcgtcacatattcgggaaatcggccccaatctcccgaatatgtgccgttgagttgacgtcagtggcacatattcgggaagtcgggattactgcggccgatatgtgtgcctatgcttggcatatggaaacaacgttggatggggaacaggtgctgagcgatgagggctacagcgccttcgacgaggagcggtgggcacccgagccgcccaaatccaagtcgcgcacggctttcgaacgcgatcgcgcgcgactgattcattcgtccgctttgcggcgtttgggcgcgaaaagccagattctgattgccggtaccgacgatttcgcccgcacccgactgacgcatacgctggaagtcgcccagatcggtcgccaaatcggcgcattgctcggctgtgatccggacgtggtcgactgcgcctgtctggcccacgaccttggtcacccgccgttcgggcacaacggggagcgtgcgctcgccgacatcgccagcaatatcggcggcttcgagggcaacgcacagaccatgcgtatcctgacccggctcgaacccaagatctttcacccggacgggcgttcggccggcgtgaacctgacccgtgcggccttggatgcggccgtcaaatacccgtggaccttggccgaagccgaccaacacccgaagggggagcggtcgaagaagttctgcgtctacccggatgacgaaccggtgttccgctggctcaaaatcggcgcgccccaggccgccaaacccatggaatgccagatcatggacctttcggacgatatcgcctactccgtgcatgacgtcgaggattccatcgccaccggcgcgttcgatccgattgtgctcgccgatccgaagatgctggaccacatcatcgagcagacgcgcgcatggtatggggcgaagtgggatgccgacaagctgctggccgcgttcatgcgattgcgccgagagcatttgttccctgcacatttcaatggttcgcgcgaatcgttggcacagctcaagaacatcacgtccgatttgatcggccgcttctgctggtcggtggaaaccgccacgcgcgacacatatgggcccgggccgttgacccggtattccgcgaacatcgtgattcccgagaacacgaattacgagatcgtggcgttgaagggcatcgccgtgtacttcgtcatggcgcctcgcgagcgcgagccattccatcaggaggagctcaagatcgtatcggatttggtcgatgtgcttatggccgattcgccgctcccatccgacgctttggaaagccagttcctggccgattggaatgaatccaccaatgacaacgagcgcctgcgcgtcgccatcgatcaggtcgcaagcctgaccgacaactccgctctggccctgcactccatcttgtgctgagggcgtgttggacgggtgcttccctcagtctcgctgcgcgagccagctcccctcgagtgaggggagctgtcgctgtaggcgactgaagggagtttcgcggaagaaatgataaccgacggtaaaaatttaccgtgtctcaggtgaggcggtactctagagacttatggtcggaatgattaagaaagaggatgtcgagaaggtgcgcgccgccgcggacctgtatgacatcgtatctgcgaccgtaacgcttaagccctccggcaccggcaccttcgtgggcctgtgcccgttccacgacgagaaaaccggcagcttcaacgtgcgcccctcactcggcgtgtggcactgcttcggctgcggcttgggtggcgacgtattcaaatacgtcgaacaatccgaaaacatcgacttccgcgaagccgtggaactgctcgccgacaagtaccatatcgagctgcactacgagaacagcggcaacggcccgaaccgcgagaacaccggctccaagcgcacccgactgctggaagcctgcgaggaagcccaacgcttcttcgtctcccagatcctgaccaaggaagcactgcccgcccgcaagctgctcggaggccgcaacttctcccaagccgactgcgaacgtttcggttgcggctacgcgccccaaggttgggataatcttgtgcgccacttggcctccaaggggtttacgcagaaggaaatcctcgacgcgggcttggcccgccaaggccagcgcggcatctatgactatttccgcggccgcgtgacgtggcctatccgcgattcgaccggccgcacgctcggcttcggcgcgcgcaaactatacgaagacgatcagatcgccgccaaatacatcaacacgccggacacgcagctctaccgcaaaacccaggtgctttacggcatcgatttggcgaaatccgccatcgtcaagaagcgacaggtggtgatcgtcgaaggctatacggacgtgatggccatgcacttggccggcattgacaccgccatcgccacgtgcggtacggcgttcggcgccgagcacgccaagattgtgcgccgcctgatcgccgacgattcgctgggcgcggtccagctggtcgggccgttgaaggtcaaggaccagccgttgagctcgcgcatcgtgttcacgttcgatggtgacgccgccggccagaaagccgcgctgcatgccttcggccttgattcggccttcctctcccaaaccttcgtggccgtggccgacgacaatctcgacccgtgcgacctgcgcatcgagcgaggcaacgaggcggtgcgctcgctgatcgcccgcgccaaaccgttgtatgacttcgtgatcgacgccgccatcagccggttcgacctgacctacacgcccggccaagtgggtgcgatgaaagccgtggccccgctggtggcgcagattcgcgaccgctccctatgggatgcttacgcgcgcaagtccgcgggccgtatcggcgtggatcttgaggtgatgcgccgcgaggtgatgaacgcgcgccggcagatgcatgtacgcgatgaggacgcctacgcgcccaaacgtcgattcgagcgtgacgagccgcgtgtggaacccggcaccaacccatacgccaatccggccacgcgcaaggcgttggagcgccgtgacgccgccgaacaggcatatttcaagatcgacgacgccgtattcatcgccgaacagcagttcatggccgtgctgattcaggtgccgcgcgccatcgaccgcaccatgttcgggcagctgaccatcgaccatttcatgacttcggtgttccgcaccctgttccaggcgatcgcggccgccggcgggctgccatccgacgataccccgcaggggctgtggatgcacaacctcaccaaggccggcgggccgatgctgaatcaggtgatcaacgagctggccgtcatgccgttgccactgcctggcgacgacaccggtagcggtgcgcagccggtgcaggccaacgtgtcgggaggaggtgttggcgtgaatggcggtgccgccgcagtacagctgcgtcctgccacgccggaggagcagcgctacgccactgagcttctcacccgattgttggacatgggcttcatgcgccagatcggtttggccaaacgccgcatggcccagctgcccgacggcgaagagaagataaccctcctcggccagatcacccgcatggaaaccgcccgtaaagacctcccagcccaactctacggcaacaccgtcggctaagacctcccactgattgcgcgcatcttcgaatacgtgccggatgcataaggccatacaaccggttgccggattggatgggtgcagaagttgcagattggccccatccaaattggactggtttgggtggggccaatccaatcc

SEQ ID NO: 688 - DNA, 7809 bp, Unknown
  R14_15m  MAG No. k141_23821
ggaagaggtcgtgagtccaattctcactcggggctctctggcggggtagctcagctggctagagcgtacgactcataatcgtaaggtcaagagttcgagcctcttcctcgctacaaatcgcgcccgctaaccggtgggcgcgcactatacctaagaacacagaggtgaatgacaatggctaagagcgccgacatccgtccgggcatcacgctggcctgcaccgagtgcaaggagcgtaactacattacgactaagaaccgtcgtaatacgcccgaccgtcttgagctcaagaagttctgcccgcgctgcggcaagcagaccgtgcaccgcgagactcgttgatcgcaagcatcacagctttacaaaacccggcccattcggccgggtttttgcgtattgactccagagccgagtggtagggtgcggaatcagtatccgcatcgcgtgagaaacggcagaaatcccgcgtctgaacgaacccctcgcgggcgttctgccgtttcagccgatgattgccccgatatcgcacctgcgccactaagataggaagtcatgacaagctttgcagacatcaccaccatgggcgtgggcggccccatcgcccatttcatcgagccgaccacgcgcgtggggctcatcgaagccgtggaggatgccgattccaaaggcctgcccttggtcgttatcggtggcggctccaacctgcttgtttccgataagccttttgacggcgtggtggttcgagacgcccgacgcctcatcactgtgccggacgaggctgcaccggtagagggcgaggatcgcaccgtgcatgtcaatgccgaggccggtgccaattgggatgatttcgtggccttcaccgtagagctcgggctcgagggcgtcgagggactgtccggcattcccggcacagtcggcgcttccgtggtgcagaacatcggtgcctacggacaggaagtcgccacttcggtcgaatcggtggaagtctgggatcgagacaccaaaacaacgcgcgacctcacacccgccgatcttcgattcggctatcgatactccgcactgaaggccagcatgtacgccggtcccggccagccggccgaccgattcttcccgacgccacgttacgtggtgctctccgtcacctttgccctgacccactcggccgaaggcacggtaggttacggacagcttgccaaagcgcttggcgtcgaagtaggcgaccgtatggccaccgccgacatccgcaaagccgtgctcgcagtacgtgccgccaagggcatgcttgaggatcccactcgctacgccttgcccgacatggccaccgccaagcgcgaggccaatatcctgaccgatctggagcgtctggcctccctcaatgaggccgccggcgttcccgttggcgatgacggcctgcctgctcccgactacaatcgccacagctgcggctcgttctttatgaatccgattctgaccgccggccaagcggcggccctgcccgaagatgcgccgaagttcgacgcgactctgcctgacggcactcccggcaccaagacgtccgccgcctggctcatcgaccatgccggctgccataagggatataaggtcgatgcgtacgcgccggccagtctatccacgcagcacacgctggccttgaccaatcgtgggggagcgagcgcagccgatatcgcagctttggcgcgcgcggttcagcaggcggtcaagagcgcgttcggagtggacttggtgcccgaaccggtctgcgtcggtgtgctgtaatcgcgctattgatcgatggagtggggtattaatcccatatattgcggactctaagtcttattaatagacaagacacgcgggctcttctatactcgattgtcggtattgtgcgcattcggtgcgcaaacaacagagaaaaagaagagcactatgcaactgttccgtacgaaatccgtcgaacagaccattgccgaaacgggtgaagagggccgcaagctcaagcgcaacctgacttggtgggatctgtcaatcatgggcgtggccgtagccgtgggtgccggcatcttctcggtgggcgcgcaggccgccgccttccacgccggcccggccgtgatcatcagcttcctgatcgccggcatcgtgtgcggcgcagccgtgatgtgctacgccgaattcgcttcgatgattccggtggccggctccgcctacaccttcacctacaccacggtcggcgagatcatggcctggatcatcggctgggatctgattctggaaatgctgatggccggctccgtgatttccaaatattggggcgtatacctcaacgatttcatgcgcctgatgggctggaacgccaacaccaacctggcgttcggctccttccatatcgatatcgccccgatcatcatcgtggcgttctttaccacgctgctcgtattcggcaccaagatcggcgcccgcgtggacggtgctatgaccgtgctcaagatcgccatcgtgttctttgtggtgatcgtcggcttcttctacgtcaaggcctccaacttcaccccgttcattccgccgagccagccggcctccaccgtggaaggttcctccgccgtcaccggcgtgatgacccagccgctgtggcagttcgccaccggcatgaccccatccgtgtacggcgttcccggcatcctttcgggcgcggcgctcgtgttcttcgcgttcatcggcttcgacgtggtggccaccgcctccgaggagaccaagaacccgcacaagaacgtgccgctcggcatcggcgtgggcatgctgctcatcatcgtcatgtacatgctcgtggccgtggtgaccaccggcatggtctcctatgccgatctcgccaagcaagacagcccctcgctggccaccgccttcgaactggtgggtgccgactgggccgccaagatcatcagcttcggcatcgtgctgggcctggccaccgtggtcatggtgctgttgctcggcctgacccgtatcgtcttcgccatgagccgcgatggtctgctgccgcgcggcctgtccaagaccggcaagcatggcaccccggccgctctgcagatcgtcgtcggcgcggtggtggcgctcgtggccgccttcttcgacatcggcgtgctctccgacatggtcaacatcggcaccctgtccgccttcacgctggtggccatctccatcccgattatgcgcaagaagcgccccgacctgccgcgcgccttcaagatgcccggcgacccgtggattccgatcctcatcgccgtggccaacttctggttgatgctcaacctgtccgtgctcacctggattcgtttcgtggtgtggctcgtggtcggcgtcgccatctactttggctacggctactggcatgcgcgcctcggcaagggcgacctgaccgaaacgctgtccgccgaaaccgataaggccgttaacggctgagagcgaggagcgtcccaacgggcgcgtaccctcgtaccagtatctgttaaggaggattccatgccatatgtgatcgctcagccttgcgtggatgtcaaggacaaggcttgcgtggacgagtgccccgtcgactgcatctacgagggttcccgctcgctgtacatcaaccccaacgagtgcgtcgattgcggtgcatgcgaaccggtgtgccccaccgaggccatcttctatgaggatgatctgccggacgagtgggcttggtacaaggatgccgctgtcaacttcttcgctgaagtcggcgatttgggcggcgcttccgccaatggcccaatcggcaaagacccggaacaggtcgccgcgctgccgccgcagaaccagtaagctgatttgcggataagcgctgcacacagcgcatagttcggattgaaccctcggtctatcacggccgagggttcgtcgtatcttaggaacataccgtccaagaaaggggttctcatgggcttccacgcatattcgtcgccatacgactggtctcgtatcgccggcttcaaagccaccgccaaaaccgtgccgggtggcatgatcgacctgtccgtaggctcgcccgtggacccggtgccgagcagtgtccagcaggcgctggttgccggcgcagacgcccccaacgcccatggatacccggtcaccgccggcagcgccgaccttaaggccgctatcgatacatggttccgcgaactgcgcggtgtggatctgaagtccatcaacgctgccgccgtacccaccgtgggttccaaggaggccgtggcactgatggccagcctgctgcaccttggcgaaggcgatgtggtcgtccaaccggccgtctcctacccgacttacgaaatcggtacccaacttgccggcgccaccgtggtcaaagtcgatgatgtgaccgacgtcgattcctgggtgaatattccgaacgtcaaggccatctggatcaactcgccgtgtaatccttccggcgaggtcatctccgctgactggctgaccgacatcgtggctgctgcccgtcgcatcggtgccgtggtgctctccgacgaatgctatgcgttaatggactggcgttcggtgcgccgcaatacagccgcgtcctatgcgcctgccgcgtctgcatctgctgcgtctgtgcctgccgcaccggtggccgaatccaacgagcccgcctccgataccgcattcagtctctccgccacgccatgtgccctgaatccacatgtgtgtgaaggttcggcagctggcatcctggtgctctactcgctgtccaagcagtccaacatggccggctaccgtacggctctgattgccggcgattaccggctagtcaaggaaatggccgaataccgcaagcagatcggccagattatccccggcccggtgcaggccgccatggccgcaggtctgaaggacacagccgccgtgcacgagcaatgggggcgttaccgtcgccgcctatccgcgctggttgacgcgctgaaggcatatggctattcggcacaaatgccctccggcgcgctgtacgtatgggtcaaggccaagtccggcgactgctgggccgatatggccgagctcgccaagatcggcatcatccccagccccggcgaattctacggcgctcccgcctacctgcgtttctccgccaccgccaccgacgaggccatccgctccgcctgcgaacgtctcacggcgtaatgagatcgcaagtggcgttgagccgttcacgccccaaactgggcggccttgctgccaaatttgcggcgtacggcgtccagtgcggcctcggcatcatgcaaacgtgcctgtgaggtctggccgcgggcattgtcggcctcttcgagcatgtcatccagtgaaggctgcacggccgtagccgccgcctcactgagcgaagacgtgctcataccggccaagcgaatagttttgggcaggggagtggcagactccgccgaggccggtagccccagcatgactttcagctgccgcacgcattccgggtacagcacgccggccgtatcggtcggccgctccatcgtaaaagaccgggtctgatagctcaggtcggcgaaccgcaacttcaccgtcagtgtgcgcgccaccagccccttgcgccgcagcgtgctggccacatcgtcgcaggccgaacgcagtagcccacacaccacgcgcatatcgcgtgtatcctcggccaaggtttcctcggacccaatggatttctcctcgcgcaccgtggtaattttgcgggaatccaacccgtgcgaggccgcccataatccacgtgccgcagccggggagccagtggcacgagtcaatgcagcctcatccagctgagccaattcagccaccgaatgcacgccccaagcattaagccgcttctccaaagacggcccgatgcccggaatgccacgcaatggcatcatctgcacgaactcagccgagcgggccgccggaatcagcagcatgccgtccggcttggcattggtcgaggccattttggccaccagtttgttgcaggcgatgcccaccgaacacgtcacgtggaagcgctcggccacctgagcgcgaatccacgcgccgatcgcgctcggccgcccccactccagcagtgcggcggacacatccatatagccctcgtccaccgaaacctgctcgaaccggtcggtgacggtcaaaaacacctcgtgcatgattcggtgcgacatcatgcggtaatacgccatatccaccggcagaaagacgccgttcgggcacaactgatgggcgcgcgcggccggcatcgccgaattgatgccgtatttccgggcttcatagctcgcggcggacaccaccgcgcgcggcccggtgccgatgatcaccggcttgcctttgagcccggggttgcgcgccacctccaatgaggcatagaaggcatccatgtcgatatgcagcacggtgcatccggtctcgtcgtggccccaatcgcgtttggcggcctcaagtctcggtgcggtgctcatgccaccattgtaggaatgccgaacgaggtcatgctcactatgtggcgcgcatggcgcggcgctcattgtcgtaatgccaaatatcgccggaattccaagggtttgcgcactgtgcggctgtttcgcatggtgggtgcgattccacggaatcgtccacattgcgtcactgtccgtaacgccttccaagtcgctgcgcgctgtcccgactctccgagtagcgtaaacctcgtgaagaaggcagtggtcggtatcctcaaccgtgttcccgtggtgcttatcgtgattggtgaggcactggtgatttatttggctacggccgtcgccaaacttgcgttcacccagctcgacccgctgtattcggtgtggtaccgcgtgggattcatggcggtgctgttgctgctgtggtgcaggccctggagcaaggctaagcgagcgcagctgtttcaccgcgacgcccgcggctgggggctggtcgtactgctcggctgctcgctggtgctgatgaataccctgttttatgtggccatcagcaatatggatatgggcattgccgtgtctatcgaatttttgggaccgctttcggtggcggtgattaccggcaaaagctggcgtgagcgggtcggtatcggcatcgcggcggtcggtgtggtgctgttggccggcatatcattggccaatccgtccggcaagggcacgtttttgtatggtctgattgcgattttgatcggcgggtcgatgtggggcatgtacatcatcaccggccggcgcgtggcggctggcggcaattcgctggataatctgtgcatcgccgtgaccatcggctggctggtccagtccctgttccttggcgtgccggctgtggctcatgtggttcaccccaaggccgatgccacgtgggcgcttgagcccggcggctcgctgaagctgctggctctgctgtttgtgatttccctgatggcctcgttcattccctatgtggtggagcagatcacgctgcgacgcaccacatccggcgcattttcggtaatgcaatccatcaatcccgccatggcggtggccgtgggactggcgtttggcgagattcccggcgttggtgaaatcatcggtgtggcgttggtgatttgcgcggttatcgttacgttctccggcgatgccgcgcccgcggacggtcaataatgtgtcgttcggcacgtcgtatccgcaggacgtggtacagtgatttgctgttgcgcattattgcgtaacgtggagtcatgcctgagtggccgataggggcaccctgctaaggtgttagtcgtgtaaacggctcgagggttcgaatccc

SEQ ID NO: 689 - DNA, 25405 bp, Unknown
  R14_15m  MAG No. k141_24589
acgcgtacatcatccactggaacaccaaacgccgccagatacgactggagggacacaccccggaggaattccggaacatgtccctcacagcctaatcaggtacccttaataaaccacgtccaacaatcggggcgcagttcacgctgacgggtctctttcataagtgcagggcttcatgattggttcgcaccatggtttgcgaatcactcgcatatcacggtgcatggcattcgcatattattcacgcaaaccatcaatggcgctttggaaatcctccagacctgcaaagttctggtacacactcgcgaatcgaaggtacgccaccacatccaagtcacgcaacggtttcaggatggctttgcccacttcatctgaggtgacttcggcaaggcctcgggagcgaagatcctcttcgactttctgtcccagcagcttcagatcctcttctctgaccggccgcccctggcaggctttacgtacgccggaaatcactttgtctctgctgaatggctccacgccacccgaacgtttagtgaccagcagcatactggtttccaccgtggtaaaacgcttgttgcatttcgggcatacgcgacgccgacggatggaatgaccgtcatcgctaatgcgcgtatcaataactttggtgtcggggttctggcaaaaagggcaatgcatgctctccagaataacgtgtacgggcggaaaaaccatgccgctcgggtttcatttactcaaccggaacaataatgcgctgcccggcctgcaatgttccggactcgagattgttcagcgtaatcagctcatccactgtttccgatacatcatggccagcaggtgtaatagccgaagcatatgaccagagcgtatcccccggccgcacgatatagctggtcacctgcgtggcacccgtatctgattgggcccgctgagcggtaagcgcgccgaaaccacaccaggccagcgccaaggcgatcatcactgcgataatccgcccacgcacattccggcgggacgttccagcatgctgcatagctacacgtgcgctacgggccggggccatcaccattgaaccagtcatcacgaccacctctctcgaacagatgttctatcgaacaactgttcttataatggcacaaatgttcgacacggtcaagtcgaagctcgaacagatgtttgatttcacacgaacaacacgttatgctggtgacataacgaaaggagccctgacgtgagcaccattcccctctcccccaagcagaagccggacgagtccaccctgaccgaccgccagcgcaaagtgttggacgccattcgcacgcatatcgacgaacaaggctttgctccctctttccgggagatcggaaatgccgccgggctcaaaagtccgtcttcggtcaagcatcagctacaagttttggaagacaagggcttcattcgcatgaacgcgaacaagggtcgcgccatcgaggtgatggcaggatccgccccgaatgccgaaaagccatcacaagccagcgaagaggcaaccagcgccagcaatgtggcggagatataccaattccccgccgaagctattgccgaatcacatgacgtaccgctcgttggccgtattgccgccggcgtgccgattaccgccgaacagcatgtggacgacgtcatgcgtctgcctgaacggctgaccggctccggcaccctgttcatgctggaagtccacggtgattccatggtggatgccgctatctgcgatggcgactatgtggtggtgcgcgaacagaattccgccgtcaacggagatatcgtcgccgctctgttggatgacgaggccacggtgaagaccttccgcaaggaaaacggccacgtctggctgatgccgcacaaccccgcatactcgcccatcgacggcacacatgccacgattatgggcaaggtggtcaccgtactgcgcaaattatagcctgttcgccaccagctgatcagcgtgcgctgaatcgcgctggtcgtgctatagtcgcacactgcttacgaaaccccggcctcgcgccggggtttcgtcgtattcagaccatatcgcaaatggtattgagaagcggtttcaactcgatagagcgaaggagtacacatggcccatacccatacacccgcaccatccacatccgtaaaccctgccgcgcaccagcgcaggctgattgccacgttgaccgtcactggttcggtcttcctcatcgaagtggtgtcggccgtcttaaccggctcactggccctgctggtggatgccggtcatatgctcaccgacatgtccgtgctggtggcatccacaatcaccgccatactgatgcgccgcaagcccaacaacactcgtacttggggctgggccaggcttgaggtgctcaccgctgccgcgggcgccgtagtattgcttatcgtcggcatctatgcgttggtagaggccggcatgcgtctgttcggcggctccaaagcggaaatcgacgatatcggcttgctgctgttcgtaggcattctgggtcttgtcgcaaatatcatctcgatcttcatccttgcctcgcagcgcgaagacaacatgaacatgaaggccgcgttcctcgaggtaatgaacgacgcacttggctcggtgtctgtggtggcctctgccctggtaatgatctccaccggatggaatggcttcgacgccgtggccggtgccgtcatcgcactgatgatgattccgcgcgccatcaagctgctgcacaacgcggccaaggtgctgctggaggaaacaccggatggtcttgatctcgataaggtacgcgagcatctggaagacgtgccgcatgtgcttgccgtgcatgacctccatgccagcacggtgtccaccgacatgccgattcttatggcccacgtggtagtcgacaaagacctcaccatggaagatgccgccacaatcctcacccaactgcaggattgcctgcgcgagcacttcccggtctcggtccctcacaccaccttccagcttgagcccgagggctatagctccccctcctccaacgaattccacgaataaaaaatgctccctctggaagcattcagcagggtataaaaaatcgctgtacgtgtgcgatttttcgtgccgcacaaggtgaaggcctacaaaggtagttcgaaccttgtgcggtgtgaaaggcgctccgtacagcgattttttatcagaagccgaactgggcggcggtttccttcagcgtctcggcggaacgcttcagagcggcgagctccttgtcggagaccggggtgttgatggtgttgttgacgccctgacggttgaggagggtcggcacggacatgcagatgtcggagatgccgtggaagtccttgagcatggagctcacgggcaggatgcggttggtgtcgtgcaggacggcttcgatgatgtcgacgccggacatgccgatggcgtagttggtggcacccttaccgttgatgatcttgtaagcggcgttcttgacttcctggtggatctcctcgcgcttggcggcgtcgagcggatcgtggccgggcagcggggtccagtcgcacatggggacaccaccgatggtggcggactcccacagcgggacttcggagtcgccgtgctcgccggcgatgtaggcgtgcacgttcttgacgttgacgccggtctgctgggcaatcaggaagcgcagacgagcggagtccaggttggtgccggaaccgaagacctggttctcgggcagaccggtgagcttctgagccacgtgggtagcgatgtcgaccgggttggtgatgagcatgtagatggcgttcggagccaccttgaccaagttcggcatgatggccttgaggatgttgacggtagcgccaacgagctcaagacgagactgacccggcttctgacgcggaccagcggtgatgacgaccatgtcggcgtcgcggcagatctcaggatcgtcggaaccgtcgatggacacggtcgggtagaagctggagccgtgctgcatgtcgagcacttcggcttccacgcgctccttggcgatgtcttcaagcacgatctcgcgagcgacgccacgctgggcagcggcgaaggcgagggtggagccaacggcaccggcaccaataacagcaagcttcgtgggcttaacggtagtttccgccatgatggatgaacctctcttcaaaggcggtctgctgatgaatggcaggccttgtaactaacggttttcactctataaacccgctaagacgttttgctaccagcacaccaccctgtctgataacggtatggtaatgtttccaacggttgttagcgctcacaaacaaactgtgatgtttatcacgttagtcaatggactgttcgaccacctgagcggcaagatgggcgtcaacgtccgcttcaagctgtatgccatcatcgcggtactccaccttgtccaccttgccgtattcgcgtacacgagagatcagggagccagcggtatacggcagcagagcgttgacatgcacatgcgggaccggcagcagactttcgaccgcggtacgcagctcgtccaatccctcaccggtataggcggagacgatgaacgcatccggctgcagtgcggcgagtcgttcacgtgtcgcctcgtccgcctgatcggccttgttgaatacgagaatacgcggaatcgaggccgtgccttcgatgtccgccaacacgtcattgaccgcgtcgacctgagagaacgggtcagggtgggagccatcgaccacgtgcaggatcacgtcggcctcggccacctcttccagggtggatttgaacgcctcgatcagctgggtgggcaggcggcgcacgaagccgaccgtgtccacgtaggcgtaagcgcgtccgtcgcgggttttggcgcggcgcacggccgtgtccaatgtggcgaacagcgcgttttccaccagttcggccgaaccggtcagacggttggtcaacgaggatttgccggcgttcgtgtagccgaccacggccactgtgggcaggccgaagcgacggcgtgaaccgcgcttgacctcacgtgccggggccatctcacgaatctgacggcgcagtctggcgatacgcgtgcgaattacacgacggtccatttcgattttggtctcgcccgggcctcgcgatccgatgcccgcatccgcgcctgccgcgcgaccgccggcctgacgggacagcgaaccaccccaaccacgcagtcggggcagcatgtattcgagctgcgccaactccacctgcgccttaccttcacgcgaggtggcgtgctgggcgaagatgtccagaatcaccgcggtgcgatccaccaccttgactttggctgcgtcctccaatgcacggcgctgtgacggcggcaggtcgtcgtccacgataatcgtatcggcttcctcacgcgccacgatgtcggcaatctccttggctttgccggaaccaacgtacgtggctgcatccggcttggagcgatgctgcagcaaaccatcgcataccaccgcaccggcggtttcggcgagcgccgccaactccctcaacgattcctcggccttggcttgcgtggtgacggcggacgaccagacgccgacgagcaccacacgttccagtcgcaccttgcggtattcgacttcggtgacgtcctgcagctcgccgagaccggcgacatgcttgagctcgttgcgggcctcgcgctcctcccattcctggttggcgtcctcgtgccagccggtcgcgcgctggctgtcgtcgagcagcacttcggactgcccggccagcacaccttcaggggtaacgtcgttgttgccgcggtcgatgtcggtgtactgggtgttgtcggtcaagtgcgcctcgtttggttggaatggttcacgattcttctatggtcctttattatcatcacatgaggtgacatgctggcatagatcggcacgtaccggcataggccggctgatacaggtcggcatacgagagcggcgaatcccgcagaaatggagcgaccatggcagaacagtatttctctgcggaacccgcgtcgaaagatgtgcgccgcacattgaacgtaacgttgcgcggtcatgaggcgaccgctcaggtgtcgaacggcgtgttctccggctcgcgcgtggacctcggtacatcggtattgctgaagcatgcgcccgagccgccgcttaccggcgatttcctggatttgggctgcggctggggccctatcgccctgacattggcgtttgagtcgcccgaagcgaacgtgtgggcggtggatgtcaacgagcgcgcgctggacctgacccatgccaacgcacaggcgaacggacgcacgaacattcatacggctcaggtggacgagtccagcactcccctgcccgccgagaaccagccggcgttctgcgagacggtgccgggcgacctcacgtttgatgtgatttggtcgaatccgccgatccgagtcggcaaggaagcgctgcatacattgcttatggcttggctgccgaagctcaaggtgggcggtgccgcctatctcgtagtgcagaagaatctcggttccgattcgctgatcccctggctggacgatgcgctcggcgaggggttcactgcgagcaaatacgcgagctccaagggcttccgtatcattgaagtccgtcatgaaatatgagtatcctgcagaacttcccgtatctgccgcgcgtgatgagatagccagcgcggtcaaacgttcccaagtcgttattgtgtccggccagaccggttcgggcaaaaccacacagctgccgaagatcctgcttgagcttggccgtggcacgcacggcaagcagatcgtgcacacccagcctcgccgtatcgccgcgcgcacggtggccgaacgtatcgcctcggagatgggcgtgaagctcggtgacgaggtcggctatcaggtgcgtttcaccgacgaaagctcgcccagcacgcgattgagagtcgtgaccgacggtattctgctcgcccagatccagcgcgatccgaaactcacccaatacgatacgatcatcatcgacgaggcgcatgagcgcagtcttaacatcgactttctgctcggctatctgacggcactgctgcctcagcgccgcgatctgaagctcatcatcacctccgcgaccatcgattcggtcaagttccaggagcatttcgagcacgccttgcatgagaaggtgccggtaatcgaggtttccggccgcaccttccccgtgcaggtggtctatgagccgcttggcaccgcgcccgcgttgatgcgcgaagtgccgggattcgcggtgggcgcccgccccggcgacgccgattacgacgagctggccagcgccatcgcggaatccgattccgaccggccccgcggccggtccgacgactcctatgccgatgacggcatcaccgatatgcccacggccgtggctcgagcctgcgccgaactggtgatccactcctcccacgagcgcggtccccgcgatattctggtcttcgcttccggcgagcgcgacatccacgagttcgaggccgcactgcggcatcattacggtccgcgcgccgacgacatgcgccgaccggacgccatcgagatcatgccgctgttcgcgcgattgtccgccgccgaccagcacaaggtgttcgaatcgcatttgcatcagcgcatcgtcatcgccaccaatgtggctgagacctcgctgaccgtgcccggtatccgctacgtggtggaccccggttccgcccgtatctcccggtattcgaagaccgcaaaggtccagcgtctgccgatcgagccgatcagccaggccagtgccgaccagaggtccggccgatgcggccgtgtggccgacggcatcgcgatccgcctgtattcgcgtgaggattacgagacccgaccgcgcttcaccgagccggaaatcctgcgtacctcgctgggtgccgtggtgcttcacatgctgtcggtgggcgtggcccgcacggccgaggacgtcacgaacttcgggttcatcgatccgccggatatgaaggccgtgtcggacggtttcaatgagctcaccgagctcaaggccatcggccgaaagcgcggcgaggtgacgctcacccataccggccgtcagctggcgcgcatccccatcgacgtgcgtctgggacgtatggttatcgaggccgcgaaaaccggttcgccgaatcttctggcccaggtgctcgtggtcgtggcgttcctgagcttgcaggacccacgtgaacgcccggacgacaagcgtgaggatgccgaccgtatccacaaccgatatgcggatgagacttccgatttcctgacggccctgaacatctgggatcgcgtgttccaagcggacggcgacccaagcaacaacgcgctgcgccgtatctgcaaaaccgagtatctcagctggctgaggatacgccagtggaaagatctcgtctcccagctacgccagatgtgcaaggagctgaagttcaaggtcggcgacccgttgcccgcctcccgcccaggcttggagattcgccagctgccgttgaatcagcaggccgcgcattcgctgtgctgctcgtgggatgcggatggcatccacaagtcgatgctcgccggattgctgtcgatgatgggcatgcaggtggtgcgtgagcccaaggcctccgatttcgcggggctgaccggtgcggcgcgcgcccgtgcgatgaaacgcgcccagaagcagtcgaagaacgattatcagggcgcgcgcggcacccgtttcgccctgttccccgcctccgccgtggccaagaagaccccgtcatgggtgatgagcaccgaactggtggagacctctcgcctgtgggcccgctattcggcggccatcgacccggcgtgggccgaaccgttggccggccaattgacccgcaccacgtatgcggagccgcactggtcgggttcgcgtggctcggctgtggccaccgcgcgcgtgctgctgtatggtctgccgatcgtacaggaccgtgccgtgcagtggggacgcatcaatccgcttgaggcgcgcgacttcctgattcgccagggtctggtcgagggcgatattcagcagcgcttcagttacgacgactttgtgggcaaaaaccgtgacattctcgaggatgccgccgatgacgcgagccgcacccgccagctggcggacaccgtgtccgacgaggatctgttcgacttctacaacgcggtcattcccaacgatgtgaccagcgtggccgatctggcgaaatggtggaagtccgagcatgaccgtcagccgaatctgcttgatttcgacccagccaaggtggagcgtctggcatccagcgattcggtgagtctggacgattaccccgaccattggcatacgaccggatcggacggccaacccatcgacctgcgtttgagctacgtatacgatccggccgacccggccgacggcgtcaccgtgcatgtgccgttgaaggcgctctcgcgtatcacgcccgaccagttcacatggaatgtgccgggcctgttggatgagctgattctgtcgatgatcaaggcgctgcccaagcagctgcgcgtccagttcgtgccggccccggatgccgcgcgtgcgattcgtgactggatcgacgagcattacccggatctgccgggctcgggctcgcagcagaagccgaatctgccgccggtggatgaggatggcacgaccgttggctggcctgatttggcacatgtgttcaccaaggcggccatcgccaccaagggtgcgcagattcatcccgaagtgttggggccggaactggtcgagcgtctttccccgtatctcagggtcacgttctcggtggagcagcaactgccggccggcaagcaccctcgtggacgccggcatgcgcgcggccccgtcaaggtgctgggtgtgtccaaggatctgaaggcgctgcaacgcaagttcgccgcgcaggcggaggcgtcggcccgtcagatggtcaagaagcaggccgatcaggctggagaacagggcaagctggtcagtcaggcgaacctgttgcataaggcgggtgccaccaccgagtcccgggccacgatgctctggcgtggcgcattggatgcgctgcggttgccggccgaacgcatttcgtcgcgctggctgggtaccgaggcgttgatgctggcttctgctccgtacaagtccaccaaggatctggtcgaagacctgcagctggccacagtcaaacggctgatgccgaatgtcgacaggctctcggacgatgaggcgttggccaatgcggtgctcgatgtgcgcgaagtgtacgaggacaccgtctatcaggtggcgcatgacgtgatcgccgtgctcaaggcttatgccgaagtcgacaaggccactggcggcaaggccgacttgccgatgctgtcggtgctgcagtcggtgcgcgagcacatcgccacgctggtctaccccggattcatcgggcgtactcccccggatgcgctgaagtcgttgagccgatatttgagagccgatctgagccgactcaataaggcgaaaaccgataagaaccgtgacgtcaagtgggcctggcaggccgacgaggcccgcacgctggtcgacaaggcgatggccaaggccaaggcggagccggccggcccccgccacgagacgctgatgaagcaggcgaccgccgcccgctggatgctcgaggaattctacgtgtccctgtgggcgcaggaactcggcaccgccaagccggtgagcctgcagcgcatcaagaaggcactggcgtagcgatggcgacgacgcaacggcgcaagccggccaatccgcgcggcagggcgaacgtgattgtcgcggggcggggcgtgtcaggcggcaatcgcaaacgtcgcccgggcaaacgcccgcgcaatcgcaggtatccgctcagcccggcgcgctggtggaagcgggccgggttggcgcagcgcgtcgcggctgtgctggtcaccgtggtggcggccgcatgcgtggtcgcgctggtcgtgggcactgtgcgggtcgtccagtggcgtcgcgacgtgcaggaggccgaggcccgccagctgcagctgacgcagcaatacgacttcaatcccggcgacatcatctcggacggccagttcttcaacgccaatgcgatgagcgaggccgaggtccaggcgttcctcgacaagcagggcgcggcgtgcagcggttcccggtgcctgaaaaccatgaccttcgacaccgaggaccaggcggcgaacgagtattgcgcggcgtacgagggcgcgagaaaggagaccgcggccgcgatcatcgacaagtcggcgcgcgcgtgcggcatcagccagaaggtgctgctcaccgtgctgcagaaggagcagcacctggtcacggccgtcgatccgacggacttccagtacaaggccgccatggggctgagctgcccggacaacgcgaactgcgatccggcctatgccggcttcttcagacaggtgtacggggcggcgcaccgctaccaatactatgtggcgcatgaaagcgcctacggctatcacgccaacgcgctgaactacatccagtaccacccggatgccgggtgcggcggcaccaacgtgtacatcgagaacaaggcaaccgcgctgctctacatctacacgccctaccagccgaacgacgcctcgctggcggccgggttcggcgagggcgactcatgctccagctacggcaaccgcaacttcgccctcatatacaccaactggttcggtgccgcgcgccgataggggcgggaacggcaaaaaccgaaaccacggtaaggctaggtgtcatccgcgccgtcgccgccccgccgcacggccggagaaccggccggatgacgagcggcacggctcacaggtcgatcttcggggaggcgtcgagcagggtacgcgtgtactcggccttgggatggttgagcacgcggccggtctctccgctctccacgacgcgcccgtggcgcagcaccgtgatcacatcggacatctcctgcacgatgcccaggtcatgggtgatgaacaggcatgcgaaaccgtgctcgcgctgcagccggcgcagcaggtcgagcaccttgcgctgcacggtcacgtccagcgacgacgtcggctcgtcggcgatgagcagcgacgggttgagcgccaaggcgcgcgcgatgccgacgcgctggcgctggccgcccgacagctggtgcgggaaccggccggccacatcggcgggcagctccacctgatcaagcaattcaaggacgcgcttgcgccggtccgtctcgctgagcccgccctgcacgagcatcggctcgccgatgctccatgccacggacttgcgcgggttgagcgccgatccgctgtcctggaacacatagcccatatgcttcaggatctcgcgcttgcgcctgccatgcgccttggcgagatcctccccctcgatgagcaccgtgcccgaggttggcgcgagctggccggagatcaccttggcgatcgtggtcttgccggctcccgattcgcccaccagcgcgcgggtcctgccggccaccagatcgaacgagatgtccttgacggcgaagctgccggccttgtacgacacggccacgtcgttcacctgcgtgatgcgcctgccgccgccgggcgcgtcactttccgtgatgcgttcgccgccggccgcatgttcgccgtctaccgcatgctcgtcgatgcgcaggcgcggcacggcgtcgagcagcatccgcgtgtagtcgtcggacgggtggcggaagacctgcgcgacgctcccctgctcgacgatcacgccgttgtgcatcacgtacacgtcctgcgcggcctgccacaccacgcccatgtcgtgggtgatgagcagcacggccagatcgaggtcgaccgccagcgaggagatcagggcgagaatcgccttctgcgtggtcacgtcgagcgcggtggtcggctcgtcggcgatgagtaccttgggtcggttgatgatcgccatggcgatcatcacgcgctgcagctggccgcccgacagctcatgcgggtacgacgaccacacgcgttcggcgtcgtcgagcccgacctcgcgcagctgttcgagcaccttggccttgcgctcggcggcgctgagctgcttctggtggtatttgagcgattccgcgacctgtacgccgagcgtgaacaccggattgaacgcggtggacggttcctggaacaccgtgccgatgtattcgccgcggatgcgttgcagcggcgcgtcggcggccagcagatcgatgccgcgaccggcggcgtccttgccgtcgccgcccggaccggagtccggcccgtcatccacaagggcgtcgtcgaggtacgcgtggcccttcacgctggccaccgacggatcgagacggggcagcgccatcgccgtcaccgacttgccggagccggattcgccgaccagagcggtgatgcgccccgggaacagcctgaggctgacgccgtgggtcacctcccgctcgtcgaagctgacggccagaccgtccacggtcacgatcgcgcgtggttcactcattggaagctccttggatgcacaagcgttggaatgcgtccggcgcgcgcgccagcggaccatgccgccggcgcgcgccggatgcggatgccggctcagttcgcgctggcgagcgagacctgcgtgtagtccgggtacgccgggaagttgccgatgacgaagttggtcacgttcgatccgtggatgaacgtgttcttcgaatagatcagcggcacgaccggcgcgtcggccatgatcgtcttgtcggcctcggcccagatcttgccggcctcggtctgatcgatggtctcggtggccttcttgatcagctcgtcgaccttcgggttcgcgtaacgggccaggttgtagttgccgtggccgatctgcgaggagtcgaacagcggggagatgttggcgtagggcgacgggaagtcgggctgccacgagctgatggccagatcgtagtcgcccttgtcgttggtcagcgtatcggaatacacatcgtcgttgagtgtctggatgtccaccttgacgccggcccgcttgaggctcgtctggatcgaggaggcggtttcggcctgagcggaggtggcgatgagcttgagggtcggggcctgctcgcccgactccttgatcagctgcttggccttgtccacgtcgccggtcggatcggccttgtacaggtcgtagtcctcgcggccctcgatgccgggcgtaatgagcgtggtggcgaagttgccggcgatctcgccgccggaagccgtctggtaggccttcttgtcgaccgcgtactgcagcgcttggcgaatcttcgcgttcttcacgtgttgggtgttgatggcgaggtattccagcgcgccgtcgccgctggtggtcagcagcttcttgtagttcgggttggcctgcgcctgcgcgagctgcgcggccggcacgaatccggacaggaacgagttcttgccttcaccggtgccctgcatgatcgactgggcggccacagaggtgtcctgtcccatcttgaacacgatcttgtcggggcccgcggtgcgcaccggatcggtcttcttgtcccagtaggtgttgcgcacgaagacggcctgcttgccggcctcgttcgactcgaccttgtacgggccggaggccaccggcagcttgccgtagccggacgccgggcccttgccgtcgggcacgggggtgaacgcggcgagcgagacgacccacggccagtcgccgaacggcgcgttgaggtggaagatgatggtcttgtcgttcggcgtctcgatggagctgagctcctggccgtcgaacgggccgtggtagtcctgcgcgccctcgagcagcgtcttgtggtagctcaggccgccggtcagcgagtcggcgaaggaacgctccagcccgtacttgacgtccttggaggtgatgggcgtgccgtcggagaacttgagcccgttcttgagcgtgtacgtccacgtcttgccgtcgtcgctcgacttgccggtgtcggtggccagatcgggcacgaccttcgtctcgcccttgtcggtgatcttccacgcggtcaggcggcggaagatgttgccgttcgtggtggtcggcagaccctggctcttggccgggtccagatccatctccgtgctggacagcagcacgttcagcgtgccgcccttgacggtggtgccgctcgccgagccggtggcggcgttgtcgttggacgcgccgcagccggacagcgccagtaccgcggcacaagcccccgccgcgaatacgcgccatgcgttgttcttcatgatggttttcctctctatcggtgccggtccgtggagcagaccggcaagtatcgcgtgttgcggccgcagccgcactacttcgtgccgagcgcgaccctggggtcgagcaggctgtagcagatgtccacgatcaggttggcgacgatgaccagcacggcggcgaacatcgtcgcgccgaccagcacctgcaggtcgaggttcgacacggaatcgagcagcagcgagccgagcccctgcatcgagaacaccttctcggtgagcaccgcgccgccgagcagcccgcccagatcgaggccgaacatggtcatcacgggcagcagcgcgttgcgcagcgcgtgcttgaagatgatcaccgattcgggcacgcccttggagcgggcggtgcggatgtagtcctggctcagctcgccaatcatctgcgtgcgggtgaccctggtgtagccggcggcgctgagcacggccagcaccagccacggcagcagcagatgcgtgaaccagccgacagggtcgtcgtggaagttcacgtacccgccgctggggaatatctgcagcaccagcgaaaaggcgatcaccgtcagcaggccgatcaggtatgacggtgccgaaacgcccacgatcgacagcccgagcagcgtgcggtcgatcagcgtatcgcgcttgagggccgcccacacgccggtcgccacgccgatgaccagccacagcacggccgcgccgaccgcgatcgacgcggtgatcgggaagcggtcgaggatcagctggctcaccgattcgttgagacggaacgaatacccgaggcatggtgccgagcagaccacggcgccgccgccgctgccgaaggtgcgcccgacgaagatgcccgccacgtaattgcccatctgctcgtaccacggcttatcggtgcccatgaaggcggagacccgctgcagctgctcgggcgtgcacggcttgccgcacgacagctgcgccggattggtcggcagcaggaagaaaatcaggaacagcgccagcgtgatgagcaggatgacgacgatcgagctcgccacgcgcttgccgatgtattgcaggattctcatgcacgcacccccttgcgcgggtcgatggcgtcgctcaggccatcgccaagcaggttgaagccgaaggtcagcaggaacagggcggcgcccgggaagatcagatacatcgggtcgaccagggcccactgcacggcgtcggagatggaccggccccatgagggcgtcggcgggttcatgccgacgccgaggaacgacaggcccgcctcggcgccgatgcgcccgggaatcgacagcgtgatgttgacgatgagcagcggcatgaggttcggcaggatctgatgccacagcacatgggcaggcgaggcgcccatcaccttggacgcgacggcgaaattgcgcttgctcagcgtcagcgtctgcccccggacaagacgcgcgatgccgggccatccgaagaatccgagcactagcgtcagcagcaccggcctcgggaagccctgcggcaccaccgccgacagcgcgatcgcgaagatcaggaacgggaagccgaagaagacgtccatcgtgcgcgagatcagcgcatcgaccaacccggggaaatagccggccagcagcccgagcgccacgccgatgaccagcgagatgaccgacgagacgacgccgatgcccagcgagatccgtgagccgtacgccacgatggagaacaggtcgacgccgcgcagcggggtgacgccgaaccagtgccgggcactgatgccgccgccgaatccggccggcaccgacccggcacccaaggcctcgggatgctcggcgtacgggtcgttgccggtgatggccgacaacggcccggccagcggcgccagcagcacgaagaacagcacgatggcgccgccgaccactatcgatgagcgagcgccggaacggagaacgcgccgccgtctttccgccttcggcgcggctttcgccgtcgcatccgtcatattgtcatccccattttcacgctgaacatgccgataatcatcaatccgcgcaggtgggcgcccgtgagccgggtccccctgcagccggtgtcctaacattaaggtttcgcagcaggatgacatgctgtggccttatcggttatttggatagcaggttatcaatggacggcaatcggcggataaggcatgccgcggggacatgcgggaaaaacccttcgttcccgcgcgtcacgccacccgtcattccccgaccgggctgacgtacggacgcagcagggtcgtggtgccgaccgcgagcagcgcaaaaatcgcgccgaccgggccgagccaggtcaggccaaggaggtcgttgaccaggccgccgaccgcggagccgatggcgatgccgatgttgaacgacatggaattcagggaggcggccagattcaccgaaccgggatgggattggtaggccacatccatatacagcacctgggaagcggaattctgcagatacatgagcatgccaagcgccaccagcagcagtgcgccgccggccggcaccagcgaggcgaaagccagcaggcacaggcagacggcctgcacgcagtagatcggtcgaatgtgggtcagcggctcgacccccctgccccgatcggccagcttgcctccgtacaggttgctccacaggcaggcacagccgtagaccaccaagccgacgctgatatagcgttcgggcacaccgatttcgtcgcgcatgatcggcgagagatacgtgtagaagacgtaggaggcggctgcgccaaagaccacatccgccacgccgagctggatgcggcggtcgaagaacagacggaattgcctcaggaaaccgatcttcgccggatgtgagttgcgtggcagagacactgccatcgatgccatcagcacggcggtgagcaccgaaaccaaggcaaaggtgacacgccagccgaaagtattggccacccaagtgccggccggtacgccgaccacagaggcgatggagaaacccgagaatacccaggcaatgaacttggtgcggtatttgtcggtggtcacgtcgggcgcgaaggtcatggagatggccaccagcgtgccggacaccgaggcgatgagcagtcgggcgatgagcagcaccggatagttcggcgcgaaggcgcacaggatattgccgacgaggaacacgcccatcaacgtcagataggtgagaaagcgcgggaatcgggcggataatgcggatccgagcggcgtgcagggcgcgtacacgaatgcgaagatggccaccagattacccacggtcacttcggagaccttaagtccggatgcgatgtccggcaggatgcccactaccacgaattcgctcatgcccagcatgaagctggcgaagatcaggatggtgaccggcagattgaagaagcggtcggtgcgcgcggtgttcgcaggtgtgttcgtcatgggtgctctcttgagtgctctcgctcgtactacaagctgattcgtcggttacgtcaatcgtttttcgtatcaactcagcgacaacactattcccacctctgcccgctacccaccaccacgacacgctatagaaaccccgccgatgaccaatcatcgacggggttcggcacatgtgcaacgcttgcgattacagcttcggcagatacttcttcagctcgtaaggcgtgacctgctggttgtactcctcccattcctggtgcttgttgtccaggaagtagccgaaggcgtgttcgccgagcacgtcggccacgaagtcggatttctccatgatcttcagcgcctcgtccagcgagcgcggcagcggctgaatgcccatagcctgacgttcgccgtcggtgagctcccacacgtcatcactggtgggttcgcccagctgcatctgcttatcgatgccatcgagaccggcggccagcagcaccgagtaggcaaggtatgggttggccaccgggtcgagcgcacggaactccatgcgcgcggagttgcctttgcccggcttgtactgcgggatgcgcagcagcgcggaacggttgttgtggccccagcagatgtagcttggtgcctcattgccgccccacaggcgcttgtacgagttgacgtactggtcggtgaccgcgcagatttcggccgcatggtacaggatgccggcggcgaactggcgggcggtcagggacatgttgaactcctgaccggcctcgtagaaggcgttggaatcgccttcgaacaggctcaggtgcgtgtgcatgccggaaccaggcgcgtcggccaggggcttgggcatgaagctggcgtgaatgccacgctccaaggaaatctccttgaccaccgtacggaatgtcatgatgttgtcggccatggtgagcgcgtccgcgtatcgcagatcgatctcgttctggcctggccccgcctcatggtgcgagtattccaccgagatgcccatttgctcgagcatgttcacggtggcgcggcggaagtccatgcctgggctgcgcggcacatggtcgaagtagccgccctcgtcgatcggggtcggggccttggaccagtcgtcctggctttcgaacaggtagaactcgatttccggatgcacgtagaacgtgaagcccttgtccttggccttggcgagcgtacgcttcaacacgtgacgtggatcgccgagcgaaggctcgccgtctggggtcagaatgtcgcagaacatgcgggcggtaccttgcgggccaccgcgccacggcaggatctggaacgtcgcgggatcgggttgaacgatcatgtcgtcttcggacacgcgggtcatgccctcgatggcggaaccgtcgaagccgagaccctcctcaaacgcggcttccagttcggccggagcaatcgccacggacttcagtgttcccaacacgtccgtgaaccacagacgaataaagcgcacgtcgcgttcttcgaccgtgcgcagcgcaaactcctgctgtttatccatagtcgcctatcgttccataaccgtgttacgaggggcgttaacatctcactgtttgtcacctgcgagtcgcgagatttcatcaacatgccccggtccgcatgtcaggcatggttcgggcccatgccggcacggcactatggtagtgactataagcgaagatcatctcaccccatccgccaatccgcccgagctggtgccgatatcagctggatgattacgccgacttggatgcgttgcaggcacgtatagacacgctgttcgagagctaccggcattccctgtacgacgatcgccgttgggtgttcgatcatttgcgctatcaggacgcggcccgcaaggtggtgggcgtgggctcggtgggccagcgcgcgtggacgtcggtgtggatcgcgcgtgatatcgacgatccgatgatgattcagatgaaggaggccacgtattccgtgctcgagcattactgcggcgcgtcgccgtacgccacgcacggtgagcgcgtggttcaggggcagaagctgattcagaatacggccgatgtgctgttgggttggtcgagctttatggccgaggatggccgaccgcgcgactattacgtgcgccagttgtggaatggcaagggttcgattgatatcgacaatctcaacgcttcgggattgagcgatctgtcgcgcatgtgcgcatggtcgttggcgcatgcccacgcccgcaccggcgattcgatcgcgatcgccaattacatgggtggcaccgacgaattcgatcaggccattgcctcgttcgccgtcagctacgccgaacagaatgatgaagactacaccgtcttcaaaaagctcctcaaatccggcgaccttccttgctgagccgttaagcggacagcccagtgggctgtccgtaggcgaggcctgagtgaagcgatagctgagcaaaggtagcttaacagtctcgctaaggcgagtcctttgcctacttcgcgactgcgagcgcttcctggagcgtgaacgcacgtgcgtataacgacttgccgaggatggcggaatcgacgccgatctcggccagttccttgatggcgcgcaaatcgtccagcttggagataccaccggaggccgtgaccttggcgtcggtgcgttcggcgacttcacgcagcagttggatgttcggaccggacatcatgccgtccttggccacgtcggtgaccacgtaacgcgagcagcccacggagtcaaggaacttcatggtctcaaacaggtcgccgccttcgcgcgtccagccgcgcgccgccagtgtgtgaccgcgcacatccagaccaacagccacacggtcgccgtacttcttgatgaccgaagcggtccaatccgggttctccaaagcggcggtgccgatgttcactcgggcggcaccggcctcaagggccgcgtccaacgaagcgtcatcgcgcacgccgccggacagttcgatgttcacccggtcgccaagctcatgaacgatctcacgcagctgatcgcgattgttgcccgtaccgaaagcggcatcaaggtcgaccaggtgaatccattcggcaccggcctcaacccaggtacgggcggcctcaaacggcgaaccgtaatcggtttcggaaccggattcgccttggcgcaggcgcacggccttgccatcgcgtacatcgacggcgggcagcagagtcaacgacataagaagagcctttcttcagttacttatacataatttgagctctctcgtcagaggggagcttcatgctttttacagcgtggcgatccagttcttgaggagctgggagccagcgtccccggacttttccgggtggaattgcgtggcggacagcgggccgtgttcgtaggcggccacgaaacgcgaccggccgtacgagcaccagctcacgcgttcgggcgcaccgctcagatcaatgtcgaagcgggacgtatccgccggcttcacttccatcgcggcgtaggagtgcacgaagtaaaaccgttcattctccacgccgttgagcagcaccgaatcgggggcggcctcgatcgtgtcccatcccatgtgaggcaccacgtcggcgtccagcaggttcaccgttccgccgatcagcccgatgcccgcggcatgggctccgtgctccagaccgtgttcgaacatgatctgctcgcccacgcacacgccaagcaccgggcggccggcgcggatgcgatcatagatcacacggtcgccgtcgaccttcttcagtccttccatgcatgcggcgaacgcgcccacgcccggcacgaccagaccgtcggcctccaacgactgccggtagtcggaggtgagggtggtgtcgacgccaagattggcgagcgcacgcaccatggaacgtacattgccgaaaccgtaatcgaaaacaaccgctgtggtcatattctctcctatcccctactggttggttggcgtctattcgatgcgggagccgcgtccgccacgcccacgcttggtatggttggcgagaatctgcatcgcctggtcatggtcgagtccagcggaatccaccacttcgaacccttgggtcttgagttggttcagggttacgatgccgagcatcaggtcctcgacgaagcgcggtgtggaggtgaacagcacgggcggcgcgaaactctgtccggcctctccctgcacgtacatggccacttcgagcttgtcggcacgattgactgcaagaatcacggccatgccggataccacggtggtcaggtccttggctgcggcttccgggccgtcgccgtccagattcttcagcaccgcgacggccccctgattggcaccgacgcatgcggcggagatgtccgacagctggcagaacgcggccaacagttcagcggaggcaagacgggtgacgatcagcgccaccttcgccttgttacccaacagtccagcgagttcgttgtcgaagccgagcgaggggtcgaccacgtcggccatggcctcattcaccgcatcagcgaccgacccggtgacgtcgtcggtcataggctggccggaatcagcggaagccttatcagccgtatcatcattcgcgtcggaatcggacttcgctgaagcagcgtccgccgttttatcggcatcactggtatcactggcatcgccggatgccgaatcgtccgcgaattctttctcgaatccggcgagcgcggcctcaagctcctcgtcggagaagtgcgattcgtccggatcgaacttgtcgtcggccatcacagggctcccttggtgctgggcacgccgtctacacgcgggtcgatttccacggcgaagcgcagcgcacgggccagcgccttgaattcggcttcggcgatgtgatgcggatcacggccggcgagcacctgcatgtgcaggcagatgccggcgtggaaggcgatggattccatgacgtggcggaccagagagccggtgaagtggccgccgatcatgcagaattcgtagccttcgggctcgccgctgcacacgcagtacgggcggccggaaatgtcgaccacggccttggccagcgcctcgtcgagcggcacggtggcgtcggcgaagcggcggatgcctttcttgtcgccgagggcccgcttcagagcttcgccgaacacgatggccgtatcttccacggtgtggtgcacgtcgatgtcggtgtcgccgtgggcgtggatggtcaggtcgatcagcgaatgcttgccgagcgcggtcatcatatggttgtagaacggcacggatgtatcgatatcggttttgccggtgccgtcgaggttcagttcgaggtcgatgtgtgattcgctggtttcgcggacgatgtgcgcggttcttgccatcatgtctcctgtgtgattcgtcatattggattgcggcgggactcgaatcgcttcgggtctcgccgcaatcggaaagaaacgtcccttatgctgcttccactatacgaagcgcttcaacaagggcgttacggaaggtttccatctcctcgtcggtacccatgcacacgcgcagccaaccgtccggtccgaccacgcggatgagtacgccgcgcttcaggagctcgtcgaagatggcttcgcgcttgtcgaagtgcccgccgaacagcaggaagttcgagccggattcggccacttcaagcggctggtccttgtaggtctgttccttgagccatgcggcggtggcctcgcgggtttcgcgcagatgctcgacacggctcagctgttcatcggtgtgttcgaaggcggccagtgcggcggcctgggtcacggcggacaggtggtacggcatacgtacgatgcgcacgcagtcgatgatgcccttggatgcggctaggtagccgactcgcgcgccggcgaaggcaaaggccttgctcatggtgcggcttacggccaggttcgggtggtccttgatcaggctcacggcgctcggggtgccgggcttgcggaattccacgtacgcttcatcgatgacgagaatcgggtgcacgccctcacccgcgccggccacttcggcggtttcgcaggcggcgagaatacactcgatatcctccatcggcaacggggtgccagtcgggttgttcggactggtgagcagcaccatcgagggcttgacctcggcgatggcctcaagcaccttgtcgacgttcaacgtgaagtcggcgttgcggtgggcgagcttccaaccggtgaaggtgtcgcgagcgtactccgggtacatggagtacgtcgggtcggcaccgagtgcggtgcggcccgggccgccgaaagcctggaacagctggagcatgatctcgttggagccgttcgcgccccacagctcgtccacgtccagacgggtaccggattcacgggccaggtaatcggagaatgcctgacgcaattcaatgtgctcacggtccgggtatcggttgagtgtgggggcgatttcacgcacacgcttggcgatggtgtcgcatacggccgggtccggcgcatacgggttctcgttgacgttcaggcacaccggcacgtccagctggggagcgccgtacggctcctcaccgatcaggtcgttgcgcagcggcaggttttcgggaatcgagctcatcgcagaccggctccc

SEQ ID NO: 690 - DNA, 6109 bp, Unknown
  R14_15m  MAG No. k141_24625
tcaacaatcatcgaatcaacccgtctcacgccttatcggcgccggcatggccgagcacgtgcttcagcgggttcggcacttcggcgtccggccggcgcaggtacaacggttcgaccggcgtatcgggattacggttggcaaccagttccgcatcagtggcaaagatagcgagaccttgctccccttggtccaatacggattcatcggtgatgtcgccaagctgctcgattgcacccagcgcatccgcatatttgcgggccccatgacccacaacatccacgaccacatccacattgctgtcttctggcataagtccgtcgcggtacgtatgaacggcatcattcacgcgctgcgcgatggatgcagggtaatcgatatccatgtcaatcagagccgtcgccacggtttcgccatcgggatcgccaacgggcgggtccgagtacaacgcaaaatagagttgcttgcggcgtgcgtcgtttacggcaagagtgagcacatggcatttatgagtatcgccgagagtgccggctttgccacggcgaatgagattccattgcacctgagactcaagaacattatggccgataagcgtcgctcccgttgcgaaagccagtgccttggccgtaacgataccggcacgcagaccagtaaagggggctggaccggtacccacaatgactgtcgcaatgtcagatgctgggaacccggcttcttcgaccgcgcgcgcgatattgacctgcagtttctccacatgggtgcgcgaatcggtctctacaatgggctcgcgccccacaatgccgaccgtcgagccgaatgaggtgtcaatcaccaacgtgcaacccatgaatcctcctagtcgtaaagcctctagagagtgtacatcgaggagtctataggcgcatggcttactgcagatcgaacgcggcccatcgcttgccgactgggacgaatgcgacggtacgagtgccgttgctggtgagttcgccgtctgatccagcggatgcggcatcggaggaatcgagaggtcgatcgatatggatttcaagtcgttctggcgccaaggcggtggccatttgttcgccccactccataagcaccaccgtgttctcgccggggtcttcaagttcttcgtccaatcccagcgattccagctcgtccaacaaacgcccgatggcgtcctgccccggcgcataggctgagccgcccagacggtaggcatccacatgcaccagatgagacggagtgccgtcggcgaaatgcccgtcaagttcgcgggcaatggtgaatgtaggagacacgatgggttcggtaatgcccagccccgccccgaagccctgagcgaatgtggttttaccggcaccaagagggcctgagagcagcaatacatcgccgccgtgtaccattccggccacacgacggccgagctcctgcatggcctcgctggtgggagccgcaatagtgtgttcgctcataaatacccctttatcgacttttaccgacctttatgactgatgtcttcaatgcagcgttccagcgcatataccgggtcgccaccgtttgttttgctttgctcatccgcccaggcgagcatacggatgcaatgcgcgagtcctgccgaagtccagccgccaagttggcgcatcgcattcttcagcacccacggattggttttcgcttcggcctgggaaatcgtgccggcccgtaccgccgaggctttggcaatggtacggagcttcatggccaacgcgccgatcagcgcgatgggatcggtcccttgttccacagctgcacgcatcatgacgatggcttctgcggttttgccttccacggccttgtctgccacggcaaaaccggtgacctgcggattggcggtcaaatactggttgacacggtcgaggcccatcggattatcgtcaaagtcgaaacacagttgctcgcacatggcggcgagttcgccggttttgccgccgagcacggataccagctgctgtgcggccatcggttcgactctacgaccacgtttctcgaattctccgagcacgaaattgagctgtgcatccggtttcttcaaatccggcacgtcctctttgcgagcgccggctttcaccagttggtcgatgattttgcgccctttgacgccgccctcgtgctggcagatcaccacgctggagccgttcggatccttggcggcctgcttggtgtacgccaccagagcttcggcgagcttgtcgtcggcattctgcaggttgacgagtttgaccacggcaacgtcggaaagcaacgatgggctgacggcttcatcgaaggcatactggtcggccgatgtggcgtcgagttcgatgaggtcggcgtcgggccgcgccttcaacgcctgcgcgcacagtgccttggtgcgtgcgtcgttcaaatacgagtcgcctccgggcaccacggttaccggtgcattcgctgctgttttcgtcatgcccccatctcgccacacaggttggacaatgacctgccggcatcacgattttgccggtgccgtcgagatagtggtattcggctgggattgcgatggttgctgcaccgaataccgcattggctattcggcttgccgccgcgtaaagaggcgtctcgtctcctcacaccagagactgaggcggacgcgccaagcggaaccgaagcgcacgccagacattccggcctcataacgacggacatgctggaggcaacggctgacgaacaccagtagcatgccgataccgatttccgccgtcacaatcagcacggcgcccgtaacgccgtctttccatgggatgacggccatcgtgctgccgcccagccacaacgccacccgttccatcaccagcgtgccccatgacgatatccacgcgaatacgccggccagccatggcgtgcaccatgcgcacgtcagtgccatcaatcccgccatcgtggccaatcccacgaacggtgacaccagcaggttcgccggcacggacagcaacggcaattccggttccatcaacacctgaatcggcagggtgaacaattgcgcggccacggtcatcgccatcatttcggcgatgctgtgcggcatcgctcgctcaaagacaccggccagccgccccgcaaacagcacgatacccagtacggcggccgaagacaaggcgaatccgtagctggccgacatatccgggttcaccgccaatacaccgattatcgtccagcacagggcgctcaacgcttgcgtacgccgtcccatcgcatacgccaacgcacctatcaatcccatgatgaacgcgcgggtgaccgaatcactggggaacatcgccaatgccagcagcgcatatactccagagaccagcaacgccgtcagccgccgatcaagcagcatccacatgcataaccgacgcaccagtcctgccaccagtacgaagtggccgccggatacggccatgaggtgcatgatgccggaccggcggaactgattttccaacgtttgcgcatacgtgctgttgaccggcatcggaccggcatcgccgccgatataatcctggccaagcacacccatcgtcaatcccggcaccaacacacgcccctgatcggacaattgtccggtcacggtgaaaaacgcctcctgcacctgcgcaatcgcggcgagatgccacggcggagcccgcacctgcgctaccggctgttttccttccaagagcagccatagcggtatgcgtccatatcgcgcttgctgcaatacgcccgtcaacagatagaccgcgcctcgacgcaactgcccacaatacgattcatcggcgtatacgcgcacggcgaccgtggaacgtacgtccgtgccatccacagtgatgccgttcagccgtatgtccgtctgacaatcgtatgtgcgttggtccgaagcgatcacgggcgtcgtcaccgtggccatgacttcgtggtatgaactggattggcgagcttgtgcggaggcaggatcatgccaggcaatggtgtccgacgcgattgccgccatactgccgatgcacgccaccgcaacgcatacggtcaatgttcccgtccacctgatccgcaggcggaaagacaccacgatcatcgccgccacggcagcacatgacgccacggttataggcaatattcgtgtgacaggccattccatgccgattatggtggcgtcaatgccagctccggcatcggcctttgcctgaccggtgccgagtccatcagacatcctccatgcgaataatgcgtgcgctcccagactcgccgcccacatcactatggcgatcggcagcatcctccaatcgcggctcccctgctcgcgcagtatccgatccctgctcatccgaccgtcacctgccctcgcatggtcgccaacgtcttggagccgatgcctttgacatccagcagctgatcgactgatgcatacccgccaatcgccgtgcgatgatcgatgatccgttgagcggtaaccggcccaatacctttgatggattgcaattcctcaacggtggccgtgttgaggttgatgagaccatgcgtggaagcgccggcatcgctgccgtccgtctgcatgtgcggagattgcgtggtatccgattcggggttcgctgtggcatcggaatgctccgactgctgcggatccgtgcgtttctcgtccgtggtgttctgcgatggcatcgtctgatctccagcggagccgcccgtggtctgcatggcggtcggttgagacagcatggccatattcatcgactgctggaccagcaatgccaagctgatgccaagggcgacgatcagcagcaatatcacggccaaggcatgcccaatggtgaacgacaatcgcggctgatcccgggtgagtctggctgattcgccgacggcatcggcggaacgtacaccaatcagatccgataacgcacgtttgtcacgggtcgcctgccgcaggccgctctgctccctttggggcgggtggccggccggacgaatccgtgcatggccgggaggcggcggaggcgtcgtgggccgttccgctcgcggttggggcatggcttcgctctgcctgctgaatgcgcgcaaacggttggcggcatggcctgcgcgatggttatgagaaacgcccatgcatccacgctgatggattcatgggcgtttgtccagctgaaacgggatatgtggttctagcttatgaagttatccacaattgaggtggggcggttgacgctcccctcagtctcgctacgcgagcggctcccctcaaagaggggagcctaacccgcaacaagtcactccgcggggacgatggagacgatcttgggggccttgacgatcaccttgcgcggctccttgccgccaagacggtcggcgacggcggccagcgcctgccgttcgaggtcggccgggtcgatgtcgaccggcacttcgagcttggcgcgcaccttacccttgatctgcaccacggcggtcacggtgtcgtggcccacgtaacgctcgtcggccaccggccacggctcggcggacagggactcggggtggcccagcttgctccacatctcctcgcagatgtgcggggcgatcggcgcgagcatcaggatcagcggctccacggcggcacgcggcacggccttcagaccggtcaggtggttgttgagcacgatgagcttggcgatggcggtgttcggacgcatgccttccatttccgcggtcacttcggcgatcgtgttgttgagcagtttcagggtcttctcatcgggcgcgtcctcggtcacgtgggcttcgccggtggtctcgtccaccacgttgcgccacagacgctgcaggaagcgcatgccgccgaccacgttgcgggtgttccacgggcgagactcgtccagcggccccatgctcatctcgtacaggcggaaggtgtcggcaccgtagttctcgtacatgtagtccggagtcacgatgttcttgagggacttgcccatcttgccgaattcgcggttggcgtgttcgccgttccaggtgaacgtcggctcgccggaggcgtcggccgggccttccacgacctcgtcggccggcacgtactggccgcggtcgtcggtataggcgtaagcctgaatcatgccctggttga

SEQ ID NO: 691 - DNA, 6194 bp, Unknown
  R14_15m  MAG No. k141_24632
cttggtctggatctggtacagggtgacgggcaggtctttgtaagaggagtacatgtccttgaccagaagggtgaacatctcctcgtgggtgggggccagcaggtaatcggcctcgtggcgatccttcaaacggaagatgttgtcgccgtactcctcccagcgatgggtggcctcgtagggttcgcgcggcagcagggccgggaagtgcacttcctgggcgccgatgccgttgatctcctcgcggatgatggcctcgatcttgttcagcacgcgcagaccgagcggcagccaggtccagataccgggtgcggccttgcggatatagccggcgcgctgcagcagcttggccgaatcgacatcggcatcagcggggtcctcgcgcagggtgcgcaggaacatggttgacatacgaagggtattggaagtcatgtgttccaagatattcgcgtgaaccgacaagcccgcctgctattcgcactattccggccttcatcttggcattcggactcattcgtacaacaatgatggctagaagggtaggagggcacgatgacgcagccgaccgagcaacaggggaatcagccggaacccgcggagcaaccggtgtatcaaccggcccagcatgggccccgcaattttctgctgcaaccccgcaattcccaacggcagttccgcgacaaccggtatcgcaacagccaatggccatgccaccatttgcgcaatcgcctatgtcggtcccggaacaagcggcctgtccggagcggccgcgctgattgtgggtgtgcgtttgctgcaagcaccgttgatctacggcacggtgattcttatcgtcagcacggtgactgtgctgtggccatggcgggccgaattctcccgccactaccggtgggtgtggcttgctttgggcggcatcattctgattgtggcagccgcgcgctatgaggcgagcctcaaatcaatgaggacgatcgccgcgcgtattggcgatctgcgctaaatcgcgcgggcgacctgaggcagattaccaacgtccggcgatagcagtcctgcatacggggcagtgcccattgccactgtatccggcagataaacggttggcaatgattcgataccaatcgcgttccacgagcttggccctgcattcagggtttgggcaatatgtggtatcgccttcacgatcatgcacgttgccggtgtacacataattgagtccctcttcgagggcgatgcctcgggcgcgggtcagagtctcgtgcggggtgggcgttacgtccatcatgcggtaactggagtggaatgcggaaaagtgcagcggcacgtccgggcccaagtgctcgcgtatccatgtacattcagcatgcagctgggcgtcgtcatcgttgagtccagggatgagtagcgtggtgagctccacccacacgtgttcgccttctggtgtgcgtgcctcgttgaccgcatagtcgatggtttcgagcacatcggccagatgcgtgccggtcactttccaataaaattcttcggtgaagcctttgagatcgatgttggcggcgtccatggcggcgtagaagtcgggccaggcttcggcgctcatgtatccggcagtcacggcgatgggatgaatgccgagcgctcggcaggcttcggccgtgtcgatggcatattcggcgaacacgatcggatcgttataggtgaacgccaccgaatcgatgccccggtcggccgcgacctgcgcgattttctccggactggcttccacgccgagccggtcgaaactgcgggctttggcaatatcccaattctggcagaatcggcaaccggaattgcagccagccgtgccaaaactcagcacgctggaaccggggtggaagtggttgagcggcttcttttccactgggtccacggcgaagccggagctgcggccgtaggtgtcggagacgatgagtccgtcgtggtttgagcggacgaagcaaaagccgcgttggccgggcttgaggacgcagcggcgcgggcatagttcgcagcgagcgcggttggtaccgtcgtggaattgcgtttgccagcgggctatggcggggttacgaacatctgtgactgacgccgtatgaccgcacgattcccggtgaccaccctctgattctcggtgaccaccctccgtcgcttcgcgccacctcccgccagcgggaggggacatggttgctgcgttagtgctcggcataggcggtcacctcgtagcgttgacagtcaatttcgccatcgttccagtcgtaggacgggcggataccggccttggcgagcaggtgagcgacgaaatcgcgcggattgggcagctcatcccacacttgtggcaggaatgtggcgctgcagccacgacggtcggcgagaatcagaccgtctttgccggggcgtaatacttcctcaagttcagtgcgcgaacgtaccgggcgttcgacgttgctgccgtcccgtttgacggcgtcggtctgaggtccggattgcagcgatgccagagtcgcggtcttcgagccggtatcgcgcgaatcggcgtcacaggagttcacggtaatcggctcgggctcgcccaagacggatacctccacgttgagcaacgggtattccgcggcggtgaccgggttgaaacgtgggtcacgggtggcggcgtccaccgcatgtgcagctatgtccttgccgagcgagcggtgggcggccagcgaaccgatgcacccgcgtagccggccaccctcggtcagggtaacgaaacaggcaccggactcgttcagccatgggtttgcggcaagaatggacgcggtcgaatcagcggcggtcggatgctcgatatgcaaccgttcccggatagcggcacgggcgagtttcagcagcacatcaccatgggctgttcccgattcgcctaagtcatctgcaccggctggagcatctgcttctggtttggattcccacgcggcaaacgagacatatcccactaccggctcgtcggcgtctcgcattgcggggcgaggttggccggcaagcgccaccacgccgtcgtcgccggaagtggaacagccgagctcgaagagcttcatgtccttgcggccttttagcacatccagaaggccgttgatcgggtatgcgccacaggcccggcgagggtgaatcggcagatgcaaagccgcaatgtccgcaatggtctggtcatccaacgcgcgggcgacttcgtgcggatgatagtgcgagagatccgaactaatcacgatgacggtttccgggccaccccacaaagcacgcaacacatcacccgcctcttgtggcgtggcatcgccggcgttcaacggcacaatagtgaggtctgggccgagcacggtttgcaggaacggaatctgcacttctaccgcatgttcttgtgcgtgggttgggccattgacgatcattgcgggagccgacgcgcccggacgggcatgtgtaccggagcgcaatggctcattgacagacaggcccagagccttacgctcggctgcaatgtctaccggcacagtgcccagcggcgtttcaaacgccgctgccgtggaacaggcgacgcctcgcacggccacacggtgagtcggtcccacgattaccgcgcgagtcacactcccccgccctcgttcgagcaaagcataggcaagcgcggccgccgtgccggaatacacataaccggcatgcggcacgattacagcctttggcactcccgctggaagcgtgggctccaactgttgcagaacctctcgactgtaatccaattgatgggtaatgagttgcttgagcgttgtgcggtcagcggggtagaacgaaccagccaccgctggcggacgtattgcgccagtgattttgccgctgccgtctgccgcgcttgctgcatctgacgcactagccacactaaccgtatcgatttgcacaccggcccggacggcctcgcgaacctcattgtttccacgaaatatctcggatagcaccataactaccacctcttattccatggtagccgttcagttcctcaatgaagacaagttcgcagtgtcttcttcggcttcaaggggccgattccgcctcttggagacatctacttgcatttcgaggggctggtcatccgctcaatcgcacatagaaacggcttcataccaacgtcattccgccgtttttaagcgttgtctacttggacatcagccccttgaaacggaagtagatgtcccgaaaactcaaaatccgcccctcgaagtgcagaaacactcaaattagcggtcgttcgatatatcgaccgtcagaataacgcgtcctgggcgaagtcatcatcgggattggcaccgaattcgtccggctcggcgggtttgaacgcgcttgcaccttcatcggccaactggtcggaagccgaggccgaggcttcgcgcaggtcgccgtcgagcaccacggcatcgggcgagacgaggaacatgcgttcgttgacgccagccaaatacagtccgcccagcgattcgacgcgggacaacgccacatatcccatgcccggcgcgaaggtgcgcttcagatccatgaccgcacggtcaagcgtcatgccttgcgacttgtggatggtgatgccccacgcgcaacgcaacggcacctgcgagacggaggcgagcacggtgtcgccgtccatcatttcccatgtggcctgtttcatggtgacgatgttgccgttttcgaattccacgatcggccagccgcccttgttctcctgcgcgaagccgcgcacggtgccgagcgagccgttgacgtactggcgatcggtgtcgttgcgcagggccatgacagccgcgccttccttgagtaccagtcgctcgggggccaacatgttcttcttgagtcggtcgaccaggttggcagggcctgctgtctcggcgtggaactcgtgcggctcaagcatgatctggttcaggcgcatgtcgttgagattgtcggcctgccggttcaccgggaataggtggacggcgacctggccgggctcgggcagtttgcccagacgggtgacgagcacgtcacggtcggactgggtcacgtcgccttcgcgaatgtcggtgagcacggtcagcagttcgccggtgtcctgacggtactgttcggtcagatagcagattaccgggttgagttcgggccataccagcgattcggtgatgaagccttcggggttcaagccggcacgggcataccgttcgcgactggcgatgaattcgggggtgggggcgatgaggtcgcggttgcgcccggacaccgaaaccggcggcagttggaagaagtcgccggacagcacgacctggatgcctccgaacgggcgtgggtcgcgacgcacttcgcggcagacttggtcgaccatgtcgaacagccatgcgtgcagcatggagacctcgtcgatgacgaggatgtccgtagcctgaatcttgcgtttgcgccgggatttgatgagtttgagcagactcgggctcagggcggtggccacgccgacgccgctccacgaatggatggtttggccgttgatatgcgtggaggcgatgcctgtggacgcggtgactgccacgctggcgccgtcggcccgagcctggcggatgaactcgttcaagacataggtcttaccggcaccgggcgcaccggtcaggaacacgttcgcgccggcgttcagaatggctagggcttcggtttggcgcatatcaacctctctagactcccctcagggaggggagccaagtacggcggactacttattgagaatgctggtggccacgatgtcggcggcgatggccttggaggcggcatcatccgggccggggacgggggccatgaaggccttacggtagtagcgcaactcgtccaaggactcgatgatgtcggcgagggcacggtggccgccgttcttcggcggacggttctcgtagacggccgggtaccagcggcgggcgagctccttcaaggtgctcacgtccacgctgcggtaatgcaggtggctcatgaggcccggcatgtagtggtcgaggaacttcttgtcggagccgatggtgttgccggccagcagcgggcgcacgccttccggcgtgaagcgcagcacgtattcggtgaccttctgctcggcctcggccaggctcaggccattctcccactcgttgatcaggccggaacgggtgtgcatctggcgc

SEQ ID NO: 692 - DNA, 20367 bp, Unknown
  R14_15m  MAG No. k141_25640
ggcgacgagctgaacggcagcaccagcggaacgagcgatcttggcgccacccagcgggcggagctcgatggcgtgaaccacggtaccggtcgggatgttcttcagcggcaggttgttgcccggcttgatatcagcctgagcaccagtctcgatgacgtcgccctgcttaacacccttcggcgcgatgatgtagcgcttctcgccatctgcgaagtgcaggagggcgatacgggcggagcggttcggatcgtactcgatctcggcaaccttggcgggcacgccgtccttgtcccaacgcttgaaatcgatgagacggtactggcgcttgtgaccgccgccgcgatgacgggaggtgatacggccgtaagagttacgaccgccggtcttggacttcttgcgaaccagcgacttctcaggcgtagaacgagtcagctcggagaaatccgagacggacgcgttgcggcggcctgcggtcgtcggcttataaacgcggatagccataatgtagttcttcctttaacttttctcggctagccttcagttaccaaagatgtcgatcgtctggccctcggcgacggtcacgatcgcacgcttctgggaagcgcgctggccgaaaccggtgcgagtgcgctgcttcttgccagcgcggttgagggtgttgacgttcgtcaccttgaccttgaagatctcttcgattgcctgcttgatctgcaccttgttcgcatccggagccaccacgaaggtgtactggccacggtcggaagcggcgtagctcttctcggagacgacgggcttaagaatcacgtcgtgagcgggcttgtgaatagcgaccatctaaatcaggcctccttcggctcggtcttggcagccacgaaagcctcgaaggcttccttggtgaagaccacgtactgcgaggtaatcacgtcgtacgtgttgagctgatcgacgaaaatcgggtgaacggtcgggatgttgcgcacggagagccactcgttgatgttgtcgcgagtgaagacgaccgtggtgaacttgtccgcggtgatcggggccagggcggcgacagcggccttggtggacggctcggtgataccgaactccaccacggcaacgcgaccggcgttggcgcgatcggacagggcgtagcgcagagctgcggccttcatcttcttgggggtgcgctgagagtagtcacgcggctgcgggccgaacacggtgccgccgtggtaccactgcggtgcacggatggagccctgacgagcacgaccggtgcccttctgcttccacggcttcttgccgccgccggaaaccatgccacgagtcttggtggcgtgggtgccctgacgagcagcagcgagctgagcggtgacaacctggtggatcagcgggatgtgagcctggacatcctcggcggaaacgccgaagagagcctcaggagcttcaacggtgccggtggcctggcccttggcgtcggtgacgttcagagtaacgtttgccatggtttatcaggctcccttcacagccgagcggacgagaacgatgccgcccttggggccaggaatggcacccttgatggcgaggatgccgttctcgacatcagcggagacgacggtcaggttctgggtagtggcggtcacatgacccatgcggccggccatacgcttgcccttgagaatacggctcggagtggcgcatgcgcccacagaaccgggacggcgctcgttcttgtgagaaccgtgagtacggcggtaggacttgaagccccaacgcttgatggtaccggcgaagcccttacccttggtggtgccggtcacgtcgacctcagcaccctcttcgaacaggtcagcggccagttcctggccagcctcgaactgatcgacgtcgtcggtgcgcacctcgacgaggtggcgacgcggggtgacaccggccttggcaaagtggccagccagcggcttggtcaccttggtggggtcgatggcgccgtagccgagctggacggccttgtagccgtcagactcctcggtcttcacggcggtcaccacgttggtggacacgtcgacaagagtgacgggcacgaagaagccgttctcgtcccacacctgggacatgccgagcttcttgcccagcagagccttgcgattagacataatgcttcctcctcccttacagcttgatttcgatgttgacgtccgcaggcagatcgatgtgcatcagggagtccacggccttgggggtcgggtccacgatgtcgatgaggcgcttgtgagtgcgcatctcgaagtgctcgcgagaatccttgtacttgtgaggagaacggataacacagaagacgttcttctcggtcggcagcggaacggggccaacaacagttgcgcccgcgttcgtcaccgtttcgacgatcttcttcgccgattggtcgatgacctcgtggtcataggacttaagcctgatgcggattttctgtcccgccattgccgtccgccctttctagcgatgttcgttgtactgtttaccaacctgcttctagggcaccggcgcgcatggcctcccttggacatacgtcctctggcggtcatccgacatcagtgcgcggtttccggctgtcacttcacttgaagtggctcccggcccgcgctcgcttttttaattccaatttgcgagcccaaatcaggcaacttgtttattcaagcattgaggtgggacagcgcggaggaattcgcgcgtgtcgcgctcaggccgttcgtattacctcgcggcatagccgctcggcgtcgcctaccaacatccttctgagacttacctatatatagtggcacagctcacgttggcgaatatggattgattaattgagttggacggtaacgcgaattactcttaaggctcgtgacacaatcactggcaaagaacatcaaacctattcgtgagcacggtgccaacgtgttatatcagcacggcactttggccttactcgtgccggggctgctggaaggcaccaccaccatcggcgaattgctcaagcatggcgacaccggcatcggcaccggcgagggcttggacggcgagctcatcatcctggatggcgtggcatacaagataggccaatccggtgtggccgaacgcgtgccggacgacttcaccatgccattcgctaatagccatcgcgcggccttccagtaccagtgcgagcgtcatgatatcggcctagaagagctcaacgaaaagatcgtcaaggcgaacggccgcgcgaacacgttcttttcggtaattgtgcgcggcacgttcagcttcatcaagacacgcgcggtcatcaagcagcaggcaccctaccccacgctggtagaggtggccgaccggcaggccgtgttcctgcgccacgacgtcaagggcaccatgctcgggtacttctcccccgtgatgtttcacggcgcggctgtggccggattccacgagcacttcctgtccgacgacaagacgttcggcggccatgtgctcgatgcggtgctcgagcgcggcaaaatctacagtcaggtgttcgataccttggtgcagcatctgccggtggacgaccctgattatcgcaaccacgacttcagccaagatccgatagccgaggccatttccagcgccgagggcgatactcaacgagattagtctcacataaacacaatgtgagccaaatgaacatttccgaacaatcgcacacgttgcataatggcggaagcactggcttctcgcacttcctatgttcgattgtcgcaatgcaggtctcacatctttcttattgagaaccattcgctgcgatatcatgacagatatgacttcccgccgcaagactcttaaacgcgattggttcgacaaccaacctggcgcatgggtaatggttatgctgcccgctgtggctggcttctttatcggcgggcctaatcttgatacgctttggctgttggcgacgtgggccgtgtgctattgcgtgcagttcagcgccgcgcactggttcaaagcacacttttcacgccgttatctgccgccgatgctcacttatgccgtagcgctcatcgtcatcggcttgccattcctgattacgcataccggcatactgcgttgggctcctttatatatagtgctggttgcgctgtcgatgctgtcctcgtggctgaggaaggagcgctcgctgtggggcaatgccgtgtcggtgattgccgcatcggccatggccacggtgatcgcgtcgtttggcaacgctgttgagacggcatgtgttattcccatcaacgcagcacatgcctcgtgcgcagccgctgatgtcaccgccgcacgcgccgcgattcggaatatgccggatttgagccagatattcgaccttcacgcctggtggcctgcgggttcattgcccgtgaacgggctgattgccaccgtgctgtttgcgctgacgcagtatgggtcggttttggtggtcaaaaccatgatccgggaacgcgggaagcgttcgtacgtggcggcttcgtgggtatggcatgtggcgctattgctgctagccgccgtgccggctggacgcagcccgtatctgattgcgatgactgtgctgctgttggcccgcgccgttgcgttgccggtggttacacggcgcacaaccttgaagcccgtggtgaccggcattaccgaggcgtttgccagctttattgcttttggctgcattattgcggtgatttagcgacgctcagcgattccatggggcggtaattccctcatggggcggtaattagcccatggggcggacggtaaaattttaccttccgcagaatagagccgttttcgtacaccgccccatggggttttcaccgccccatgggcaagttaccgccccatgagtaggttaccgccccatggaggcacctgccggctgagggagcgccacatatgcaaaggagcccggcccctgtaatggggtcgggctccttgtgtccgctatgcagccactaagctgcaacaccgcggttggtggctactgctggtgccagcagccgccaaccgcctgcaatcagcgctcggaggcttcctcagtggcggcctcaccctcgcgctcgatgcgtagcttgtggccttccgcctgggagacgccgtagtaagcaccgacggcgatgtccttcatgtcgttgatcagcgggatgcgcgggttggccggggtgcactggtcctcgtaggcgcgcatgccgatctgatcgagcacggaccagaagtaatcctcgtccacgccgcaatcctggaagctcttgttcataccgagcttgttatcgcggtagtcctcgacagccttcgccaggttctccacggcttcggccggggtcttgccggtgtcgatgccgaggttgcgggcgatgtcctggtagcgctccggggcgatgtacttgttgtacttcggccaagaggtgggctcctcaggaatctggccgttgtagcgaatcacgtacggcagcaggatggagttggtacggccgtgggcgatgtggcacagggcaccgatggtgtgggccatgccgtggcacatgccgaggaacgcggagccgaatgccatgccggccatggtggcggcgttgtgcatcttctcctgagcgtcggtcttggccaggccgggctcgccgttgacggactcagccaggttgtcccagatgagcttggccgcgtgcagggccatgccgtcggtgaagtcgttcgcgtacacggacacgtatgcttccatcgagtgggtcagggcgtcgaagccggcgtcggaggccagcttgcgcggctgggtgcgagccagcaccgggtccacgatggccacggacggggtcagcgcgtagtcggggatcgggtacttgtagccggtcttgtgatcggtgatcacggcgaacggggtgacctcggaaccggtgccggaggaggtcgggatgcacacgagcttggccttcttgcccagcggcgggatcttgaaggcgcgcttacggatatcgaagaacttctcgcgcacgtcggagaaggcgatttccgggtgctcgtagagcagccacatgatcttggaggcatccatcggggagccgccgccaaccgcgatgatcgtgtccggctcgaactcctcgcgcatcatctccgcgcccttttcgacggtctcgacggagggctccggctcgacgtagtcgatgatgcggaaggtcacacggttggagcgggcgcgcagctggtcgatgaccttgtcgacaatgccgagctgctccatgaccttatcgcacacgatgacggccttctcgatgccgtacatgtcgcgcaggtacttgatggcgttcggctcgaagtaggtcttggccgggatcttgaaccactgcatgttgttgttcctccgagcaatgcgcttgatgttgacgagattcacggcctgcacgttgccggacaccgagttgccgccgtaggagccgcagcccagggtcagcgacggggcgatggcattgtagatgtcgccgatgccgccaagggaggaaggctggttccagatgatgcggcaggcgtgcatacggacgccgtactcacgcacgagctcctggttgttggtgtggatggcggcggtgtggccggcacccagcttgagcatcttctcgcacatctcgaaggcctgctccttgttgtcggccttgagcacggcctgcaccggagcgagcttctcgtgggtcagcggctcgtcgtcggagacttccttgcactcggcggccagaatggtggcgtcggccggaatctcgaagccagcagccttggcgatgaactgcggggacttgcccggcaccacggagttcagcacgggcttgacgccggaaccggcggtgcagccgaacatgtactgctccagcttggccttctcttcggcgttgacgaagtaggccttacggaccttgagctccttgatgagctggtcgtagacgtccttgtgggcgatgatggcctgctcggtggcgcagatcatgccgtaatcgaagtgcttggagagcaccagatcgttggcggcacggacgatgtccacatcggaatcaacataggccggggcgttgccggcacccacgccgagggcgggcttgccggaggagtaagcggccttgaccatgcccggaccaccggtggcgaggatcgtggccacgcccgggtgctgcatcagcgcgccggtggcctggatggacgggtgctcgatccactggatacagttctcgggagcaccggcctcgatggcggcgtcgcgcacgatcttggcggcctcgacggagcacttctgcgcgccggggtggaagccgaagacgatcgggcagcgtgtcttcagggcgatgagggacttgaagatggcggtggaggtcgggttggtaaccggggtgacaccggcgaccacgccgacgggctcggcgacctcatcgatgcccatcacgtcgtcttcgcggatgatgccgacggtcttctggccggccaggtagttggtgacgtgctcacaggcgaagatgttcttggtggccttgtcttccacgagaccacggccggtctcgtcgacggccatcttggcgagaacgaggtgcttgttcagagcggcgatggaggccttggcgacgatacgatcaacttgcttctggtcgaggttctcgaattcgtcgagagccttcttggcgcgggcaaccagcgcgtcaacttcggcctcagctgcggcctgcttctcttctggggtcggattggcagcttcgactttcttctttgcttctgccacttggggtcctcctcgatcttcttggggtattatggcaaagttctgggccatcgcctcgtcacctcagttgcaccagcgggataccgcctcagtaaccgaaaatgaccggtgatgcgttgtcacattgcatatgtgacttgagtcacaatataccgaacggtccggcgcgatgcatacgcacaaaatcgacggcgtttcacgtgcgatattgaacagtttttgttaagagttgtgcgaaatatcgaacaaatcctcactttattcggcgatttggtactttttgttcactttttaccgaaaatcacatgcttgcaaacaacgcaatccgacaactttcttaaatcaagtttccaaaagtactcattttccccacatttctagaaaattggtttaaaaaagtgcccaaaatcgcctacaaatatacgattgttgcctcataatctccgcgtcgaggcacatgaaagccactttcataaagtatacttacatatatctcatcgcacaaaggggtaaatatgagggcaatgccatcgaccgcagtgaaagcgcacaaccgcagtgccatgacccagtatctgtatggccatagccatgtcaccaagcaggaactggaacgcgaactcggcctcagcctgcccaccatcacccaaaatctgcgcgccctagaagatgacggactcatccgcaaaggcgaactgcaggattccaccggcgggcgcaaggcgcaaaattatgagttcaatcccgatcatcgcactgccatcggcgtagtgatgcggtccaacgaactgcgcctgtgcgcgattaacctgtacggcaacgtcatcgaaaaacgcaacgatgccctgccttaccgcaacaccaacgtttactaccagcgtatcggcggcatcatcaacaacttcgcctccgacgtcgaaaagaagcacggcaaagtgctcggcgtctcgttcgccatccaaggcatcctctcccccgacgccaccaccatcaccttcggcaccattatgggcaacacggggcttacgctcgaaaccatcagccagtcggtccattacccgtgcatgatgatccacgattccgatgcctccgccatggtcgagctatggttcgactccacgctcaccgatgcggtgtgcgtctatctggagcgacgcccgggcggcgcggtgatcgtgggcggcaagctgtatcagggtccgaatatgtgcaatggcgccatcgaacacatgacgctggtgccgggcggccgcgaatgctactgcggccagcgcggttgcatggacacctactgctcgccggagaccttgcccgaggattacgaaagtattcccggcttcttcagcgtgcttgagcagggtgaacggcatcatcgcgagcgcatggacgaatggctggattacgtggcgcaggccatcgtcaacgcgcgatccatcatcgcgggcgacgtgattgtcggcggtgaagcagcccagcatcttgaagacagtgacatcgaggatctgaaggcgcgcgtcatcgcacgcagtccgttcggcaccgaccatttcaatctgcgcaagagctactgcgccgaagaccagaacatcatcggtgccgcattgcgattcgccgagaattatctcgacgatatctgtggtgctgcggaacgcggcaggaaatcaagggcttccaccagaagtgacaacacgtctacaatggaggtatgaaaaacccaccgttgcatcgttacgccactcgcccagggctgtacttcactgacgacggtggggctgacgtcgttgttcgttccgaaactgccgatcaggtttggctgtgtgtgctggagcccattgacgagcccggcgccttcttccaagacgccatccgcctgttcgaagacccgaacgcctcgttcatccagcagatccatgagtttccggtgtgcacgcgcattatcgaacatttgtatctgcgcgagaccctgttccgcatgaccggaccgaactacggcctgtggtacgtgcacctgcccaaagcatgggacggcatgcgttatggctaccgcgtggacggcgcatgggacccgaaacacggcgtgcgcttcaatccatacaaattcctgcttgacccgtatggcaagggcatcgacggctccatggagctcacccccgccgccttctcctatgaatgcgatgtcgtggaccacaaggtaaccggctcggcatacggtgccatgagcaccgtagactcgctcggccatgtgccggtatccgtggccatcgacgatcgcgatatccataagcatgagggcgacccgcagcacccgcatgtgccgtggcgcaaaaccgtcatctacgagatgcatgtcaaaggcttcaccgccaacgcgccgtggctgcccgaagcgttgcgtggcacctacgccggactcgcccaccccacaacgctcgcctatctgcagggattgggcatcacctccatcgaactgctgccgattatggccaagcaggacgagctcttcctgcaagaacacggccacaagaactactggggctactccaccctcagctacttcgcccccgaaccctcctatgccaccaaagcagcccaagagaagggcgcggccgccgtgcgccaagaagtcatagacatggtgcgcgcgctgcacgaggccggcttcgaagtcatcatggacgtggtctacaaccacacatgcgaaggcggcgtcgaaggcccgacggtctgctggcgcggcctcgacgacctggcctactatcgccatcaaaaatccaataccggtcgactcgaagacaccaccggttgcggcaatacgctggacttcaccaacacgcatgtggtcacctttgccatcgactcattacgatactgggccaagcgtatcggcatagacggtttccgtttcgaccttggcgtcacgctggcccgcctggaaggcgaattcacccatcatcacccgttcctctacgccctgcgttccgatctgctgctgggcaacctgaagctcattatggagccgtgggatctgggcaacctcggctggcgcaccggccaattctccgtgccgttcgccgaatggaatgaccgcttccgcgacacggcccgcaccttctggcttgaggatgtggacggcggctccgatttcggtcgtatcagtttgcaggagatggccacgcgactctgcggctcggccgatctgttcgccaccgaacccgggcgcggcgctccggcctccatcaatttcgtgtcctgccacgacggtttcacactgacggacctcaccagataccgctccaagcacaatgaagccaacggcgagaacaataatgatggctcgtcggtgaaccattccgccaatttcggcgtcgaaggcgtcaccgatgatccagacgtcatcacggcacgcgaacaggcggccatgaacatgatcggcatgctgctgctctcgctgggtacgccgatgatgctcgccggcgacgaattccgcaacacacaggacggcaacaacaacgcctactgccaagacaacgacatcacgtggctgaagtgggattggatgtattccaccaacaagacacgcgaaatgcgtcgcctgaaaaccgtgtctcgactggtggcgctacgtaaatcactggacctgtatcaccacgaggacttcttcacccgactgacccaactcggcctactcaagccctcaagccgcgtgcagtggttcctgcccgacggcaccacgccgatggagcgtgactggttcgatctgggcgtacgtagcttcaccatgcgattgctgtccaacagtgaggtggacgtgtgcattgtggtcaacggcaccgctgacgaccgcacattccacctgccgccagacactcactggacgcctaaatggtgctcggccgaaatcaacggccgccgagccgggcatggcattcaggtcgaggaatgcgatttgaacgatgacaccaccgtttggacgcagcatgtaccggacgccagcgagacggtacgcacgctggtcgaagaagtggccatgcagcgcacggaatcctcgactgaggatgaagcggataccatcgaattcgcgatgccagcaacggatcacgccgcaaacggcacctcgtccgcgcctcgggatgaggtatcagctgatatgcctgatgcccctgtggatgatacgccggacactcccgtcgacgacaatgtctggaccatgccggcgctgagcatcacgctgatgaaacaggtgtgagtcacactcaaaacagcacgacacaaacacaaaggctctccgcggaattccacggagagcctttgtatgctcggtacaggacaagcgaaattaacgcttggagaactgcggggcgcgacgtgccttgtgcagaccagccttcttgcgctccacgacgcgagcgtcgcgggtcaggaagccagccttcttcagggcgacgcggttggcatcacgatcgatggcgttcagagcgcgggcaacgccgaggcggatagcgccggcctggccggtggtgccgccgccgtcaacgaggacgatagcgtcgaacttgccttcgagcttgagcagaacaatcggagagttgacctcacgctgcagcagcttggaggggaagtactcctccagggtgcggccgttgatggtccacttgccgtcacccggaaccagacggacacgggcgacagcctccttgcggcgaccggtgccgtagcccggctcgatcgcggaggtgccggtgccagcgccagcgttggtctcggtggtgtagttggtgagctcctcttcggtctcgacaacctgggagtcgttggtgttttcagccatgattcttatctcctctcaggtttcacttggcctgctgcgagacctgggcgatctcgaagacctggggcttctgcggggtgtgcgggtgctcggcgccgcggaagacacgcagacggtcgagctgcaccttggccagacggttcttcggcagcatgcccttgacagcgttcttgatgatgcgctcggggttcttctcgagcagctcggcgtaggagtcacgacgcagaccaccgggacgaccggagtgcgagtagagttccttgcccatcttgttgccagtcagagcaatcttgtcggcattgatgatgatcacgtggttgccggaatcggcgtgcggagcgtaggtcggcttgttcttgccgcgcagcaggattgcagcctgggtggcgagacggccgagcaccacgtcggtggcgtcgatgacataccagtcatgagtcagatcagctggcttcggagtgaaagttttcactggattaccttttctatattgtgttccgggtctcagctgcttggcgtggcttggtcagggccgcatccaagaggcatcgaacctcattatccgtgggctccctgaaagtcctcgatggcgagtgggatagcgctttgaaggaccccttagggaaacacaacaatccactagtatatcgccgggcttgacatagggcaactggggacactccattgggtttatggcttctcttcccctatttatggtttctcttccacccacttcggctaaccgactcgcctacggtgaggcaattccctgccttctctcagctatcgcttcgttcaggcctcgtctacggacagtccactggactgtccgcttaacgactcggctcgtcagagggaggtaaagtgggtcaggaattgaagatttgggcgaagcgttggacgccgggggtgtcgaagagggtttcgagcggtaccacgttgcccttggcgtcggccagcgggatgcgccagttcgggtattcgttgttggtgcccggctggttctgcgcgcgcttctcccccaccgcgtcggtgatcgaggcggcgagcagcttgcacggcgaacccttcagtgcgcggtacagcgcgtcgatgatatccgcctcgtgatcctcacgatgttcggcgaagtcggcatcaagatagccctgctcgaccagcatgaccagcatcgcatcctgctcggcctttgcggaggcttcgaattcctcagccgggccggtcagcaagcccagacgctcacgaatcttgacgtgctcgtattccaggtaaccggcggtcggcggcaaatcgtgcgtattcacggaggccaatgcgtacggacgccactgggagggggcgcggaacacgccgtcgcactgctcgaaccattcaacggcgcaaccgagaataccgtggctcgacagggaatcggccacatggtccggcaccacgccgaggtcctcacctacgaccacgccgccggcgcgagaggcctcgatggccagaacgcccagcatgatgtctgagtcgtagtacacataagcgccatccatagccgaccggttctcgggaatccaccacaggcggaacaggccgagaatgtggtcgatgcgcaccgcaccggcacgggcgaacatgccatgcaccatattgcggtaggtctcgtagccggtggcctccagattgatcgggctcagcggcggctggctccagttctggccttgctggttgaacatgtccggcggtgcaccgaccgtggctcccttggcgaagcgctcgggattccaccacacgtcagcgccggaggggtgcacgccgacggccatatcggacatgatgccgatatgcatgccggcgtccttggctgcctgctgggcggaggacagctgctcggcggcaatccattccagccagcggtagaagtccaaagtgtccgggtactgcttgcgcagattggcgatttccggggagttgcggttgaacttgcgctcccagttgctctcctcgccgttgggtgctccccacttgtcgtagcacaggcaccacgtggcatacgcctccaagtcggaaccgcagtccgccttgaattggtcgaacgcgctttggcgttcggcggtacggccggccttgaagataatccacagggcgtgcatcttgctgcgccacatggcgtcacggtcgatgagctgggaatcaccgttcagcggttcggtgtcggcatgcagtccgtcgacggcgttcttgtcgcccgcgctgagcgtggcatattcggcgatcgcctcggggcggatgtacgtgaagttgatcaggcgacggcttaccggcagatacggcgacggggtgagcggggacaccggctcggcggcatgtaccggattgatgagcacgaagtcggcaccggtcttctgcttggcgtccaccagcatggtcttcagatcctcgtaatcgcccacgccccaggagttggaggagcgaatcgagtacagctgggccatccagccccacagactgccgcccttcatcgggtcaagcagatcgacgcgatcaggtgcactgatcaaagtggcgtcttgcacacggtcggcgaccttgacgtgcagcgtatggtagccaatcggcagatcggcgggaatgaccacagccgcattcgaaatgaacgtgccatccaagtcgtaggcctgggatccatctccaggaccaacttcaacggtgccctgatatggctcgccgttctccagcgtgatgctcgccgaaggcacgtccagaatgccggtgttcaccagcacccggtcctcgctaccggcgatatgcagcacggtgggtgccaccaatcgggagtaacgctcgttcagaatgcgtcggatggcgatgagttgggcgttctcgctggaggcgtcgatgcccagcgctgccagcacctcgatcaggacgtcatcgtctatctcgtggtagtcatggctcatgcccacataactcgtgccgacaccgaccaacttggccagtcgaatcaacggacgggccagacgctcttcactctcggtaatctcactcatagccccagtctaacgccgtttgattgcgccacaccgtaagcaaaatgccgtgattccgccaaattatgtactttttaccctcacatagtgagatgtgagcgctcacaatggtggatagagggtgattgccggccaaatttgcacggcaaaacacagcaatagtgtgcttagcggcggctttccacggcgtgccgcacctcggccgaggggtcgttggccaatttggcaagcatcgcttcggacgtattggggttcagcgccacggcacggcggaccatcgaggaaagcactgccggtgctccctcttcggattcggtgccaagtacgcccaagaaatccaatgtctccgcatccgcagtggggtcctgcgcaccctcaagccgcatcttccagctggtgcgcttgtttttcaacgccgtatcccggaccgcaggtaccggatccttggtcaggcggccgaccagccaattcttgtcatccccgttggcggccacggcttggcgcacggacggttcggggtcttcggagagtttgaccaatacgttcgggaacggcatggtgtcggcgaggaacacgcgatcggccaccggggtgtgcgggttgccggccacagcctccaaaagtgcggtggcgcgggagaacgccgcctgatcggcacggtcaggcaacggccgacgggcgaattcggacagttcggccgggtcggtggaatgacgcagacgttcgtatgtggcggtcagcggttcgaaatccaccggagcggcggactcggctgcggcctgcgcgccttggtcccgctgttgggcgcccgtgtcgattgcagcctcagttgcggcctcggtgggctgggtccgctggctggtggtgttctcgtcggtcatgatgcccagcttagtcatacaggcgtcacgcgagcggaaccggaatgttgaccacgtcaatcggatccggcaccaccgcggcattgaacgcttcccgcacacgctcctcgaatcgcacgcaatcatcttgcggcaccaccgcggtcagttcgacgttcaccgcatacgattcatcctcctggtcgccaccgagctgcgccaggatctgctggaatcgtgccagctgcgggtattcgagacggacccggtatcgcttggcggtcatgatgcgggcggcgcgggcggctttcatcgccaatgatgcggcggatgagtacgcgcggaccagaccaccggagcccagcagaatgccaccgaaatatctggtgacggcaactacgcaatcggtggtgccggactgcttgagtacgtcgagaatcggcttgccggcggtaccggacggctcgccgtcatcgctcatgcgttcggacagtcgcccatccgcgcctccgcacaaggcggcatacgccacgtgtcgggctttcggatgctgctcgcggatcgcggccacgaacgcgagcgcctcgtcgagcgtatcgacatgggcggcgtcgccgatgaattcggactttttttcgacgagcgaatcgtgggcgggatcgtcggacgtgttgagaatcgtctgcataagcgtgttccggtggtcggctgactgggtgttcgattgagcgcgaggctagacaggactatcagtgttcggagacgacgacgttatagtcctcgccggcgaagtaggcggtcaggcaggcgatcatctggcgggtgagctccttgaacgcgccgtcggtacgccagccgacgtgcggggtcaggacgatgccgggcacatggcagatggcatcgtcggcggtcagcggctcgcggtcgaacacgtcgagtgcggcgggaacatcgcccttttgcagtcgggcaagcagcgcatcggattcgatgacttcggagcgggcggtgttgatgaacagggtgccgggcttcacatgcgcaaggttctcggcggtgacgatgccgcgcgtggcgttgttgagcggcagatggacggagatgacgtcgctggtttcgatgagctcgttgagatcgtcgaccggagtggcgccggagcgttcgaaatgctcgggcggcacatgcgaattccatgcggcgacctccatgccgaaggcgcgggcgatgccggccacggtggcgccgatgccgcccagtccgatgatgcccatgcgacggccggcgagttgcagtccatcgccgccggcccacgcccagttgccggccttgacatccttatcgagttggccaacgcggcggatgagctcgaacaggagggcgaaggtgtgctcggccacggcgtgatcgccataatgttcggcgttgcagacgcggatcttcagctcgcgcgccttatcgagattgatgtagctggcgacgccggtaccgcagaacacgatgcacttgacgtgcccctgctcgctgatggtgcgcagcagatcatccgaaatgtggtagccgcccaccagcagggcgtcggcatccttcagacgctcggctatggtcgcctcgtcggacgtgaattcctcgaacatacgcacgcgggcaacgtcgtggagcgcggggaactgggccttgatgggctcgatcatcgcgtcgagcacggacggcatcacgacgagaggcagatcggtgcgttcgctttgggtttcgtaaatctcggtcatgggctccacattaggaggccgacgggaaaagcgtcaccttgcggcttcccctccttgagaccaagccgagcaactattgctttgccgcctgctcctgcgtgatgttccattccttgacgacgttctggtccgcgcccatcgaatagatgacatcccagatgcgttggcgtatctgagcgtcgtaggcttcgtcccaacatgtgcctatgggatggtcgctggatatcgggcaccattggtagttgccttgatgcacgttggcggtgggcacccagtcgatgcggttgacgcgccacgaccccttgacgcccttcttgccggcgaactggatgcgtgcggtcacaccctggttgttgaccaaggtttccggcgtgttcgccgactcggtgacggtgttgcccagaccgtagacaatccacgtgccgttatagttctcgatgggctgcgcacaatggcatccggcaccgtagataacgtcgaaggcaccagtgtcggcaagctcatgggcttccgaaatctgccaggaatcggcgtaatcaaggtattcctgcaccgagtgcatggcgatggccaccacatcggcaccttgctcgcgggccttgttggccttgtctaccgcgcgctggatgtcgctgccgtgattcgggtcgccgtcttcgcgcagacgatccacctgccagtcctcgtcggcggtcatgccgttgagggagaccgtgccggtgaccagacctagcttgccgccgccggtcggggaatcgatgactaacggtttggtggagtcggcttcggttttgtacgagccggtctgggcgatgccatcggcctcaagcgtgtcccacagacgggcgatgccatccgccccctgatcccaggaatggttggtggcgtgtgtgcaggcgttgtatcccacgttgcgggcggcatccgccacttccggcggaatgttgaagatcgggtacgcggcatatgggccgccgcgctgggcgatcggggtttcgaattcgcacacggcgatgtccgaagcctgaatgtactgcttcatcggcgcgaacagcgggtcgaagttgaaggcggtgccatccgtggcgttggggttcgggccttggaaatggctccacaatccctcatggaacaacaaatcgccgttgaccagcatggcgatgcagtccgtatccgggcaatccggtgaattgccgtgatgttcggtcaccggtttgggcgtgttcttcgctttattcaacgcgacgtccgacactccggcgcgtgcggggccattgccgtccgtgcgatgggttgcgaaccatgcgccgatgcccagcgtaacggcgagcgcgatcacgaacacgataatcagcgccgcacggttggttcgtgtcgagttggagcgatgttgcccctgcccagcgatatggctcatctttgcccgcccttcggaactcttcttctctctctagtgtaccgcccatctcagtcaaacactgcggggaggaaggcgatgggcaagcgattggacaagcgacataaaccggttaatcttcaatcaccattcacgaacaccacgcaaaagtctcacttagtggacattcttctttcgtttgttagcctttccccgaggtgccgcactcgttcacccgctaaaatggcggtttggaggcggacggacaatggcgtacctccgactccgcttaccacaagcggagaccgaccgtcctcggttatttcggttatttcggttatttctagcgacacattcccaggaaagtttcgcaaaacagacccccaagcaacccactagaaacacattcccaggaatgcgtcgcaaaacagatatccggacaacccaccagaaccgtattcccggggttcgaatccctctgactccgcgaagtgcgaacaggcccatcatcaggagtttccggaaaacaaaaaagattccaagcttacccccggaaccttaatcggcggagtcagtgggattcgaaccctcgagccgtttacacgactaacaccttagcagggtgcccctatcggccactcaggcatgactccacgttacgcaataatgcgcaacagcaaatcactgtaccacgtcctgcggatacgacgtgccgaa

SEQ ID NO: 693 - DNA, 14702 bp, Unknown
  R14_15m  MAG No. k141_25644
aagttcaccggccaatgggccgtctacgccgcccgcgacctcatcaaggacggcgagaccctggccgagcggggcgaacgcatcgccggctccgacttcgacgccagccgtttcggcggagaactcttcgagctcgccaccaacgagcgcggcgtggtcaccgtgcgcgccacggagctgatgcttggactcgtgtcggccgacaccgagcatgagcaggcgtggaccgcgttcatccaatgccagcgcatcgccgtgggcggtcccgtggccaaccggttcaccgagaccatcaacggggtcgaacggccctcgaacaccgtcaccacgcacacgcccgacatgacgccccggctcaccatcgagaaatgggacgagcaatccggctggcccgacggcgaccgtgacaccattgacgaggcgctgaacatgaacgggagcgacactcgcatcgtgttcaccatcaccaacgcatcgcccaccgaccctgacaccggagacggcccttggttcaaggcgagcgagctgagcctcaccgaccagctcgtcgccggcgacggccagatcggcgagttcgagtatcccgatgactggcagacgctgatcctcaagcccggagacagcgtggaggtcaaggccaccctcagtggcgtgagcgagcatcacaccgaccgcgccatcgtcaccggtgtgccgctcgtccaatgcgtcgtctccgaccccgaccccttcgacggcaaagacgaggagaaactgcccgaggacgcggtggagatcgacgggcgaaccctgtgcgcggacaccaccgtgaccagcaacaccgacgactggaacggctaccagcccaaggataatctggcaaccaccggcaccaacatcgccggcctcatcgccgtcatcctcgtcctcgcgctcctcggcaccggcgcaaccgccgcgatccgcctcacccgcgccaacggccgccacaccggacacgaaaacgacgcgaatgatgatggcgctggccgtgatggcagtcccaatggagatggccccgagccggacttcgcccaactcgtcaccactatcaatcccaaggagccgcccatgaactaataacaaccacccatctgctgcttagagccaactttcgtattccagttggcagttagacggtgataccatgcaactgtcccggcaaaacggggcagtgcatactaggcccgcaggcgtagtcctgcgggcctatttcgtctgttccccatcggctttagccaacgttcccccatgacagcggactatgattcgctgctttaagcactggcaagtgaaactcgatgccaggtttctctccccacggcactctagctaaatcggttatgttgcctggccattcaggcaccttattactagaactgagatcaaacaaagtgaaagcgaatggcggtatcctgatacatgccattttgcagcacgtgtaatccgcaaatatgggaaccatccatccggtgaacagcttttgttcacgcaggttatcgactataaacatatggagtctgtatcgctgggggaaaacagtgctctccctatccaagagatagtccttacagtcatgcatatcaccagctgatacacagaagttcgacatcacctgcttcacaaatgcaagaggcatgagcctatctgtcttgaaatgaatggatttatccccttcctgaaagtcagagacaaggatttgctgtccagttgcacgatagaactcactgaatggcttgacgtagttttgaccaagataactattgcatgagctgcaaatcgtcttgaatccttgacctctttgcaattgccgatacttcaggccttccatgtcatcctgcccggtcaagctgctcttcacggcgtcaacgcctgaatagagcttcaccgtgtgatcattacccacagattgaggagggatgtgttcaaagctcagcggcccttctttaccgcagattcggcaaatgtcatctgccatttcacgtcatctccaaacgttattgccacaggccgaggaatgctgcggcaatgaaatcgagaagcgcagcaccgaccagaatcaatgcatataggttgaaataactgcgcatcaatttaagttttgcaacatgaagtttctcgtttgttgattcaaagtattccatcgatcccgacacgactttttctatcgcaggaaagaccgcgccaatgatggcgagcgacgaagtcacgagtgtagcctttgcgccgtcttgcagaatggtgaatgagagaatccccacaccaatagctaatccgatggcgatgattgcgtaccatgctgctgctttccgaaggaagactcgatcggcttcgtctagttcttcccagtttgaagcagcgccgagagattgcttaatccaaagatcattctgctgctggtcgttattttgcattcttttccctttcccgggcatcttttggcgaatactatagcgtcttgatttacctatttctgtaagtatgctgaacgaatgctgtgtgaatttgtccgccgctgattccacgggactgcacgaggatggccgtatgcgtaggcatggcggtgggccgtgccgttcctgtgcggaggagtgcggctgtggatttgatgaaccaggtgctggagttgttcgtgaagttcgcgacgattggcggtggcttgtggctggtgtggggcgcggtgacattcggtggtggtttgaaggatcacaacgggccgcagacgcagtcgggcctgtggcagatcgtgggcggcggcatgattatcgcggcggcgcagatcttcagcgccgtggcgttgggctgagccggtttgaggcatcggggatcccggcatggaggatttcatcgttgcgatgctcaacatgatcgggggcggtggcgccggttcgatagccactggcatgctgtcgcaggggccggagacgtggaatccggcgctttaccagttggccgtgaacgtgcatgacgtggcggtcaagccgttgacctcggtggttctggcggtggtgttcaccttggagctggcgcgtaattccacgcgcatcgagtccgaccgcgagttgggcgtgaagatcgtggctggcacgttgttcaaggtctcgctggtgttcctggcggttcagaacgcgggattgttcctgcgtgcgttcgattcggccacccagttcctcatgcagggcgcttcctcgcaactgtcgttcgatgcgtccggcgccggcggccagttgggtgacctgatgcgggagcaggtcgaggatgccggcatgatggggcaggcggccttgtttttcctgctggcgattccgtggctggtctcgcagctcgcggcggtggtgttcaccgtggtgctgtacatcaggttcatcgaattgtatgcgctgaccgcgttccagtcgttgccgttcgccttgctggtgcatgaggacaccaggccggtgggcgtgggttatttcaaggcctatgcgcgcacgtcgctcaacgcggtgtgcgtgttcgtgtgtctggtgttctatcagcgcatcgtgatcgacgcggtgcgtctgcccgagggcgatgggtcggggatggtgtcgtgggtgacgggcaatttcggcaatctgctgatggcgggcattctgttgtttttcgtgatcgcggtctcccaacgcgtcagccgggcaatcgcgggcggcgagtgagcgtggcggggattctaaggaggagctatggcgttgcagatgcgcgtgtatgcggagatcgccagcgtggaggcgaaggtcatgtggggcatgggatggcggcagttggtcgcctcggcgctcatgcttgttctgggaggcggcgaggtcgccgtgttcttcctgctgctggagcagcccgatctgggctcgtacttgttgttcgtggtgtgtctgccgccggcgttgtggggctggtggcgtcccaagggcctgaagccggaacgctatctgggttacatgatccgccagcgcttcggcaggaacatccacacactggagaatctggagccggccaggtggccggcgaaaccgtcgttgagggaacgcgccctccgcaggggcgcgggaaggagcgggcgtggccgttgagagcaaggaacgcgagtatggcaggcgtatgaaaaggaaaggcggcgggtccgccaaggtcgcgcggtcgagcagggagttggtcgcctatgattcgatgctgcccggtggcgtcgcctatctggggcaggaccgttggagcgtgacgctgcgcatcagcgacatcagttatcagatcgcctcgcaggacgtgcagatggatgtggtggagcgttggggacggttcctcaactcggtgggcgagggcatgggcatccaggtcacggtgatgacccggacattggacccggaatcggcaggccaagggctggcgatgggcgtcaagggcgatggcctggatgcgttgcgagaggatttcgaccgtcatgtgcgccgcaagctgtcgggccagtcgagcggcaccgtgtgcgacaagtacctgacgctgacccttgcggagcaggacggccagcgggccgtggccacgctcaaccgagcggccttgcgggccatcgcgcaattgcgttccgtgggcggctgccgaggctccaaactcaaccgcgcggaacggctcaaggtgctgcaccgggtgctgcgccccggcgtgcgtttcacattcgacgaggatgcgttctcccggtcgcgcggcctgtgcacgaaggactgcgtggctccgtatgccatcgacacgggcgaccggcgtcgggtcaagctgtgctcgggcacgcgcgaggtgtggcatcaatgcctgatggtgcgcgatttccccgagtggctttccgaccagctggtcgcctccctgacggacatcaaggcagacatcatcgtgagcgtgcatctgcggccccatgcgaaggccgaggggttgcggctggtgaaccgcaagatcgcggagatggacatgcaggccatcgacgagagacgcaggaaccgccgccagcatctgcccgaggacctactgccgcacgatctggaggaaagcatggggcaggccagcgaattgcgccgtgacctggagcataacggcgaccggctcatggacacgctcatggtcatcgacgtagccgccgacactcccgaacggttggcgcaggtcgtgcgcgaggtggaggccacggtggacggccagtcatgcgtggccgaatccctgacctacatgcaggtcgagggattgaacgcggcgctgcccctgggaaatcccctgccgccgatgagacggaccctgaccacgtccagcgcctcgatactcgttcctttcaccagtcaggagctgtgccagccgggtggcgtgttccacggcgtcaacgccaggagcggcaacccgctggtcatcgaccgcaccctgggcatgaacggcaacgggttcatcctgggaaccacgggaagcggcaagagccaggccgccaagagcgagatcacgcagacgttcctgctgcgcgagcaggacgatctgatcgtcatcgaccccgagcatgagttcacgcccctgtgcgacaggctcggcggccagcgcatcgagatcggcgaacgctcctccaatcacatcaacgcgctcgacatcgagtacgcggacgattccgagagcgatcccatccggggcaaaagcgcgagcgtgctgaacatggtcgaggctctgatcggcggcgcggacggcatcgacaaggcccagcgcagcctgatcgaccgcgcggtcacgcaactctaccgcgagcaccatgagaagcccgaccggcccgcaccgaccctggtcgatctgacggaacgcttgaacaggctggaagaaccggaggccgtggatgcggcacgcgcgttggagatctacgccaccggcagcctggatgccttcgcgcatcccacgaacgtggacacctcgaaccggctgctggtctacgatgtgtcgggtctgggcgcggaattgaagaccttcggtctgatggtcgtgctcgatcaggtgtggaaccgcgtcgtgcgcaaccgcgcccggggacggcgcacatggctgtgggtcgatgagttccacctgctgttctccaacccatatgtggcagagacattcctgcgcatctacaagagggcgcgcaaatggggcctgtcgcccaccggcatcacccagaacatcgaggaactgttggccaatccggccgcccggctcatgctcgccaacagcgacttcctgctgttgatgaaccagaaccccaccgacgccgacgccctgtgcgatctgctgaaactctcggacgagcagcgcggcttcttcaccggtgtccagcccggccagggcatggccaagtccggcaccgcgttcatccccttcgacggacgactcgacaccggcagcctgctctaccagctgtacaccaccaaattcgaggaccagcatccatgaacaagccccagcccatcggacgggcaagccaaaccgcgcagccctccggcccagcgccccgaaagctgcgggccggccgacccatcgggcttaagggcgaggacgtcccgccgttctccggcaatgccgctcctgccccgaagatcgagggtcagccgtccaagccggcgttggccagaccaagccggtccgatgggccaagccggatagcgctgcgccatctggcgagagcaacggaggagacctccgctttgctgcaagcgcaaatctcaagcgacgacaccgataaggctgatggcgaagccctcggccattctcccgcttccgttgcctcccgagtcatatcgccgcgaggcaagagccggcggcccggcaaagtccgcgtagctcgtcgtggcaacatgcgtggaggccgttccatcctgactcaaagcgcactccggaaacgcacgggccctgttctagccagagacggccgagcacggcgaacagtccgttccggcgccggttcctcgatgcgagcgacgcaatgggtcgttcggactatggcccgttccatgatggcggccaaggcggcggtcatggccacggtgtcggcggccgccggtctgccgttgctggtcgtcggcgcgatcgtcatgctcatgatcagtctgttgatgtggcttatcccgaccgtggccgtgggcggacaatccacctgccagtccagcgtcgccgaggtgcccgaacaggccaagccctgggtcgaacgggccgcccagtccagtggattgggcgctgatttcatcgccgctctcatgcgccgcgagtccgggttcaatcccgaggcgtatgccgatgacagcaacggaggcacctggggcctgttgcagctcaaccgcagcgtgtggcgtggcgtgcatcccgaaggcgcggaccagaccccgccccaaggcatcaccgatccaaacatccacgcccaatacggcggcatatatctcaagaaccggctcgaaggcgtcagacagctcaaggccagccaccccgacgcgcaattcgcccggctatccgatctggaggccttggtcatcgcgcacaacgcgggcgaaggcaacctaatgaaatatcccgacatcccgaacgtcagcaaggaatatctggacgaagtgcggcccgccatcaacgccggcggctcatgctcggccacggccggagccaccatcggcgcccttagcccgcccttggtcgtcgatggcaccagcatcgacatcgacgccagcggcgtgcccgtggcctcgatcaactcatacagcgtgggccaatgcacctggtgggccgccgcccgacggcaacagatcggcaaaccggtggacccctacatgggccacggctacatgtgggcggccagcgccgagcgacacgggtaccccatcggcggcaccatccaactgggcgacgtgatgagtttcgagcgaggagtgctgggagccagcggcgaatacgggcacgtcgccatcgtcgaggaaatccacgaggacggctccatcctcatcagcgaatccggcggtggccaacgccgcgcctggacacgcctgctgacacgcgagcaagccgagaaccccggcatcacctacatccactagccgcagcccttaccgagaaaggagcggagagcatgccatgcatcaacccacggctcgatccccacgagctcgccgacctcatggccgaccccgagcactgggacctactcgaccaagttcctcggcacccggccgcatggcctgatttcgctgaatgggccgaactcacgctcagcgacccctcggcagccggagcgccacccgaaccgccgacaggcgcacctcgcaaacggaggctccgcgccatccagccgatcctatgggaggaaaaggaacccgaaacggacgaatcggataaatcgggcaattccgctgcctctgattccttggcaatcgcggaatccgagtcccctgaccagagcacagcatcttcttccgtctccgacatgtcggaggcagaagaagtattcaccggcgattcgacggcggacgaaaccgaggagccacccatcagggtgcgtcggcgcatcccgtgggcacgtatcctagccctgaccgccgtcatcatcctggccggtgtcctggcatcggtgaccatcatcgtggggcaacgtcatgtccatgcgcaggcactcgcatcatgcaatcaagcaatccaacaatcaaacaagctatacggtcaatggaacgcagccctagacgctgccaagccattgctggcattgggtgacaccgacgtgaccgatcccgaggcactggtctccctacgcaagatggccgaacatcacgtgacgaacgaaattcctcactgcgcagcggacctctccacggtacatctcgaagagagcgcccacactgcggacgcgcgcaacaagcaaacgaagacagccctcgacgaactctcgaaggcggccaccgccgtcgaacaatcgcaacaggaacgtagactcaccgatgccgagacgaagctctccgacgccatcacccaagccgaagacctctaccaacgcgccgaggccaacaccgacgttagcgctaacgagacgcgcgtatcgctcggatcccaactcgacgccgcccgcaacaccctgcacaccaccaccgacatcactaccctgaacaaagcagcaggcgacctcaatgccctcacccagcggctctccgacgccatcaaacaagcagaagaaacgccatccgcgccagccgagccttccgggacgtccaaatcacagtccgcgcccatccagcggcagccatcaaccaacaccactcactcggcgccagcatctcccgtcatccctcagcccacacctcaaccgtctccctcagccccatcgtgggatgtgccaagcaccgactctccctccaccttccccgacactttatgaaatgattaatcgaagctagtaaacgctgttcaagcgtcgctgctgattgagtcactgacattccagcatcttttgctcaggatggaaacaaatcagagggttcgaacattgtccggtatctgtcggccgacaacgtagtcgcacaaaatgtccgtaaatggtgcgaaaaagataaatatcatatcagctttcatacgtcgtgcctaaactggatgacggttatggtctgtcgtagagatggaaacgattggaacaacggaggtgcgtcatggatcatgctgaactcatgcgtgaaaactccgcgctgattgctttgctcaggacttgcgagaggccagacacttggacttccattgccaacgattgtgtgctcgaaggcagcgcggaacgcttgcttctgcacaagatcgatccctcatcgcatccgctgttgcgtgatgatgccgatggtgacgatatgcagggcacgttgctggatgacgtcggactcagtgctgaacaggtcaggcagctagaggacgctcggaacgaatctgttcagaatcttgaagattggcgtagtcagggctttgatttcgtgtcggtgttcgacacgaggtttcccgaacggttgcgcgccaccatcgacgtaccgccgttcctgtttgccagcggcgatctgaaggccgatgatctgggtgtcagtgtcgtcggttcgcgccattgcactcccgagggtgcgcgcttcgccgtggattgcgctcatatgctggtcgaacgaggactgaccgtcgtcgccggcctggccaagggcatcgacaccttcgcccaccagacagcgttgaacgatggaggccgcactgtggcgttcatcggcaccggcatcgaccggcagtatccggccgagaatcgtgacctgcagcatgagatcgaggaacgagggctggtgctttcgcagttttggcccggcgcccagccgaccaagcagtcgttcccgatgcgcaacgccctgatgtccggttacggcgtcgccacaattatcgcggacgccggcgagcattccggcacacgagcccaagcgcgtcaggcgcagcgtcatggccgccccatcatcatcaaccgcatggtgctcgataaggcccaatgggcccgcgacttggaaaacaggcctggcgtgtacatcgtcgatgacgtggtgggggccagccgggcgctggatcgcatcttctacgtcaacgacaacgtggacgacctcatcgaagccgtactcgccgaggaatccgccactgtatgagcgatttgatgcgcccgagcgcttatcaacgtctggagctggcaaaggccgcgcgcatgggcagttacgcgccctgcgtcatctatagcagcacgcagaaccatgtgtgcccgttatgtggtggtcccaagaacgcttcatacgcattgtgtctggcatgtgatgccgaagcccaacaagctcgcgcgctgcgacccggtggcgtcagtctcgctgataccgtgcggttcggtcattacgcttgtaaaggcgagcagatgtaccgtgtcatgcagggctacaagaatgccaccaatccagcggcagccgaataccagacggatatcaagtacatcgcagccgacgccttggcggtgcactacccctgcataggccggtttaccggcagtatgccgaccgcatgggcaacgattccctccactcaatccagtcgtaattatgggaagcgccatatcctgaccgatttggtcgcaccgttcatggcccattcgaaaatcccgcagcttcatttgaacgcgaacgcagggaaagtgcataaccgtatcaatccgcagattttctcactcgcgccggaatcacaacatctggaccttgcgcatgttctgctgatcgaagattcatgggcaagtggagcgaccgtgcaatccgtcgctgcgatgttgcgccttcacggggcagcatatatcacggtgtactgcatggcccgcattattgatttgtcttggatcgagcgttccctcggcaagaacgtagccgacggataccgccaactgacttatcaaaaccgctgcccctggtcgctggatcatcacttcgtatagggtgtctgttcatgcctcgacggctgaacccctcaaaaagaaaagatgtttaccccgaatctcggtctgttagcttgtagaggaaaaggacatctcacctcgtaacaacacctagttttttagcattggcatggcggaaaactaagttgaattgctttgagtaataagcatataactacatctgcgacagtgctgtccaatccgcttcggcacaccataattctatttgatctttaccaaacaaaaaatttggagcatgctgcagataacgaaggaaagatgaggcatttcttgaataccaaaaacgtgggttagtcgaagatgaagttgctacgtaaccgattcgtgcacgagagatcattactgaaagaactctcgcttcctcatccatagcctcttcacttttagccttatagaacggtatggttccttcttcaagtcctacgataaacacccaatcaaattgctgcccttttccagcgtgcccagttaaacaatgtattcctttgcgcgttgcgatagtttcattgccttttttcgcattaatacatctcttgacttctgctattgaggatgcatcagattgtgctagccgatcaaacaaccatccacatgcatcttcgtgttcttcggataaatttccatgaaaagcggtatacctctttttgatgaaggacattaattcttcaggctctttgcatgactcgactgataattcatcacagatggatcgagatgaaaaatatgtggattatgcactacatgcaatacagaacgatattaaaaaatgtattttgactcaaaatatgaccatggaatacgatgaaaagtggagaactctgccatatctgggaaccgggtcatgtggtattgcaatcgctttatatgccttgcgaaaagcgaccggagaatgtctcttggacagagagtatgagtccctagttcgcgcatgcacctactatcagtgtgcacagggaacatacgcatatggcatgtcgggctttttgacttttctgaatgcaaaggacgataaaagcaagctggaatatcaggtaattaactcatattgcgattctcttcgactatttatcattccaagtaaaggcggtttttatgtccgaggaaatcaaggactaaaactgtcgtgtgattttctgaccggatccgctggagtcctcggatctcttgccgcactccaggggaaatggtcaggcataccgttcctgtcatggaacgattccttagatattagaaaggaggtgcacaatgggaaacaacgttcttgattttcaaatcttgactgctgacggcgaaacggatgatgcagcacgtatcagcacgtttagcttcaatggcccctgcccgggcctgccgagtaccttgacctacagcaactgctgacaagataagtgtctggcaccaattcgcaaaattgatgccagacacttttgcaatggagcacctatgaagtgtacaacactcaatcaacccatcaaattgtatgaagaattctctgacaggtatcgcagcaaggcgcaacaactttgtgaacacttaatagaggatacaaataattttcattattccagtaatcaaccgatcgaattaatgcaaattaataatgaactagtaattcatttcaaggatgatctgtcgcgatatattcatttatgcaaaaaaccgattggaagaatatctggtttttacattaattcagagaaaacaatagcggcattattaacacagatgccaaaaactgatttttatactatttcattatatgaattgaaaaagcaatccgccaatattcttctgaggcgcaacaatgttgtacctcagataagaacgacatatcattctatctattggattaataaaagcaaatcaaatcgcccgtataaactaatgatggcaaacaagtgtggcatcattgaagtatgcggcacaaatagtggatatgatatattatctttcgtttgcagtaatgatgcggttattgttataaaaatgacgcacggagacaattctcgtctgctgtttttcgatgatttcggcgaaagagacacacgctttaaggaaattacttcatcacttgccattgattcgatggagattacaaatactcttctatatgctatcgtcaatagccaacttctaattattaacttttttaccgatatacatgataggcaaatgattcagtccccccatggatttattcctaaatcattgcaaaagcgtaatgggattgtttatgtgataggacgcctatcgggcgactccgccatctggattccttctctcggacaaaatgggatatggaaagctcctccttgtggagttattagttttcttggatttcgggatagattccctgttttctgcatatcatctccaatccatcaaacgcaaattgtaacaggaaatagggaaggattcttagaggctgtatcgtccacacctaatattcactgtcgcaaaattattatccggagtagagatcaaacaaatattcccattacacttttttatagacttgacagtattctcgagcagtctcctattctattgatggcatacggatgttatggaatcgcacttgagggagcctatgaccgtttgatttcatatgtcatacagtccggcataactgttgccttctgccatattcgaggtgggggcgagtatggagaggaatggcataggcaagcgataaaaaacaataagttcatatctatcaatgattttctcgattgcactaaaggattgattgcaaataacttatgtgacgccaaacgcattggagcagcgggttcaagcgccggcgctttggttgttctttctgccgcattgcgccgcccggattatttcaaaattgttcaattatcgcacccttttttaacaccggaattgattctcacagaccccgacaatccacttacaattagcgattgggatgaattcggatatccctcatcatcttcttgctatgactcgttttcacctttggcgcaattgcggcgtcttccagctgatttttctaatcaggctcctgacatttggattactgccggcaagaatgatataaaggcgcctctcttatatacggaacaatggttgaattcatattcggctattgttccgtccgcacataattcggtgtttttgcaactgttagatg

SEQ ID NO: 694 - DNA, 7785 bp, Unknown
  R14_15m  MAG No. k141_26392
aacgcctcgccaacgaaggcaagtgattcgattccgaatcgtcggcgggagacctctccggaggcctcccgcctttttgattcgacgtgcatcgcgtgatatagtgctggtgtatttttcagctaggcgtaggcggcgtgtgggaacgctggtcgaggcccatcgtctggagttcgggcgatgaaccttccatcacatcatgattgcgataatcgttcagaccctgctcatttccgtctccgtcgccatggatgcgttcgccgtctccatcggcaaggggctcaccgtctcccgcgtaagacccggggatgccgtcagatcggcgctctggttcggcggcgcccaggccctcttcctcatactggggcattacgcggcctccgcattcagcgcgtatgtaaccgcattcgatcattggatcatcttcggtttgctggcgttcatcggcggcaacatggtgcatgaggcatacgaggaggacgcggagaacgccaaggagaccgcgcaattcgactggaagcacatgctgccgctcgccgtggcgtgcagcatcgacgccttcgccgtgggcgtgagtctggcgttcatggcaaccagcgtgccgttcgccatcctctgcatcagcgtggtgaccggcctcttctccgcggcgggcctgtacatcggacgcgccttcggcgctcactggcagaaacccgcgcagatcgcaggcggtgtggtgttgattctgatcggcgtcaaagtgctgttggagcatctgggcgtcatcgcgttctgacttgccgtcacgcatctcgtcgccacggatggccatcaatgctcgacggcaccgttccaacgcccgacgtaggattgacgtagcgattcgattatctgagaggcgtaccatgacagaaatcacctggaaggaatgcaagaacaaggttctacgcatgctgctggtccagctgtcggcctacgcattgctcatcgcggccgcggccgtcaccctgcccggcgccgaccccaccgccccccgggtcgtcgcctgcctgacgctggtcgtgttccttgtcttctggccgttgcgcggcacgatgctggatcgcgtcgtcaccttgctgttcggcgcggcctccctgatgttcgtcaccgtgccattccccgccggcaaggtgccgccggaccagaccgccgcggatggttcgacgcttccgtggtattcgtgggcgttggccatgggcctactgctggtcatgttggtggtcttctcgttcggacgtcagatggcccgcgagaagcgggaccatctcatccgcgccctgtcccacgccgtgacttcaggtgtggcggctctcgccgtggccggctggtgcttcctgcctgatttgggcgcgatgctcgccaagggcaccgttgcgggaaccgttgccctgatcatcctcatcgttttgggactggccttggccgtggcctccacgttgtgggtgcgtgacgccgatccggacccggatatccgctatccgtggatcggtaccggcctgatgccggtaatgctgatgggcgtgaccatcgccgcaaccgcactggtgctcggccgtgtcatcggttgatggacgtctgccgttccatattccgcaaacttgtaacccatgtgtccactacaagcgcgtagaataatgaaaaaccgcgcgaaagcggcataacgccgctgacgactcgtacagccacaccaagcaattgcgtaacacattgcaggataaagggggattagcgtgacggatcttacgttgatgactttcgccagcgaccccgccaccgttttgccatcactcgccctgctttctcatcgcgtccgcgtgctgccgatggatgcagccagcttggtgaagatgccggagaacaccattctgtttctggatgcacgcgatgatctggcgaccgccaaaaccttgtgccgtctcatccacgcttccggcctgtccacgccaatcgtgctggtgctgaccgaaggcggcttcaccgtggtcaactcccagtggggcattgcggatgtggtggtcgccaccgcttccccggctgaagtcgagggccgattgcgattggtctccgagcgcggcaacgctcccgcagccgcagcagccggttctcccgccgaatccaccaccacggtggaagatggccagattcgctccggcgacctcattgtggacaccaacggctataccgcctccctgcatggacgccccatcgatctggcatacaaggagttcgaactcctcaagtacttggtccagcaccccggccgcgtgttcacgcgcgcccagttgctgcaggaagtatggggctacgactactacggtggcactcgtacggtcgacgtgcatatccgtcgtctgcgcgccaagcttggcggcgaatacgaacacctcatcggcaccgtgcgcaacgtgggctaccgattcgacccgccggagacggataaggaaactgccgccgcacagcaggccgccaaagcatcctctgccgccatcggcaccgatgacgatacccccgatctcaacaccgccgcctgacagaccagcagcgctacaaaccatcaatcatcgacattacgccgcttaggtccatacgatgagagaaaccaaatccgcgcgtctcacgcgcatgcatgacgaatacgacattctgcgccaggtgattccggcacccgcttgcgcactgcatttctcgaatccgctcgaattgctgatcgccaccgtgctcagcgcccagaccaccgacaagcgtgtcaacacggtcaccccggaactgttcgccacctaccccaccgcccgtgacttggcggccgcgaacccggcccaagtcgaagacatcattcatccgctggggttctaccgttcgaaaacccagcatctcatcggactggccacggcactggacgaacggttcggcggcgtggtgccgcgcacgatggatgaactgaccagcttgccgggggtcggccgcaaaaccgcgaacgtcgtgctcggcaacgcgttcgatatccccggattcccggtcgatacgcatgtgatgcgcgtaaccggacgactgcgttggcggtcggattggcggtccgcacaccctgatcccgtgaaaatcgagaaggaaatcaccgcctgttttccgcccgaagagtggacgaatctcagccaccgactgattctgttcggccgggccacctgccacgcacgtacccccgactgcgccaactgcccgctgtccgacacctgccctagctatgcgccgcccgccggcaagagcacgtccaagcgctaactcatacctcatcatggtgaattgcggattctaggctgaatccaccgctagactgaaaaccatgcagcacagcaagcggaacaatacatggtccaagtgggggatttttctcggagtcgccgtggcactcggcgcactcgtggttgcgggatggacgttcatgcaaaaccggttccagccgggatcatccctcgatgccgatgtgaccattggcatcgacgatatgccgcaatccttggatattcggtccgattcctctgcggcagccgagcgcctgctcgtcgacaatgtgtatgagacattagtgaccgtcgatcaagacaacaagattcagccgggactggcgacaagctggaagacttccgatgacggactgaccgtcaccctgacactgcaatcgggcgtcaccttctcgaacggtcatacgttggacgcctcggacgccgtgtggtcgttgcaacagaacgtgaccaacaaggtggcggacgtcgacgaattgggcgatctgacgtcggtcgccaatccgaacgccaccacggtggtcattacgcttgccaagcccaatccgacgctgctgcgagcgctgtccggcaaactcggcattgtctacgattccgagtcgtccagtgccgattatcaacgcaaggccataggttccggaccattcaccgtggccgatttccagcctggccattccctgaagctggcgcgcagcgatacctaccatggcaccaaagcggccagcaatatcgttgaatttatgcaatactccgacgccgatgcgctcagcaaggccctgaccgacggcagtctcgatatggcggcaccggtttcggcttcgacggccaccggtttgaacggcaaggatggcctgaccgtcaaggagggggccactacgaataaggtgctgctggcctacaacaacggcatcgattcgctgctctccgacgaacaggcgcgtaaagccttccgctatcaaatcgacgcagccggcatcgcctccgcccaacccgacgcagccggagcattgggcggccccatcagcccgctggaacccggatacgaagatttgaccggactgtatccgcatgacgaaaaccaagctgggcagatgttctcctacttcggtgcgcaatatctgactacggtgaatctggtggtccccgaagaataccggtcgttggccgaaaccatcaagcagcagatcgagcggcagccgcgccccacggtgaaccttgaagtgctctccgatgaggattatgccaaacgaatcaaggacggcaaatgggaactgaccgtgatgagcatggacggcacggatgatgccggcatattcgccgaccccgattccatgttccattacgaccataccgaagcgcaacaggcctatgcggatgctcgcgccgccactaatgacgccgattatgaggcacgaatgaaggcgtacgcccggctgatcagcgaggatgcggccagtgattggctgtatacccgcaaatgcttcactgtggcgtccaccaaggtctccggctacccgacctcgatgatcaatcgccgcatgccgctggccgggttgacggtgaagtaggcaaccttcagtcacggacgggctacgcccgatagtccttggctcactatcgttcgatcgttcgtacctcgcctgcgaacagcctactgggctgtttactgtacagttcggcttgtcatgcaacgtgcataaactttggctttatgactgaaggcaaatccatcatcaacgccaacctcaccccgctgcccgacaaggtcggtgtggacggacttgaggacaagtggcgcgccgtctgggatgaagacggcacctacaaattccgcaatacccgcgaccgcaaggccgtctactccatcgacaccccgccgcccaccgtctccggttcgctgcacgtgggtcacgtgttctcttacacgcacaccgatgtgattgcgcgttacaagcgcatgcgcggctacgacgtgttctacccgatgggttgggatgacaacggcctgcctaccgagcgccgtgtgcagaactactatggcgtgcgcgtggacgtgtctctgccttacgacccggacttcaagccgccgttcgagggcactgatggcaagaagatcgacgccaaggatcaggtgccgatttcccgcaagaacttcatcgagctgtgcgagcgtctgactgctcaggatgagaagctgtttgaggccctgtggcgcaagctgggcctgtccatcgactggtcgcagacctaccacaccatcggccagcacccgcggcgtgtggctcagaaggccttcctgcgcaacctcgctcgtggcgaggcctaccagcaggacgcccccggcctgtgggacgtgaccttccagaccgcagtggcccaggccgagcttgagtcccgcgaatacccgggcttctaccacaaggtggctttccgctttgaggacggcaccccaatctacatcgagaccacccgccccgagctgctggccgcttgcacctcgctgatcgccaacccgaatgacgaacgttacaagcagtacttcggccaggaagtctactccccgctgttcaaggtcaaggtgccgattctggctcacccggccgccgaaatggacaagggtgccggcatcgccatgtgctgtacgttcggtgatgtgaccgacgtcgagtggtggcgcgatctgaagctgcccacccgcccgatcatccagcgcaacggccgtatcgtgatggacaccccggattggatcaccgacccggccggccgtgaggtctttgccgaaaccgctggcaagaccacgttctccgcccgcaagatcatcgtcgacaagctgcgcgagtccggcgatctggacggcgagccgaccccgaccaagcgtatgacgaacttctacgagaagggcgacaagccgctcgagatcgtcacctcccgccagtggtatttgaagaacggcggtaccgacgccaagctgaacgccgagcttatcgagcgcggcaaggaactcgagttccaccccgacttcatgcgcgtgcgctacgagaactgggtgcacggcctgaacggcgactggctgatttcccgccagcgcttcttcggcgtaccgttcccgctgtggtacccggtgaacgcttccggcgagccggattacgatcgcccgatcaccccgagcgaggatcgtctgccgatcgacccgaccatcgatgtgccggaaggctacgacgagtcccagcgtgatgtgcccggcggcttcaccgccgaaaaggacatcatggacacctgggccacctcttcggtgaccccgcagatcgtgacccactgggccgagccggacgaggcctccaaggccctgttcgcttccaccttcccgatggaccttcgcccgcagggtcaggacatcatccgcacctggctgttctcgactgtggaccgcgcgcacttggagaacaagtgtctgccgtgggcccatgccacgctgtccggctggattctggaccccgaccacaagaagatgtcgaagtccaagggcaacgtcgtggtgccgaacgagccgatcgagaagttcggcgcggacgccgtgcgttactgggccgccgccgctcgcctgggcctcgatgccacgtacgacatcggccagatgaagattggccgtcgactggccatcaagctgctgaacgccaccaagttcgcgctggccatcggccgtgaggacgagaaccatcacgtgggcgctgccgccgagacctcgtggaacccggccgatgtgaccgaaccgctggatcgcgccgctatggccaagctggctttggtggtgcgtcaggccaccgaggcgctggaatcctacgagcattccaaggcgctggaagtcatcgaatcctacttctggcagttctgcgacgactacatcgagctggtcaagaaccgcgcctatggcactccggacgagcacggcaatgttccgtccgagaaggctgtgaagtccgcccgcaccgctctgggtctgggcttggacgccttcgcacgtctgctggccccgtacctgccgtacgccaccgaggaagtgtggagctggatgcacgccggttccggttccgtgcatcgcgccgcctggccggtcgtggacccgtatgtcgaggccgccaccggtgcttcccccgagctgctgacttgggccggcaaggccgtggagcagctgcgtaagatcaagtccgaggccaaggtctccatgaagaccccaatcctgtctgtggcactgtccgctgcttcggaaggtgtgaacgcgattcacgccgccttgggcgatatcgcgcaggccggtcgcgtggtcggcaagttcgacttggtggccaagcacgccgaggaatccgccgccgaagacgcgcccgaaaccgaggtcgccgtcgaagccagcgagctcggtgagccgccagccaagaagccaaagcactgagcgttgcgcacaacaaca

SEQ ID NO: 695 - DNA, 3361 bp, Unknown
  R14_15m  MAG No. k141_26984
cacgcattcatcaaggaatttctcgaccttatataccgggatgatgatgctgaccaacggctcctgttccatgcctccagcgtagcgccgtcgtgcgaacgcggcggcgctgcgggttcgcggaccgcgaaacccttagaagtcccagtcgtcgtcatcggtttcttcggctttgcccatcacgtaggaggagccggagccggagaagaagtcgtggttttcgtcggcgttcgggctcagggcggccaggatcgcggggttcacatcgcaaatctcagccgggaacaaagccgggtagccgaggttcatcagcgccttgttaccgttgtaccgcaggaacttctcgacgtcatcggtcaggcccacgcggtcgtacagcgactgggtgtactccacttcgttgtcgtacagctcgttgagcaggtcgtacgtgtagtcctgcagatccaggcgctcggcatcgctcagctgggcgatgcccttctggtacttgtagccgatgtagtagccgtggacggcctcatcgcgaatgatcagacgaatcacgtcggcggtgttcgtcagcttggcgtgcgcggagaagtacatcggcagatagaagccggagtagaagaggaaggattcgagcagggtggaggccaccttgcgcttgtacgggttgtcgccctcgtagtagtcgagcacgatttccgccttcttctgcagaaactcgttgttctcgctccagtcgaatgcggcatcgatctgttcggtggagcacagggtggagaagatggacgagtagcttttggcgtgcacggattccatgaaggcgatgttggtgtacacggcctcctcgtgcggggtgagcgcgtccggaatcaggctcacggcaccgaccgtgccctggatggtgtcaagcagggtcaggccggtgaagacgcgcatggtgagcgtgtgctcgtcctcggtcatcttctgccagctggggatgtcgttggagacggggactttttcgggcagccagaagttgccggtcaggcggtcccagacctcaaggtctttctcatcttcgaggcggttccagttgattgcggagacgcggtcgatgagtttcagcggtttgcgcggaatggaaatcggtgccatgagtgttccttattactcgttgtcgttgtcgttgtcgttatcgtcgttggacttgttttcgaactcctccggcgcggtcagccggagcagtgctctatagatggttcgtgacattgttggttccttagatggtggagcccccccctcagtccgcttcgcggccagctcccctctctgaggggagctgtcggcgttagccgagtgaggggagtaacaacggctctctggttgttcaatgcgtgcggagaccgccgtctgaggccgaaggcgtacgaaggtacgtcgagtgccgaagaaaggcggtatacgctccctcgaacgatcagagcatgcaggagacgcagccttggacttcagtgccttccagggcttgctggcggatgcggatgtagtagagggttttgatgcccttgcgccaggcgtagatctgggccttattgaggtcgcgggtggtggcggtgtccgggaagaacagcgtcagcgacagtccctgatccacgtgctgggtggcctcggcgtacgtgtcgacgatggccttccagccgatctcgtaggcgtccttgtagtacccgaggttgtcgttggtcatgtaggcggccgggtagtacacgcgcccgatcttgccttccttgcgaatctcgatcttggaggcgatcgggtgaatcgagctcgtggaatggttgatgtacgagatcgagccggtgggcggcacggcctgcaggttctggttgtaaatgccgtccttcagaatcgcgtcgcgcagggcctcccagtcggccgcagtcgggatcgcgatgccgtactgttcgaacagcgcacggacccgttcggtgcgcggagtgagcgaacgacgaccatcggtgtacttgtcgaagtagttgccctggccggccggcttggcgtagtcgctcgtagcgaagctggcgaacgtgcggccatgctccacggcgagcgcgtgcgaggcacggtaggcgtggtaggccacggtcatgaagtacatgtcggtgaagtcgaggccctcttcagaaccgtactggatgccttcgcgggccaggaagccgtgcaggttcatctggccgagaccgatggcgtggccctcctcattggcgcggcgaatcgaaggcaccgcgttgatgctggtgtgctcggccaccgaggtgagtgcgcggatcgccgtctccaccgtgtggcccaagccgccatccatcgccttggcgatgttgagcgaacccagattgcaggagatgtcgcggccgacatgcgcatacgtgaggtcctcgttgtatgcgctcggctcctgaacctgcaggatttccgagcacaggttggacatggtcacgcgaccttcgatcgggttcgcgcggttgaccgtgtcctcgaacacgatgtacgggtagccggattcgaactgcagttcggcgatggtggtgaagaacttacgggcgtcgatgtaggtcttcttgatgcggtcgtcggccaccatctcgtcataatgctcggtaacggagatgtcggcgaacggcttgccgtacacgcgctccacgtcgtacgggctgaacagggccatctgggccttctgtttggccagttcgaacgtgatgtccggaatcaccacgccaagagccagcgacttgatgcggatcttctcgtccgcgttctctcgcttggtatccaggaagcgcaggatatcagggtggtgggcgttgaggtacaccgcgcccgcgccctgacgtgcgccgagctggttggcataggagaaggagtcctccagcagcttcatgaccggaatcacgccgctggactggttctcgatgtgcttgatcggggcgccgagctcgcgcaggttgctcagcagcagggccacgccaccgccgcgcttggagagctggagggccgcgttgatgccgcgcgaaatcgactccatgttgtcttcgatgcgcaccaggaagcagctgaccggttcgccacgctgggccttgccgaggttcaggaaggtcggggtggcgggctggaagcggccggcaagcatttcgtcggcgtattcgatggcctgctgctcattgccggcggcgagctccagggccacagcggcgcaacgctgcgggaagtcctcaagatagaggcgaccatcgaacgtcttgagcgcgtaggacgtgtagaacttgaacgcaccaaggaaagtgccgaactcaaagccggcggattccacgtgctcgtagatgcggtcgaggaa

SEQ ID NO: 696 - DNA, 13711 bp, Unknown
  R14_15m  MAG No. k141_28514
atgcgatgcctgacccttgggcgtgttgatgtcgaacagctgcggaacctcaagctcccccttctgccgcccattggcgtcgaagatcctgattgtcgggtgttcggcctgattcctgcccgcagggggaatgccttccgagctgatggcgaaatcgccgtcgggcagcaccgctatgccctcgttgtccgtcgtgttgccgttatagggagtcccgttaacatcggtaaacgtcactggatcacgcgtgatggacgggttgtgcaggtccttgccgaggaaccacacccgggattcgtcactcccatggttgtcggattgcgccacatatgaatccgcggttttgtcccacgtgagacccgacagtcccccgactcgaatccccttgtaatcgagcttgtccagcgcatcgttgtaggcaacggccttgacctgattctgtgcgccaatatcagtcgtgccctcggctgataccgctggaatcatgacggatgcgaacagcatgcatgtcgtcgccgtcaccgcggctattctcttgttcatggttttcccttccgaacgttaccgttcacatggccatgctggctctgcaaggtatcgggaaggggaataatcacgcgtctgcagatgaaccatacatgaaaagacggcgacatcgttgtccacctgtatggaattcgcctgtatgggtccctggaatacgaaagtgggtcctgaaacctcaagcaaggttccaggacccactcagaacgctagttcaagcgtgtctagttcttccaagcgtgtctagttcttcgctgatggaaatcaggcgaggatcttggtgacacggcccgagccgacggtgtggccgccttcacgcacagcgaaggtcaggccctcctccatggcgatgggctgaatcagctcaacggtgaaggtggcgtggtcgccgggctgaaccatctcgacgccttccggcagctcgatgacgccggtaacgtcggtggtgcggaagtagaactgcggacggtagttggagaagaacggcgagtgacggccgccttcgtccttggtcagcacgtagacttcgccctcgaacttggtgtgcggggtgacggagcccggcttggccacgacctggccacgctcgacatcctcacggccgaggccacgcagcagcagaccggtgttgtcgccagcctcgcaggcgtccatggtcttgtggaaggtctcgatggaggtgacggtggtctgctgggtcggacggataccaacgatctcgaccggggtgttgacggccagctggccacgctcgacacgaccggtgacgacggtaccacggccggagatggtgaagacgtcctcgatcggcatcaggaacggcttgtccaggtcgtgaaccggggtcgggatgtagtcatcgacggcggccatgaggtccttgacggactggacccacttctcgtggtccggagcgtcgtcgtgcagggcgccgtaggcggaggtgtggatgaccgggcagtcgcgatcgaagccgttctcgtcgaggaggtcacggacctcttcttcgacgagctcgatgagctcttcatcgtcgaccatgtcgcacttgttgagggcgacgaggatcttcgggacgccgacctgacgggcgagcagcacgtgctcgcgggtctgggccatcgggccgtcggtggcggccacaacgaggatggcgccatccatctgggcggcaccggtgatcatgttcttcacgaagtcggcgtggcccgggcagtcgacgtgagcgtagtgacgcttctcggtctggtactcgatgtgggcgatgttgatggtgataccgcgggcggcctcttccggagcagaatcgatctggttgaagtcgtactccgggttgacatccgggaactcctcgtgcagcaccttggagatggcagcagtcagggtagtcttaccgtgatcgacgtggccgatggtaccaatgttaacgtgcggcttagtacgctcgtacttttcctttgccattacttttgtcctcctggacgtctcgtgagtttcctgcgccctttcgcacagggactcgcttattctactgggtttctgggttatgtgccactttgaagagccagaacccagtcagcggtatacgatactaccgctgactggagacaccggccacttcatgatgtggcgcgtgtcactcgccgcgctgggccttgatgatctcctcggagacgctcttcggcacctcgtcgtaggagtccatctccatggtgaacatggcgcggccctgggtcttggaacgcaggtcgccgatgtagccgaacatctcggacagcgggaccttggcgtcgatgaccttgacgccgacaccgtcggtcatggactggatgttgccacggcgctggttcagatcgccgatgacttcgcccatgtactcttccggcgtacggacttcgaccttcatgatcggttcgagaatgaccggcttggccttcggggcggcttccttgaagcacatggaacctgcgagcttgaaggccatttcggaggaatcgaccgggtgcatctggccgtcggtgacggtggccttgacgcccacgaccgggaagccggcgagaacaccggactccatggcctccttgacaccggcctcgatggggccgatgaattcggcggagatgtggccgccggtgaccttgttctcgaactcgaaggtcttgccctcggtggtgtcgagcggctcgaagttcatcaggacctttgcgaactggccggaaccaccggtctgcttcttgtgggtgtagccctggtccatgacggccttgcggatggtctcgcggtaggcgacctgcggcttgccctggttgcactcaaccttgaactcgcggcgcatacggtcgacgatgatgtcgagctggagctcgcccatgccggcgatcagggtctggccggactcttcgtcggtcgtgacctggaaggtcggatcctcttcggccagcttggacagggcgatgcccatcttctcctggtcggccttggtcttcggctcgacggccacctgaatcaccggatccgggaaggtcatggagtcgagggtgatcgggtcgttgatggagcacagggtgtcgccggtggtgacgttcttcaggcccacgaaggtgtagatgttgccggcgtcggcgcggtccatcgggttttccttatcggcgtgcatctggaagatcttgccgatgcgttccttcttctcgcgggtggagtcgagcacggagtcgcccggcacgacggagccggagtagacgcgcacgaacacgagcttgccgtagaacgggtgggtggagatcttgaagaccagagccgcgaacggatcggacttgaccgggtgacggtcgatctcgacggactcgtcgccgggcttgtagcccttgatggccggcacatcctcaggggacggcaggtagtcgacgacaccgtccagcatcggctgaacgcccttgtccttgaaggcggagccgcagaagaccgggaaggcttccttggcgatggtgagcttgcgcacgccggcgcggatgtcttccttggacaggtcgccgtcctcgaagaacttgttcatgagttcgtcgtcggcttcggcggcggcttccacgagcttctcgtggtactcctgggccttgtccttgagatcgtccgggatctcggtggtgtcgtacttggcgccgagctcctcggtgccgttccacacgtaggcctgcatctcgaccaggtcgacgacgccggtgaagtcgttctcggcgccgatcggcagctgcatcacgatcggagcggcgcccagcttctccttgatggtgtcgacggagtagtagaagttcgcgcccagcttgtccattttgttgatgaagcagatgcgcggaacgccgtacttgtcagcctgacgccacacggtctcggactgcggctccacaccttccttgccgtcgaacacggcaacggcaccatcgagcacacgcagggagcgctccacctcggccgtgaagtccacgtggccaggggtatcgatgatgttgatctggaacttgtccttggtgtcgtgggactgacggctccagaagcaggtggtagcagcggactggatggtgataccacgttcctgctcctgcgccatgaagtccatggtggaggcaccgtcgtgggtctcgccgatcttgtagttcttaccggtgtagaacagaatacgctcggtagtggtggtcttgccggcatcgatgtgggccatgatgccgatattgcggacgtcgtggaggtccgaaatctcttcagccatcgtttttccttagctttcttagggggcttaagactaccagcggtagtgagcgaaggccttgttggcctcagccatcttgtgggtgtcctcgcgacgcttgacggaagcgccgagaccgttggaggcatcgaggatctcgttggcgagacgctcggccatggtcttctcacgacgggcgcgggagaaatcggtcagccagcgcagcgacagggtgttggcgcggttcggcttgacctcgaccggcacctggtaggtagcgccaccgacacggcgggagcgaacctcgagggacggacggatgttgtccagggcgcgcttgagcacagccaccggctcctggtcggacttctccttgaccatatcgagcgcggagtacacgatgtcctcggcgatcgacttcttgccgtcaagcagaatcttgttgatgagctgcgccaccacggtggaaccgtagatcggatcgggcagcacgacgtgcttcttggaaggtcccttacgtgacatatctcttacttcgccttctttgctccatacagggaacgaccctgcttacggtccttgacaccctgggtatcgagcgcgccacgcacgatgtggtaacgcacacccgggagatccttcacacggccgccgcgcacgagcacgatggagtgctcctgcaggttgtggccctcgcccggaatgtaggcggtgacttcgatgcccgaggacaggcgcacacgagcgaccttacgcagagccgagttcggcttcttcggggtggtggtgtagacacgggtgcacacgccgcgacgcagcgggctgcccttcagggccaaagtcttggacttcttcggctttgcctgacgtcccttacggacgagctgttcaatagtaggcaacttgaattctccgattcagtggtttctcttgcttttgtgtgaccgccgcactgcgcccacacttttcagcacactcgcttggcatccgcctgttggcgacacccgacgaatcggaaaagatagcccagtccaccggcccgatggccttcgcccctcccgtcggcgcattactacgtgcgatcagcggtttgaaggatatcccagcatgctcgcctgttacataaggcgtgctgctggcacacacgaatatctatactacgattccgccggacaacgacgcgccgggcctcgactcactagcttgggacaatccgcgccctgtacttctcccctcctcccaacgcaatattcccgggaatgcgtcgcacaacacacgcacacacgccctcccaacgcaatattcccgggaatgcgtcgcaaaaaagcgaacgccacacagcaggtgcccccgcggagactatgtcacacgggggcaccgccaaggaggttacattatgtttcttttcaccacatgccgcttctgtgttatctgtttccagcacatcctcgtgctcttccatatccgatgggaacctctagcgacccggcctctttgccgtatcaccttgccgctttctgcattactaattatagcaaaaccgccctcgcgaaacgcccgatacatcaatcgggagtaagcgggagcggctatgttatgcgaggtaggaaaggtgagtgaccgactgactggagtcgtgccttacccgacctttctcaccatctcaggatttcaggcagcgaccttggcggccttgtcggcgtcgaacgggtgggccacggaaacggtgctcttggcggagcccttctcgccgttgtcagaatcccaatgaatctcgtgccggtcgtcatggttgcgccaccagctggacaggatggagccggagatgttgtgccacacggagaagaaggtggacggcacggcggcgagcgggttggacgcgaaggaggtcagggccagcgtggcgcccagggcggagtcctgcatgccgacctcgaacgtgatggccttctgctgcgcgtagcggaagcccttcgggtagatcctgtacatcagcttcgagaagccgaagcccagcgagtagccgcacaggttgtgcaggatgaccaccggaatggccatcagggagctggccacgaacagcttcggaccgttggcggcgacgaccacgccgatgatgagcaggatggccacctgggagacgatcggcagggccaccgtgaccttctcgatcttcttgccgaagatcatgtggcagatcacgccgagggcgatcgggaaaagcaccaccttgacggcattgaggaacagggattcgaccggcacgctcacatactgggaggccagcagctgcatcagcagcggaatcatgaacggggcgcacagggtggagaggatgccgatggagacatcgagggccacgtcaccacgggacaggtagctcatcacgttggaggaggtgccggacgggcagcagccgacgagaatcacgcccacggccagcgggccggacaggtggaagatcgcgcacagggccacggcgacgagcggcatgatgacgaagtgggccaccgtgccgacgatgaccatcatcggctgggtgaggatgcgcttgaaatcgtccagcgtcagggtcagccccatgccgaacagcacgatgcccagcatgtagccggtgtacgccttgccccacaggctggcggccggcacgaagtagttgaagacggcccagacgatgacgatgaccgtaaaccacttggtcagccaatctgcaaaggctttaaccttttccatggtgtttctcttcccttgttcggtgtaggtaacatcgcatgaaactaggcgggtcgcggttgatatgaaacataatgctcacattgtgaacgctcacgtaatcatctctgcaatccccagccgcaccatcacgccgttgtgtgccctgacttttcatcaatcgccacacaagacccactcgtccacatcccaccatttgagacagcccacagcctggccccaagaatgaaaccaaccgcttgattccatcgcgacacaccgatgagcacacatccgcaaagttgtgtatagtattcacctgttgtgcgaattcagcttgctgaatacgacaccatggtggccatagctcagttggtagagcatctgattgtggttcagaaggtcgcgcgttcgagccgcgttggccaccccagtaaaacccttccgttcgcggaagggttttgtttttctccatgaattccccgctcctgccgggaaccgccacgttgtacactcgggcatatccaattcatctaacacaaggacaaaaggtccgtcatgctgtcttttgagaacgattactcccgcgccgcccatcccgcagtgcttgaagccgtggctgaagccaacaaccatctgtattcgggctacgggtccgacgaactgagcgatcaggccaaggccaagatccgcgaggcctgcggccagccggacgcggatgtgtggttcctcgtcggcggcacgcagaccaaccaggtcgtcatcgacaccatcaccccggcgtatgcaggcgtggtcgcggtcgcctccggccatccgaacgtgcacgaggccggcgccatcgagttctccggccacaaggtgcttacgattccccaacacaacggcaaaatggatccaaccgaactggacgagttctgcaagaccttctatgcggacggcaactacgagcacatggtgttccctggatccgtgtacgtctcgcaaagcaccgaatatggcaccatctactccaaagccgaactgcaggctatcgccgatgtggcgcataagtacgatatgccgctgttcgtggatggcgcgcgactcggctacgcgctgaccgccactggttccgacatgacgctcacggatctggcgaccatcgccgacgtgttctacatcggcggtaccaaggtgggtgcgctgttcggcgaggccgtggtgtttaccaagcacaacacgccgaagcacttcctgacccgcatcaagcagcacggcgccttgctggccaagggcttcgtgctgggcgcgcagtttgacgccttattcaccgacaatctgtacttcaagatcgcccgcaacgccaatgaggcggccgatcgtattcgcgaggccctgcgcgccaagggctacatgctcactttcgaagcgcccaccaaccagattttcgtgacgatggatcagccgaccatcgaccgtctggagcgcgaggtcaagctcggcttcaccgagaaggccgacgacacgcataccgtgatgcgcatctgcaccagctgggccaccacgcatgaagaagtcgatcagcttattgagttgttgtaaaacccttcgctaatccctccctccgtcatcgcttcgcgatgccacctccctcatcagagggaggttttttcgtagctcccgccgatgagggagctggccgccgcaggcggactgagggaaaacctctccgcaaacgagaaggctcctactcccctatcgccttgcgttccatatccacgaacttgtggaccgaggcttccacggaataatgcgccttggtgtattcggcgtatttctcgccccattcggcgcgctcggcctgatgtgcgatccaccaatcgatgcgtcgggccagcagggccgcgtcccgcacggggaacaacgactcgtcgatcagcgcgaactggccggccgccgacagttcggacgcggcgatcaccggtaccaatccgcacgccatcgcctcgatcacgctcaccgattcgatgtcggcaatcgaacaatgcacgaacaaatcgcccgaacgcaacaaatcgggcatatcggcgtgcttgtggaatccgatatcggccttgcgcgccagcaaacgcccggcgcggaacttgagatactgcttgagcggcccagtaccggcgatcaccagctgaatatcgccggcgtgccgggacatcgacaccgccttgatcagcgtaatctgatctttctcgctggccagtcggccggaagcgacgacacggaacggcacgggagccgaggcatccggatcggccggcttcttcggcgaatacaccggtgaataaccattggaaatcacgtgcaacttggctttatacccgtgcgcgcgcaacaggctcgcggtcatttcggtgggcacatggatgtggtcaatgtgcttgtacagccagtgcttgaacagccagtacaggaagctggaaataccgggaatgcgacgtagcgggccggccgaatacagcacgttctccggctgcaggtggaatccggcagtcacgggaatgcccatttggtgggcgactttagcggcacgacggccgaatttgaacggcatatagatatgcaccacatccacgccttggaaagcggtgcggaacaacgtgtcgctgggttcggcgaattgcatgagctgcttggcggccacccacgagacgagtggcaccttattcacacgcgccggatattcgggcgcccctataccgacaagcctcacatgatggccttgccgctccaattccgcagcccattgcaaggccgaattggaggtgccgttgccctgattgcccaccgtatcgaccacaagagcgatagtcagcggacgatcaatgctctcttcaatcccgttttcgcgcattgcctcatcctaaaccaccgcgcggcaatagcgtcggccgcgctgcctgaacgcgtgtgaaatggtatgggctgccgcattttgcctaatattgaatcacgcgcttcgcagcgcacgatcgacgcgggccacgacctggaacaactcggcggtgtgcttgagcagactgatgcgcacccagccttcgcccacctgaccgaagcagacccccggcatcagcgccacgccggccgtgttgagcagccaatccacgaatgcggcggaatcgccatgccaccgcgccagccggccaccatatacattttggacagcgagccaagttccagcgccacgtccagcgcgcccggagtctccagcaggctcagcgagcgtacgtcaccgaattcgagccccgcataggcggaatcgttaagtacttcgactattgccagcgtgccggcttgtagcctgaaacgccggaaccgacacgccgctattcgctatatgtcgcatcccaaaatgttggcccgaccgccccatacttcatcggccggtaattgctaaggtacgacggctctgttacacacgcaatggcgtgtctatacgcagtatttatggcgggttacgggcatctgaatcttcatggggcggcaacctgcccatggggcggtatttaccccatggggcggtgaaattcccatggggcggtaaggcaaaacggcttaattccgcggtttcacaaaaccaacaaaccgccccatggactcattaccgccccatggggaatttaccgccccatgaagccggatattccgcccgtaattttgccgcgcgaggcactccgctcacgcgacataccgaaatcatcgcgtcatggcagaatgtgggtatgactgagaacgccgtgaatactgccgtgacttccgcctcctctcccgcaattcccgccgagacttccgccgtctcccccgcaactcgcgcagccaaccacccgctgggcacaccgctgggcaagcaccccacccgtgtgctgtttttgggcgctggcgagctgggcaaggaggtcacacttgaactcatgcgactgggcgcatgggtgtgtgctgctgactgctatgccggcgctccggcccagcaggtggcgcatgaataccgcgcgttggatatggcgaatgccgccgaattgcaggcattgttcgatgaaatcaagccggacatcatcgtgcccgaggtagaggccatcgccaccgatgtgctggccggtgctgcggccgcgggcgcccaggtggtgccgagcgccgaaatcgccgcgatctgcatggaccgcgagcgcctgcgcgtactggcccacgaagaattgggcttgccgactacaccgtatcgttttgccggctcgctggaagagctgcgcgccggagcttcggaagtcggctatccgtgcgtggtcaagccggtgatgagctcgtctggtcacggccagtcggtggtgcgttccgccgacgccatcgatgccgcttggaccgaagcgcaggagggccgccgcgccgccgatgagggcgatgtgtcgcgcgtgatcgttgaggcgcttgccccgctggagcgtgagctgacggtactgaccgtttcttcgtccgccggcattgtgacgtgcgcgccgatcggccaacgtcaggagtccggcgattaccgcgagtcctggcagccggctaccgagcccgatggcgaggccgagcgggcgcgcgacatcgcacgtaccgccgttgaaggcttggtggccaaggctcaggcgaccggcgaaaccggttggggcgtattcggcgtggagctgttcgtgctcaccgacggctcgattctgttcaacgaggtctccccccgtccgcacgataccggtatggtgacgatgacctcccagcgtctgagcgagttcgcgctgcacgcccgcgcgattctcggcctgccgatcacccccgagcatgtggcgctcacgattccggccggctcggtggcggcaagccatgcgattgtggtggccggcgacggtgaggccgagttcaccgatgtggccgctgctctggccgaacccggcacggacctgcgcatttttgccaagcccgaagtgcatggccaccgtcgtatggccgtggcactggccgtcggcgagtccgaagccgacgcccgtgccaaggccggccgtgttgccgatgcgttgacgattaccgtggagtagtccacggcctgatcagctcagcatggcctcaatattattgccgtccgggtcgtggatgaacgcggcgtaatacgtggggccatagttcgggcgcgggcccggagcgccgttgtcggtaccgccagaggcgagaccggcctcatggaacgccttgacggcggcctcatccttggcgcggaacgccacatgagacggcaccaccgggttgccgtccttcggagactccaaccaaacgctgtcaccatcctcgtcattggcaaagcacacggcggtcgggtacgccactttcttgacgtagcccagcggggccagcagcttctcgtagaaatccgcgtactgtgcggcgtcggaaacaaacaaaccaatatgatcaatcatgacgaacctccttgcaccatttcgtcactcccattatcgtgcgtgcgcggccgtacactcacgttttgtctattgacgaacatctgagtgtccgcgtgcttgcgtagatactgttactccgaacgactatgcgaccggcaatgagtcgattgtcggaccaataccgtccgcctccgccatcccaacagcgtatggccgttcgatgcagcgacgtatgatgcgctggccgcatcgtagcgtcatgccgagtgttgttgtagccctcgattggtacccttttaccgttagttcacccagaaattccactcctgaaaggtgagtcatggagaagctggaaaagctctacgagggcaaggccaagcaactgtacgcaaccgacgatcccgaggttctgtgggtcgaatacaagaacaccgccaccgctggcgatggtgaaaagaaggaagacttcaccggcaagggccgcctgaacaacctcatcaccaccatcatcttcgacctgctcaagaagcgcggcatcgacagccatctcatcaagcgagtgaacgacaccggccagctggtacgcaaggtgaacatgttcccgttggagatcgtgctgcgcaacgtggccgccggccacttctgctcccgtctgggcgtggaggaaggcctgccgctcaaggagccggtgcttgagtacttcctgaagaacgacgatctgcacgatccgttcgtcaacgacgatgacctggtggccctcgacgtatgcactcgcgaggatctcgccgagatcgccccgctggcccgcaagatcaacgaggccctgatcgagatcttcgccaagatcgacgtcaagctggtcgacttcaagatcgaaatgggccgcgccaccgacggcacgctgctgttggccgacgagatcaccccggattcctgccgtctgtgggaccagaaggaccactccggcaaggtcgagcaccttgacaaggacctgttccgccgtggtctcggcagcatcatcccggcctacgaagagatcgaggagcgcctcgccgaactcgccaagtccgaaggcatcgaagtcgccgaataagtcgtttaggtgcaggtagcagaacatacagctggctcccctctctgaggggagctgtcgccgataggcgactgaggggaggtcaagacgttcaccgccatgacaactcccctcagtcagctccgctgacagctcccctcggagaggggagccaagttcttttaccgc

SEQ ID NO: 697 - DNA, 2770 bp, Unknown
  R14_15m  MAG No. k141_28577
aacgagaacgaatcctaccggccgtaccggccggagcgtctcaagacggggccgtggaccggccggtgccacatcgccggccccgcgcaccggaaggccggacgccgccgcgccaggaccggcgtcacgcacgacaacggcaccgagttcgcccgccacgcggaactgcgcgaacggctcggcatggccacctacttcaccgccccgtacccgtcgtgccggcgcggcggcaacgagaaccgcaacggcgcgatccgccgctacctgcccaagcgcacacgcgtcgacccgtccatggccgacgagatacaggccatcgtggacgagaccgacaaccgtcccatgcgcgtgctcggctaccgcaccccggccgaggcattcgccgacgaactactatcattaaccgaacaacaaggatgttgcacttctaaatagacaacggggtgactaacgaagagacggcggtgttctacactggtagccatgtctatcgcatcagtagaggcccaaaaacagctcgaccgtatcgtggctctcggctatccggatgtggcggatatttccgccgccgcattccgctcgctggcccgacccctgatcggggcgctcgagcattccgatttgggatcgaacatcctgctggtgcccacgcgcgaactggtttcgcctgagtcactgatcgcacgaacctccatcaatcgcatggccggcttcaccaccatgccgccgcgtgacatcgccagcttcctgcctcaagacggcttcatgccgccggaaggcccgttctatctggtcgtcaatccgcacaccggcacgtgctatatcaatcgcgagccggacgtggcccgcaagcttatcgactccgatgaacgcctgccgctcaccctcgaggaaggcttggccatcgccacccagcacccggagtggctgctggaaaagaacggcttcaatctgctcggctcacgctccgcagacggccgcgtgccgagcatctggatgagccagaacgcaccgcgactgggagctgtctggcccaattcccgccatacctggctgggcaacgcgtattgcacggcccgtcgcggggtgagtctgttccgttgactccgccagtgtgcgttttctctgtacaatgaaaggcatattgcatcatttcatcagagagaagacgcgatgaactgtgataggtgcggtgctgccaatgacgataggtcccgtttctgcacggaatgcggtgctccgctggcaccgaaacttgccgtgggacacaatacggtcactgatgttccgcctgtgccgatgccacccgccggtcccattcccggccccggtctcagctctagcctcggcccagcgtcgtctgcgcccgccactatcgcggtaccgcagacgccggtaccgggccataagcgtcgccaaggccgctgcggccgttaaagatatgggtgtgccgatttatgccaagcgagtagccgcaacatccaaggccgatacgaagaaagtcgtgtatacctacccggctgggggcagccagtggacgataatggtgcgatttatcttggtatcccggatccctcagtcgagggcatgccggccgacgttatcggtatggataaggatgaggcgaaaaccgcagtagaaaacgcatcgaacaacaagatcgaggttattctcgagccgcgattttccgccaagaaggattttggcaaaatcgtagcttccaattacatttttggtgcgccgtttgaggcgagcaatgaggaaaatgattataaaatattgcaaccgatacgtctgtactacggtgtgggagccgacaacactgaagatgtggtgaccaccggttcaggtagtgattatgatttcgacccgcacgcggattatgccagcactagcaagagtgacaggagtttgccgtatatctcggctgcgggcgaatggcgtgttacgggcacctattgcaaggatggtttcttacctggctcgggtggatgcatctcgctgatttcgaagggtcaagacggaatgaaatacgggtccggttacccgtatttggtgcgcaacggcgatgagtccaatggcatatggaacgatcgggtcacactgtgcacgcccaccggagacattggcgggtgcattctgcactacaaggatggttcgattcccgataatgaaaccaatatgcgcaaccacttgttggccaaacagtggggcatgttcgagatgtaccgtggctacggatggccggtatgcgacggcacggtctaccgaggctatggggagacggaagggtgtgaccatggtcaatatgtgaggactgatgatatccctgatggtcagcaatccggtgccacctacgaaatggatgacttctacgtttacttcccggtgggatcgaagatcagcaaactcgaggattccgactatttctccaacaaggcgctggctgcggcgaacaaggcggggaagccagacaccgaccggccgttcttcatcatgcgcgaccccaagggatacaagaccacaagcgtcgaagcatacaagaacggcgagcaaaccaccaatccgtttgtacccggtataccgatgagcggtggatacaacccgctagtgaagatggatgtggctcccagcgccgatgcgtcgtctgaagactcggccattgccaatacgtcgcagtcgagtaagaagttcgttgccgcaggcctgtatctgccggtgtatcttgcctctcaaggcaacggcaatgcggaaggattggcaaatacga

SEQ ID NO: 698 - DNA, 22813 bp, Unknown
  R14_15m  MAG No. k141_29510
cgatcggtttcgacggtgacctgttcgctgcagggaagcgtgccgagaacgccgggtccgctcgtggatgaccccggcaaaagaataagtgctaaatctaaccgcactgagttcgctctcgctgcctgatttttagtcaggattaaccagtgagcagccgctccgttcactcctcctcgtctttgggaggatgctgagcgtcgtttagaagacttgctgatgcagttgagcctcagggctgcatcgggactttaactgcggatatgctcgccatcagttgtctgcgacatcgatgggggcagaaaaatcgccaacttggccagcagactacgcacgtagaagactgtgggctcggtcatcggaccggggttcaattccccgcgcctccaccaatccgtttcggcggaaacaagccgcttggccttgcgggagtagggctgagcggcttttcttattcccgccgattccctcgtattctctcggtttcacgggataatgtgggcaaaatgtgggcaaaaatcgagcccgcgaagccctctgccacaacgcgagaacggccccgaccggcaagtaggccgactcgggttgagtcgtctgcgatgccggacggggccgaactgtgcgtggtggtcatgcggcgaggtcgaggcgctgtttgatggcgctgacgccgatgagcgcgccggcgaggatgccgagcgcgttgagcgtggtcactatcgcgtccacgtgagtccagccccatgcggggtcgaccgtactgacgaacagggcgagtgcgggcaggacgatgaggcccaaccatttgaggatgtcgtagacgcggctggggattgcgcggttggcttcgatccgacgacctgcggttttggagaccgccgctctaccagctgagctacgcgcataggcggtcatgccggttgattgccatggcacatgaccattgggtggatatgagtaaagcccctgaaccggttgattcagaggctttcacactaatcctgatacggagtatgccacggggtggattcaccctactcccgcttgtgttttgtttttcaggcggcttggatggtgaggcgtccgccgagggcgtggattaccttggcgatggtctggaagctggggttgccgtccttactgaggctcttgtagaggctttcgcgccccacgcccgcgtccttggcgatctgggtcatgccccgggccttggcgacgttgccgagcgcggcctgcatgagtgcggggtcgtcgtattcggctatggcgttgaggtaggcgatgatgtcctgttcgttttcgaggtattcgctggtgtcgtagtcggtgaattcggtgctcattgtcgttgttccttgtagtcgttgaggatgtcgtgggcttgtctgatgtcggtctgctgggtgcttttgtcgccgcctgcgagcagcagcatgagcacgttgccctgcatggcgaagtagacgcggtatccggccccggtgtggaaccgcatctcgctgaccgggcctcccgcgggtttgatgtcgccgaatggcctgcctgcgagcttgcaggcatcgagccgggcttggatggaggccttcgctttgtggtccctgagtttcttgaaccacttgcggtattcggcggattgcttgatttccatacctctattgtatcctacagactacatcatgtcaagccgaacggccgctggggcccatagccaacgcaagaatctcccgtatgttgaactcccagtagccgtcatcgacgggtctcgagctggggagtttgccccggttgagccagttgctgatccgcttgcggctgacctcgtacccgtagtttcccttgagccattggctcatgcctgccggtgtcttggtcaggtgtattgcctcggcctcggcttggctttgctcgcgcagctcctgcacgttgatgggattgccgcacctgcacaggcgcagcgcctcgcccttcgcggccatcacttcgcgtctgcattcggggcagacgccgattatcctgcgggtgcgcggcctgcggtcaaccttggcagagcgtccatggtgcctcgacctgctggctgccgcagtattggcatggttcggtggtgatgactgcacacgttgtactgtagggaaccatgaaagtcgtattgcaacgagtatccgaagcgtccgtggacgtggtcaatgaattgggcacgctggatcccacgttcgagccgcagcagattggcccgggattcatgattctggtgggcgtcaccgatgaggacggcgacaagcagatcgcctggctggcccataagattctgaatctcagggtgttcgaggatgcgcagggcaagatgaaccgttcgatccaggacatcggcggggagattctctccatctcgcagttcacgctgttcgccgacgtgcacaagggcaatcgcccgagcttcatcaaggccggcaagcccgagcatgccgatttcatgtggatcaagttcgacgaggcgttgcgctccgggggagtgccggtgaaggaaggtcgtttcggtgcgcatatgcgggtcggactggtcaatgacgggccggtgaccatcgtcatcgacaccgagcgtgacatgcctgacggaacacgctgaattgcgatagtaatttgacatcatatcccgttccctccaatatgttactaaagcgctttagtcttctgcgggcgagggcgcatgtcgatatgtttcccatgaacgggcagcacaatgatgtggccgcacaagcggcagagataaggggagtgaacagcagatgttcctgaaacctgaacagcaactggagcggtgcaagcgcatagtgcgccagcgcgtggaccctcatatccacccatcgatcgcacagcttgcggtggagtcctttgacattcccggagagccgatgcccactgacgagttcttcgagaagctcaatcgaggtgacatcgacttcaagccgtttacgctcggcggtgaatggggcaccacatggggcacagtctggttccgcctgaccggtaccgtgccggccggctacccgaaaggcaagccgctggagctcatcctcgacctcggctggtacccgcactcctgcggcggccatatcgagggcctcgtctaccgtgccgacggcaccgccatcaaagccgtacacccgctcaactattgggtgccgttcatggatgctgagggcaacgcgcaagtgccggtcgccgaagacggcagcttcaccctgtacctcgaagccgccagcaacccgctgctgctcggcgtgcctccgttcattgagaccgaactgggcgaccatgccaccggcaagccggacgagccgtacgtattcaagtccgccgatctggccgaattcgatgaacgctacgagaactactccgtcgatctcgacgtggtgagctccctgatggaattcgccgacaaacagtcgccgcgctactggcaactcgccaaagcattgcagcgttcgctgaacgcctacgacgagcgcaaccccgaatccgtggaagccgcgcgcgcagcactcgccggcgtactggccaagccggccaatgcctcggccatgaacgtcagcgccatcggccacgcgcatatcgactccgcatggctgtggccggtgcgcgagacccgccgcaaggtggcccgcaccgtatccaacgcattggcgctgatggacgccgaccccgacttcaaatacgcgatgagctccgcccagcagtacgcctggctggaagaggatcatccggacatcttcaagcgcatgaagcggcgcatcgaagaaggccggttcatcccggtcggcggcatgtgggtggaagccgatggcatgttgcccgccggtgagtcactgatccgccagattgcatatggccgcaaatacttcaaggaacatctcggtgtggagcccaagggcgtatggctgccggacagcttcggctacaccggcgcatggccgcagatcgcccgccgtgccgggtacgaatggttcctcacgcagaagatctcgtggaacgataccaccaagttcccgcaccactcgttcatgtgggaaggcaccgacggctcgcgcatcttcacccacttcccaccggcggatacttatgccgcttggtgcaaggttcaggaactcgactacgccgagaagaacttccaggacaaggatctctccgaccgctcgcttctgctcttcggtttcggtgatggcggtggcggccccacgcgcaacatgatggagcacctgcaccgctacgagaacctcgaaggcgtctccaaggtgagcatcgaagagccgaatgacttcttcgacaaggcgcatcagcagcttgcagagaacgccggcccagaaatgcccgtctggaagggcgagctgtatctcgaactgcaccgtggcaccttgacctcgcaacaggacatgaaacgcggctgccgccaagaggaatcgctgttgcgcacggtcgaatacctgggcgcagccgccgtgttgtccgatccggagtacgtctacccgcgcgaggagctggaccgcatatggaagacgctgctgctgaaccagttccacgacatcctgcccggctcggccatcgcatgggtgcaccgcgaagcccgcgaggactatcgccgcgacctgaagcgtctcgctgaaatcgcccaagacatgtgcgccgtgctgcgcaaggccaacccgcaggccgacctgctcgccgaagcccacatcagccagttccgtaatgacggcgtgtcttggcgtgccagccgcatcaacgaaccgaccaacgcgctttccgtactgacccagacattggacaacggccgtgtactgctggccaacggcgtactgtccgtcaccatcgaggccgacggtacgatctcgtcactgcttgacgaggagcatggccgtgaactggttccggccggcacccgattgggccaatacgaactgttgaaggacgaacccgccgtttgggatgcctgggagatcgaacgcgaatccctgctcatggcgaatgccatgaccggatcaatcgaatcggtcgataccgaaaacggtgcggcacgagtccgcgtgcgcaccgccgacgatgacaccgtcatcaccaccaccatcacgctgcgccccggttcacacacgctcgatttccacgccgatatcgactggcatgagcgcgaacgtttcctcaaggtcgccttgccgctgggtatcgtggccgaccaagcaacatacgactgccagtatggtctggtccgccgcccaatcgtcaaaaacaccgcatccgacgaagccaagtatgagagcagcacgaaccgcttcgcccttatcggcgacgccggttacgcggcggccgtcatcaacggatcggtgtacgggtccgatgccacgccgatctccgggaacgccgccgaaggtcgtgactcgggcaccatgttccgactgtcgctgctctccgcgccgaccttccccgacccgcgcaccgatatcggctcgcacgagttcgactggtccgtggtggccaacgccacggtgggccgtgcgcttgacgccgcttgcgcactcaacgcaccgacgcttcatgacatgcccgacttagcgccgctcgcctcgatcgagtcagcaaacggcaccgtggtgttggactggataaagctggccgacgatggctccggagacctgattgtgcgcgcctatgaggcggccggcggcagggccgatgccacgctgcacgtctgcccggcgctcgcaggcgcttcggtgcatgagaccaatgtgctggaaggcgacgatctggccgccgacctgccggtcgcgctgcaagacggcacacagaacgccgaaggcgccacactgcacttcggcccgttccagctcgccaccctgcgcatcacgcgctgaattcccgtctgacgcttctgcctccttgtaccatgaggggacagaagtatgtcgtattacggtttctccaattaccatcactcccacccctaccaccagacacagcaaaggagttgaactctccatgtttcttctgcccaatcagcagttggagcgctgcgaccgcgtcatgcagcagcgcgtcaaaccgcatatccacaccacactcgccgcatgcaccttgcgttcgttccacaatcccggcgaaccggtgccctccagcgaatttctagccaaagtgcgcaacggccaagtgcccttcgaacctttccgcgttcccggcgtctggggcaccacatggggcaccacatggttcgaggtgaacggccacatcgacatggcggcggtcaaaggacgaaaagtcgaactcatggtagacctcggctggctcgatcaccgcggccccggattccaatccgagggacttgtctatcgtgccgacggcaccgccatcaaatccgcgaacccacgcaaccactggattccactcgtctacgcggacggcagcagtaccgtagaactcgatgaacatggcgacttcaccgtctatatcgaagccgccgccaacccattcgtcgaaggccccaccccgttctcacccaccgaactcggcgaagaggccaccggcacctgtgacttcccatacacactgagtcgcatggacgtcaccatcttcaacgaagacgtgttcgcctactacatggatctggaaaccgtctcctcgctgattcgtgagctcaaggacgacgacccacgctactggcagctcgccaaagcactgcaacgctccctgaacatctacgatgaacgcgacttggaaaccgtgtcggcagcccgtgcggcgctcgccggcgtactcgccgaaccggccgcctccagcgcaatcaaacacatcgccatcggccacgcgcatatcgactccgcatggctgtggccggtgcgcgagacccgccgcaaggtggcccgtaccgtatccaacgtgctggctttgatggacgaagacccggacttcacgtatgcgatgagttccgcccaacagtacgcatggctggaagaggagcatcccgacctgttcgcacgaatgaagcggcgcatcgaagagggccgcttcatcccggtcggcggcatgtgggtggaatccgacaacatgattccttccggcgaatcattggtgcggcagatcacgttcggccgccgatatttcaaggagcatctcggcgtcgcgccgcgcggcgtctggctaccggacagtttcggctacaccggctcttggccgcagatcgcccgccgtgcaggattcgactggttcctcacgcagaagatctcgtggaacgacaccaccaagttcccgcaccactcgttcatgtgggagggcatcgatggcacgcgtattctcacgcacttcccgccctcggatacctactgctcgtggatgagcatgcacgagctgatgtattcgcagcgcaacttcctggacaaggacctctcccgtaacgcgattctgctgtacggcttcggcgatggcggtggcggccccacccgtgagatgaccgcgcgcatccgccgcgaccatgatctcgccggcgcgccgaagatcgaattcggtactcccgaccaactgttcgaccgtgtgcgtaaggatatcgtcgacgatgcgcaaggggagaccccggtgttcaagggcgaactgtaccttgaactgcaccgtgccaccctcaccgcccagcaggacatgaagcgcggctgccgccaggaggagtcgatgctgcgcgtcaccgaatacctgtgcgccgcggcccgcatcaagaacccggactatgtctatccgcgcgaagagctggaccgtatttggaaaacgctgctcctgaaccagttccacgacattctgcccggttcggccatcgcatgggtacaccgtcaggcgcggaccgaatacgcgcgtgacatcgctcggctgaacgagatcgcccttgaagccgggcgcgcgatcgcagccgtggaacccgatgacgcaaccataaccgacgccgtaatcgccccatattcccgccaagcctgtgagacgtgggtggtacgcccggcttcgagccgagccgaagcgggaaccgcatccatggctcgggtcgccgttacccatgacggcgatacgattgtgctcgacaacggccaactgcacgtgcgcattgaagccgacggcaccgtttcgtcaatcgtcgatcagcgaaccaatcgtgaactggtgcccgccggcacccgactgggccgctacgaaatgctcaaagacgaacccttccactgggacgcctgggatattcaacgcgatgcgttcctcaccgccaacgcgctcagcgaggcatcgattgcaagcgtggacgaaaccgccaacggtggggccgtcgtgcatgctgtcactcgcgcgaagggcgttgaaattcgtacgggcattgccttaaggccgggctccgccacactggacttcaccgccgatgtggactggcatgccgtcgaacagttcctcaaagtggatatgccggtcaccgtgcaagcgctgaacgcgcaatacgaatgccaatacggtctggtcgaacgccccatcaacaagaacacgcgcagcgatgatgccaaattcgaaagctgcacgcaccgcttcgtgcggatcgccgacgccgactatgccgccgctgtggtcaacgcctccacctacggctccgacgtcagccccatccacgccgatgcggcacatggcaccggccgcggcaccatggtgcggctctcgctgctgtccgcaccgctgtaccccgacccacgcaccgaccaaggcgcacactccttcgcgtggtctctggtcgctgacgccgatatgaatgcggtgctggacgaagcggcgcgacttaacagccccgtaataggggagttgcctgatatggcgccgctggtctcgctcgccgacgccaccggcgtcatcgtattggactggatcaagctcgccgatgacggttccagcgatctgatcgtgcgcctgtacgaggccgccggcggcaatgccacggccacactgcgccttgacgccgctctctccgatgccaaggccagcgtgcaggaggtgaatctcatggaggagccggagctggatgccgaactgccgcgcgcgctcgccggtgacgaaccaatgcctgccgacggtgcgatcgtttcgttggcgccattccagctcgccacgctgcgtattcgccgataagggatattgggcctaggctcgatattttgggtcgcgcccaaccgtaacggaaccggaacagaccggctctgccatacggttgggcgcggcccattattgtatgagaagagggagagcgatcccgttgggcaaatatcaatgcgacacgcgacgatgaattcgttgcgtgcatgtttcgattgtgttatgtttttactaaaccgatttagttaacaggttcgcgactggccggaagctaaaacggtttagtctcagcgatgagaactgaataaaggttgtgataccacgtcaatcaccgcgacgggtgactgtgctggagcacaacgattaggtttctccgtccacagcagggcgggatgaaaaaggaatcaaaaggaaaggaaaacatcatgttttctatgaagaagatcctcgccatcgccggtgccggtgcgatgctcgtatcggtggctgcctgtggtagcggaactgcgggggatgacggcggcaagaaggagatctccttccagacctggaacctcaagaacgacaagtacaccccgtatttcgaggcgctgatcaaggcctatgagaaggaccacccggacgtcaccgtcaagtggcttgacgccccgtccgatggttacgaagacaagctgtccagccaggctgcggccggcgaactgccggacatcgtcgacggcggcaactccatcctgtacggtcttgccaaggccggcgcgctgctcgatgtctccaagcaggctccggatgcggaaaaggactactacgaaggcgcatggaagtccgtgaccatgcagggcaatggcatcgagaagggtgcctacggcctgccgtggtatgtcaacgatggcccgacctactggaacaccgagctgatgcagaagtgcggccttgatccgaacaagattccgaccacatgggatgagtacttcgccgccggcgacaccatcgtgcagaactgcaaggatgtctacctgggcaccacgatgggttacaacaccgaagatctgatgaccgcaggcgtcaagtccttcatgaacgatgaccacagcaagtacaccttcaatgatgaggccggtgtcaagcagatcagccgcttcgttgagctgtacaagaagggcggcatcccgccggaggccctcgactcctcctggagccaggccgccgatctcttccagcgtggcaacctggtctccatggccggctccgcctactccgctgacggcttcaagcagaacgctccggacctttacaagaacctcgcagtcggcccgcgtatcagcaacgacggcaagtccgcttccgtggcctacgagatgctcggcatcagcgccaactcgaagcaccccgacgttgccattgacttcgcccgattcgtgaccaacgagaagaaccagatcgagttcgacaagaaggcctccgtgttcccgtccgccaaggggggtctggatgacgactactacaagagcatcgacgaaagcacccttgagggcaaggctctgaagatcacgctcgaccaggtcaaggacggctacggctctcgtccgtccgagttcaccgacaacaacggctccaagaacttccagcagcagatcgccctcgctatgcagggcaagcagaccgccaaggaagcccttgacaagtccgtcgagttcgcaaacgagaagctcgcacagtgagcaacgcggcactcgccgctgacaggtcggaggcccgcacggcctccgaccggcctgaaccgatgaacctcaaccacggcaagaagcagaatcgtagcttcggcaccatcattgccccctacctgtttgttctgccagcgttcgcgattgtgtttgtattcatcgtccttgcggcactcaacactttcaggcttgctttcaccaactccacactgctccgtccgggaaccttcgtcggactcgaaaacttcatcaaactgttccatgacgagtacttcctcacggcactgctgaactccacactctacgtgatctgcgtagtgccgttcatggtgatcctcccgttgatcctggcctatctggtcaagggcaactcccgcatcatgggcttcttccgcaccgccttctacatgccggtggttatgtccgccgttgtggtgggtatgatctggaccaacctgctggattccgccggtctggtcaactccgtgctcaaggcattgaagatcatctccaagccggttccattcctcaccgatcgatggggcgtgctcttcagctcgatgttcgtgacaatctggctgggcctcggctactacatggtcatctacctgaccgccctcgccaacatcgatgaatccctttacgaagccgcctccctcgacggcgctggccctgtccgccagttcatctacgtgacaatgcccggcgtgcgctccacgatgatgctcatcatgatgctgtccaccatcgccgcattccgagtcttcaacgaaatctacgtgttgaccaacggctccgcaggccccggcggcatggatatgacgatgtcgatgcttatcaagcgcgaaggcaccggtatccaggcccgcactggttacgcgagcgccatctccatcgtcgtgctcgtcatcgtcggcgtcatgctcatcgtgcagcagatcgtacaaaagcgaggtgaggactgatgaataccaacacgcataaggtcaccgtcggcaaagtcgtccagtatctgattctgattctgatgttcctgctgctcgtcggcccgttcgtctgggaactgtccctgtcgttcaagggcaagggcgacaacgtctacgccgtgcctccctacctgatgccgaagaccccgacgctggacaactacatttccgtgttcaagcaggtcccggtattccactacatgctcaacacgctggtggtctgcctgatctccatcttcggcaacgtggtcttctccacgatggccggctacgcactgggacgcctgaagtggcgtggccgcggactggtgttcaccatgttcatgggcaccatggtcatcccgatcgaaggcgtgatgatctcccagttcctgatcattcgctccatccacctgcagaacacactgctggcagtcgcactgcctggcctgtgcggcgccatcaacatcctgctcatgaccaacgccttcaaatccattccaatggaactcgaagaggcggccatggtggacggtgccaacctatggcagcggttcttccacatctgtgtaccgcaggtcaaaggcacgatgaccgttgtcggcatcttcgcattcgtcggtgcctggaacgacttcctgtggccgttgatcgcgatctccgatgaaagcaagtacaccttgaccctcggcatgaaccgactcaagggcatgttcatccaagatccgcgactgatcgccgccggtgcgctcgtctcgcttatcccgatcatcgtcttcttctgctgcttccagcgctacttcttccgtggcctggaacagggtggactcaagggctgagcggactggaaaaaggaggtactccaatgaaattcggagtcaactacacgccgtcgcatggctggttccacgcatggctcgacccggactgggacggcatcgacaatgatctcaagcagatcagcgaactgggtatggaccatgtgcgcatcttcccgatctggccgtatctgcaacctaatcgcacctggatcaacaagaagggcgtggcggatgtgcgccgcatggtgcacatcgccggcgagcacggtttggatgcctatgtggacgtgttccaagggcatctgtccagcttcgacttcctgccttcatggctggtcacctggcatgcgggcaacatgttcaccgatgcggacgccgttgcggccgagcgtgaactggtcaagaccatgaccgatgagctgtccaaggaacccgcgttcaagggtctgaccttgggcaacgaggtcaatcagctgtctgacaggccgcatcccacgaagatgagcgccacggaccggcagatcgacgcatggctggacgcgctgcttccgaccgccgccggtgaagggcacaacgcgctgtacagcgtcaacgatggcacctggttcatcgatgggcacccgttcactccggtgcagtccgccaccaagggtgatatgacagtgattcactcctgggtgttcaacggcatcgcgcaaggatacggcgccaccagtgaggagtgctcgtcgtacgcactgtacctggccgagctggccaaggcgttcggcaaggattccgagcgcccggtgtggctccaggaagtcggtgcgccggagaatgtgctggaaaccgactacacgccggaattctgccgcaagaccgttgaacgtgccatggattgccggaacctgtggggtgtgacgtggtggtgctcgcacgatgtgcccgccagcatggaagacttcccgttcttcgagcactctctgggcttgttcgacgagcaaggccagctgaagccgatcggccgtacgttcggggaactcgccgcacagtaccgttccgcattgccggctcagccgaagaccgtcgccgtggtgattgatgtggatgaggccggaaacccggtgaaccgcagtgcgctcggcccgggaggctcggtgtgcgacctgtggatgaagctgcaggtggcgggccagcgcccgaccatcatcacctcgcaggtggcggccaatcaagaggcgctcgcgcagcgtggcattctggaattgcacgctgacgaacacccctatgccgcccgttactacactgcggtttcggacccatcgttcgaaacggctgattaaaccgatatccggttgtggaatcatctactccttgttccacaaccggatattttcaattgcagtgcgcacaattgcagtgcgcagggcaaaacataagacccggtactcgccgaagagcgagaagaacgagaagacaatatacgagaagggggagcgctcaatgagcatcaactgcgccgcagtggaccgactcattgattcgatgagcttcacgcagaaagttggccagttgaaccagcgtctgctcggttggaagtccgtggaacgcaatgctgcgggacggctggtggcctcggacgagctcaagcaggagattgaccgatggggtggactcggcaccctgtacggtctattgcgagccgacccatggtctggtcaacattggggtaacggcatacgccctgaggagcggactgaggcgattgccgtggtgcagcaaactgtgctggaacgtggcgcgcacggcatcggcgtattacttagcgaagaggcgcctcacgggcatcaggcgctgggcggcacggtgctgcccaccaatctgggtttgggcgctacgtttgacccgcagggggtgcaggaagcggaagccgcggttgccgcagaactggccgccagcggcattcatatcgcattggtatccggtttggacatcgcccgtgacccacgctggggccgttgcgaggaatgcttcggcgaggatccgctgatggctgcccgcatgtgcgaggccatcgttaccggcatgcagggtgagcatcgcagcaaggtcggccacgggggagtggccgtggtgctcaagcatctggcggcgcaaggcgaggccgtgggcggccgcaacggacagtccgccgtactgggcccgcacgatcttcatgaaattcatctgccgccggtggccgccggtgtgcgcgccggtgccttgggctttatggcagcctacaacgatatcgattctgtaccttgctgcgccaacccgtggctgctcaaggattatctgcgcgaccagctcggtttcgacggcatcgtgatggccgatggcctggccgtggatcggctcgaagacatggccggctccattcccgcggcagggcgcgccgcactgctcgccggcgtggacgtctccctgtgggatgaaggattcacccgcctcgaagaatatgcggatgacgaacaggtagtggccgctgtcgacacggccttgcgccgggtgctggaactcaaagccatgttcggtctcttgcccgaagacggtgccgataccgccgcaattgccatgccgagcgccgacgccatcgcgcaggccactgcggatgggcgtgagcaggccaagcgcatggcccgcgaggcgataacgctgatcaatgatggccagtctgccgccacgctcgacgatatccgcagcgtcatagctgatgctcaagccggccctgtgattgtcgccggcccgttcgccgacgatttcggctgcttcctgggcgattacaccgcccctctgcccgccgatgaacagtcaagcgtctaccggcaattggtggcacgtctcggggaggaccgggttctcttggccgccaagccgagcgatgcgccggccgatcaatgggcgcgtgcgtcgaccgtggtattcgtatgcggcagcaccagcgaacgcagctatgacagtgaattcgacgacaatggcgcggcgaaggccgtaaccgaatacggtgccacctgcggcgaaggcgtggacttgtctgacatccgcctgccctggcgtcaggatgacatgctaggtgaagtcgcggcattgaccaccgctccaattgtttcggtggcggtgtgcggtcgcgcgcatgtactgaccgatgtgctggaacgctccgccgtgacgatctgggccggatatgccggccaatatgggccgcaggccgtagccgacgtattggttgacggagccgacatgtctggccgccttcctgtgaccttacccgcatatcccgcagccattcccgttcgatacaatgaccgccaaagtgccgcgcatgtctacaaggatgcggcggaaccgatattgcgcggcttcggctatggagccggttcgctggcggcggtgacgttcagcgagatgcacgccgatacgcaatcgcatccaggtgaagtgctggtgcaggtgacggcacatgctgacgatcacggggccgcgggtgccgtgaatctgttcgcgcatgtcagcggcggccgccgcatcccacgtttggcaatgcttgtcgattcggtatacatggacttgaacgcgggagagcgtcgcgatatcgcgttccacgtgccgtgtgatcgtctgcgggatgtcggtgacgggcaagttcaggtgacctgcacgctggatggagattcgacgcatacggtcacggcgacgctgccgggggaatattagggggcctgtatgaatgtggggtgcgaagcactggaaccgcatcacacccccggatggagcctgaaaccgcaaggcatccatcctcgcaacctgcaagtctgcgggttgtcacccgatagaggaaacaacaaaggagattatatatgtgttgctcacaaggtagtgaagggcgctcgtccatcggacgcagactcgccgccgtcgcggcgggcgtagtcgccacagcactgatgctcggatgttcgctggccatgggaacggttgcgaacgcccaggagggggattcccccgttgcggcgtcgcaggagggtaacggcaacaagcatttcatggtgtattaccgcgcatggcgtgacgtgaccatgaaaggcgtgaacaccgatttaccggatgacaattggatctccatgtacgacattccatacggcatcgatgtcgtcaatgtgttcagctacgttcccagtggccaggaagcggcggcccagccgttctatgacaagctcaagagcgattacgcgccgtatctgcatgcccgaggcatcaaactcgtacgaggtttggattacagcggtgttatggtcgacggtttcaagacgtggattgctcagcagggcaaaaacgtcgatagtgcgaccgaatcggattatgacgcgtacgccgatcatgtcatcgaaacgtacatgacctcggttggcctcgacggtcttgacatcgatatggaaactttcccggatgccgcgcaggtggcgatttccgatcaggtcatcacagccctcgccaagcgcatcgggccgaagtcggataacccggaaggcacgatgttcctttacgacaccaatggcagctacactgctccgtttaagaacgtttctgattgcttcgactatgttgcctaccagcagtacggttccgattcgaaccggacggccaaggccgctgccacctacgaacagtttatcgactcgaccaagttcgttcccggcctgaccttccccgaagagggtgacatgaataaccggtggaacgacgcgaccgaaccatacctggacagtcatttctatgatgtggcctcatactcgtacgaccacaatctcggaggcatgttcgtctacgcgctcgaccgcgacggacgcacctattccgacgatgatttggcacacatcaaaccgtcgaatctgatttggacgaagacggccatcgcacaaagccaaggcatgagtctggaaaacgccaagcaggctgccaaccacttccttgaccgtatgtcctataccaaggatattccagccgaaacacgccaaaccgtggcagcggccaccaacctgtatgaggtgaacaaggcggtgctcggcgcggattggaacgacggatacagcaacacatatgatccgacgctcgaactttccctgacctccatcgacaccacggcacttaccggtgccatagccaaggcggatgcattgctagctgacggcgcaaccgataccgatgtgcggacaacgctgaccacggccagaaacgcggcggtcactggcctgaccagcaagctgtataccggagctgacgttgtctcctggacggcatcgctcaacaccgcaatcgcagatgcaacgggcggcaagcccaagccgcaacagccaggcacaggcgaaacggacaaacctagttccggtgacgcatcacacaacaagccacagtctgcaaccggacgtctggcaagcaccggttccgatggcaccgtcgtgctatcggtcgccgtgattatgacgctcgccggtatcagcgtattcgcagtccgccgccgcggataacaccggttcgaatgaaccgaaaaacagtatttgggatacggcgcgatatgcgaagcgccgtatcccatggcccacatcggtagggacgaagtagtacgcagacggttgatctccggcgtaagccggaagaagtcaaaggagattatagatgagattgtcactaggcgatcccgctgggtgtacttctgcccgggctcaacacaggaaatggctgtgcagcggtctggccgcggtattgtcgatgaccacgctggcggcgttggccgcaccggccagcgccaccggcacaatgccatgggggtgttcctatgtttttgtcaactccttggggagttgacgtgtcgggattccggttggctgtcgtgggcgcgcttcgccctgccggtggcgtccggcgtcctttcccgtgtggcccgattcaggctacgagggctggttcctggtagaggacgccgtttttgagcatgctgtagattacgtcgcagcgtcggcgcacgaggcagatgacagcggcgttgtggtgcttgccctgttcgcgtttgcgcttgtagtaggcgatggacggcgggtgtttggcggacgcgacgaacaaggactgccacagcgcgttcctgaggcgtttgttgccccgtctggagggtctctcgcccttgatgctggtgccggactggccggtggccggagcgatgccggcgtaggcggccaggtgggccgcgcttttgaagttggcgatgtcgccgacgatgttccagcctaccaggacttcatgaagcagatcgtcgatcagggcatttacatccagtggtacgactcagccacatacccgggtggcggcgtaggctaccaagacatgttcaacggcagcaattcgccgtatgtgcaggatacggacaagggcaagatctctgattccatcttcctgaactactggttcagcggcaacatgcttaaggattcggccgctcacgccgagagtttcggcatcgatccgaaatatgcggtgtttgctggcatcgagtccggacagaagaagttcgacagtatcggcagcaatgcgggctatatgaacgtcaatctcgacgatacaggtaagccgtatgtgagccttgccgcgctcggcgccgacttcgtctcccgcgaactgggcgacgacaagaaggtctatccgaaataccagaaccaggtgttcgaccgcgaacgccgactgtggaccggctcgtccaccggcgagaagggcaccaccgacatcgccgacaattacatcgacgacggcacgagcaatgacggttggaagggcttcgcttcccagatcgccgaatgctccgtggttggcggttccatgttctctacgtcgttcgacaccggtcacggtctcgaatggcgtgatggcggcgaacggaccagcgaccagcagtggggcaacatcaacctgcaggatattctgccgacatggcagtggtggatcgatgccgactccgacccgctgcaggccgacttcgactacggtaaggactacgaggcggtaccacgcttcaagtacaccaaggtcggtggttacgaaggcggcgattcgctggtgctgagcggcaagctctccaacgacaacaccattcgcctgtacaagaccgacctggatgtcgctgccggctccaaggttgacctgacctacaacaagctcaacagcgatgattccaagttgcagcttggcctcatccttgccgacgaccccgagaccgtggtgccggtggacgtgacggacggttcggcaggcaacggctggaagaccgcgagcgtggacctgtcccagtacgcgggtaagaagatcgccacgctgggtctgatcgtcaagtggaatctcgccgactactccaccatcaagaactacttgctctacctggacaataccttcctcggcggccgctacgacgacaccctgtatgtcaagcacctgcccgccaagaccggcacgctcaagctctacgccgtgggcgcggacggctcgcgttcgctcgccaccgaagcgccgctgaacgaagcggcggccgtctccgacgtgaaagtcgaaccaggcaaggacggcaacgtcaaggtctcttggaccaatccgcaggtatccggcgagaaaaccgtgaccgtcaaatccgacaccggttcgtggcgttacgccgcgaagccgtattcccagaccgtcaaggtcgccgccgacaagagcaaagtgacgattgccaatgcgccggttgacagctcccgctatgtggtgaacgtcgataatgcaggtggcactaccgctacggcaacaggtgcatttgccgatgccgccattgagccgtatccggcttgctcggtgatctggaatggcgataatgtgacgctggcccgtcctgagacttaagactggcgctacctgtacatgaccgagaagtggatcggcgagaatggcaagcagcagcaggagaaccagctgggtgctagctacacctactcgcagaacactccgccaatcactggtattatccgtggtcgtaccacacctgcctcatacaccaggtccatcccccgccagtcatgaactgcgggtgcaggtcgaggattacagcggcaacaagaccgatccggtgaagattccgaccgccgacgaactggccaagtgcacggtcgccgaccccacccagccggatgccaagaagtccacgctgaccgcggtcgacggttctgccgtggccgacggcaaggccatccgtacggtgcaggcaacggtcaaggattcgttcggcaatccgctggccaatgccgaggtggcgtttgaactgcccgaaggcgtctcggccattggcggaaacaccaccgtcaagaccgatgccgccggcgtggcttcgctgaacgtcgtgtccacgaaggtcggcaagtacacggtgaaggccgtgctgaacggcaatgccatcggcaagggcgtcaccgtcgaattcaccaaggccgcggtgacgccgaacaagcccggcgaccagaacaagcctggcgataccaagccgaacaagcccagccagaacgacaacaagaacaatgacaagaatggcgcttcgttgagtgccacgggttcgtcggtcattgcgattgtggcggccatggtggtgctgcttggcgcgggtgcggtggtacttcgcgctcgtagcaagacggagtagttcgtcgcaatacgggtgttgatactcgtgccataagcgggatttaggggttgcccaatgggtgcccccctaaatcccgtttgttttgtcgcaagacatatgccgagaccagtgactaaaatgctttagttatttgactaaaattattgatatcataagagttagcgcacggttgatgcatatggcccaatgcgggggtgccgtcaaccgtatcgcaatagtcgcaatgcggtcgtaaaaaggagtgttcatgagatctgctcgcgaggcatcgtcatcgtctgacggcacgcagcgtgtgagcctgaaagacatcgcagatgaattaggcatctcgcagaccgcggtatccttcgccatcaatgatcggcccggcgtttccgcggaaaccaaacgtcgggtcaaagaggctgcagccaggctcggctggacgccggtctacgccgcacaagcactgggatcctcgaagaccatgaccataggctttgcccccgcacgatccacgcaggggctcacggatgaaagcttcatgctgcacttcatggcgggtgtgcacgcctcgctcagccccaaaggctatggtttgctgtaccgcccatgccgattcctgaacgaggagatgagcgtatacaaggattgggcgtcgcgcaagcgcgtggatggcgttatcctcgtcgatttgcgagccgatgatccacgcccggaattgttgaagaatctgggtgtgcgcgcagtgcttgccggaggacccgacccgaacaattatgtgccgtcactgtccatcgatgattcacgcacgatgggaaccgtgctcgaacatttgtcgtcattgggacaccgccgaatcgcctatctttccggcgatccgaacctggattattcacaggggcgtgtcgcggcgttccgcgcatttgccaaacggcgaaagctggaatccatcaacatcgaattcaccgattttgttgcggaacaggccgcgatgctcacgttggagatgctgcattcaccgaagccgcctaccgcgttcatctatgaaacggagatcctcgccgcggccagtcttcacgccatggccgaagattattccgctcggcagatggaggcgggggagggccatgcggaagtctatccgaatgggctgcccgccattgtcagttttgaagacagtttcatttgtgaggcggcgtatccgtcaattaccgccgcgcatcgtgatgccagcgaatacggtgccaaagtggccaaactgctgctcaaagtgcttgccggagagcaggtgagcggcaaccggcgaatcctcaccccgaaactggtgattcgggacagcaccgccaagcccatggataccatggcgtagaacggtcattgcatcggcttgcagacaatgacatgcgaccagtacggcgttgggcccccgattacccggggggc

SEQ ID NO: 699 - DNA, 9005 bp, Unknown
  R14_15m  MAG No. k141_30161
cgtttttcgccgcgattcattgtagttcatgacggggaacctatatccaaatcaataacttcgcgaaaaccgtacgctgagttgcggtgagtgtacggtttccgcgaaatcatccctaatttcgtgaagaacgtacactgagtcattctgagcgtacggttttcacgaaatggcagctgatttcgtgaagaacatacgctgaagatgccctcggtgtcactgatgactgttctcggtatggaaggcggcgcagcaaggtgtcctaggctaatatcgcctccgacaagaccgtcggcaaagccgtcgacgtcgattcaagttatccacaccaacaattcgcgtgacatagtattcacatttgccggttgagcttgtgcaacaatcaaaatcacccttagcgtcgagatatgaaagaacacaaggaagtttctgcactgctgcagcaggcgaagcaggagcgtcgctgctgctatggcaccagtgatgcgcaacggcgcgccctgaaacgtcgcctgcatgccggggagctggtgtcaccgtataagaacctgtacgccgaccgaatactttggaacaccatgaccagagagcaacagtcattgcaggtcatacgtgcgctgtccgcaatccaccctcagtgggtatttgcggggttgagtgcggcgtgcgtatacggactgcagcacaactattccctgcacgacggcacagtgcacatcgcctcgaagtccggcatcggcggcggagacgaggcgcgtctcaaccgcatctatatcaatcggattccgacgcggaagcataatggcattctcttgacgactccggcgcgaacgctgctcgactgcgcggcattcccattcccacaggcgctgcccatatacgattcggctctgagaaagtccctgacgaccatcgaagaggtgcagtcgctgatgattcaaagcgtctgcgacgaggtctccgtgaccaagctgctgaagtacgcggatcccctgagcgaaaacggcggcgaatcattgatgcgtggccagatcaccgaattgtctttcggcattcccctgctgcaggtgcagttcatgaatcccgacaatcccgcaatgccatatcgcgtcgatttctgttggaagctcgcagacggccgcatcatcgtggcagaatacgacggcatggccaaatacgccgacaccagcaacaagaatcgcgcaagcctccaggcgaaaatggagtacgaccgcagacgtgatcggcatctccgggaacagggcgtcaccgaaatcgtccatgtgttctatgaggatctgctacgccccatcaatcttgagaccaagctgctcaaggccggtgtgcccaaaatccggtgaagataggccccatttcgtgaaaaccgtacgcccagaacgactcagtgtacgttcttcacgagatgagaccccatttcgtgaagaccgtacgcttacgacgactcagcgtacgatttccgcgacatgaggccatttcgtgaaaaccatgcgcccagaacaagaccgtcagaaagtcgactagacagcctcttaactaccgaacggtatctatagaacggcgatattccgccagaaacgccgagagcggaatagtccccttgcgtttgtcatcggactgcgttattctgaaaccggtttcagaaagaaaccgataaacaaaactcaaagccacaaggttttgaccaacgaaaggaaacatgatgtctctcaaggattccatgattcgcggtctggctatgtacggtgccacttccctggcccagtccggtcacgccaactcccagatgattctcgacatcatcaacgacaccgataagaacgctcgctgagcctcttccctgactcgccgctcacacacggcccgtctcataacgtaaacaacaacacatcgcaaagcccacggctttgcaagtcaagacaaggaacacattatgtcattcatggattccatgattcgcggtttcaccctctccggtatggacgccatcgcccgcgccggctacgccgactccaagatgttcgccgacatcatcaacgccgccaacaaggacgctcgctgaatctagcgaacgatcccattcatgagattgcacgacacatacgaaggcaatcccccgcaggccgcaatcggccggcacaccacaataattgaataacgcaataattcaacacagtaataactgaacaataaccgggacaacggggtccatatattctttcttttcccatcgtgtgtacgccgtgccagcacaggttcacatacgatgcacacggccaccaatacacgatgcgtcatcatcaacgccctcaccgcatcatgagatactttccccgcccgttgtccacactgttgcctctacaatgcctgtgatgcacgccgaacggcatcccgcgcagtgactgaagaacgaaaacaccaagggacggaaatggataacgaactcttcgaaaaggcgccgattccgaaggcgtatttctcgctggcgatgcccgtggtgctcagcatgctggtcaccttggtgtacagcatggtgcgcatatcttcctttccgaattgtgtggctccctctgacgagggagctgtcagcgcagctgactgagggagagaagcagacgaatgactgtatcggctgaaagccgatgccattttttgcggctgcgccacaagtctccccctcagtcacggctttgccgcggcagctcgtcccgcaattatggagccttcggctggcttgactgtcgtcaagccctcgcctggaaacgcctccggcgtttccttcacggctcggcccatcagagggagcttgtgaagctgcttcagttgtagggttcgtacgacttgttcggtggtgcgggtcacgttggcggccgcgtcggccagcagttcgctgaggctggcggcaccgggggcgatgccgaataccgcgtcgatgccgacctcatgcagttcgtcgatgcccgtgccgatgtgtccggcgacggcgatcacgggcttgccgtggcgcttggcggtttcggccacgccggccggggttttgccgaacttggtctggaagtcgatggagccttcgccggtgaacaccacgtcagcccattgcgcggccgcatcaagtccggattgttcgatgacgatggcgatgcccggacggaattcggcgtcaaggaagcctttcagcgcggcgccgataccgccggcggcgcccgcgcccggcacgtcgttcacagcgacgccgagccggctttcgatgacctgcgcgaagtgcgccaacgcggcgtccagtgtggcgacgtcggcctgggaggcacctttctgcggtccgaacacggcgctggcgccggtgggaccggtcagcgggttggtcacgtcgcaggcggcggtgatggagacgttcttgagagccgggtccatcgtgctgatgtcgatggtggccagatcagcgagggccgctcccccgtgcttaaggtcgttgccgttcccgtccagaagacgaacgccgagggcctgcagaagtccggcaccggcgtcgttggtggcgctgccgccgagcccgacgatgatgcgcttggctccggaacggacggcggcgagtatgagttcgccggtgccgtaggaggaggcaatcaacgggttgcgttttttggcttcaagcagtgcgaggccgctggcttcggctgtctcgaccacggcggtcgtgccgtcggcgagcaggccgaagcggccttcgacaggtcggccgagcgggtcgtggaccggcacggcgtgcatcgatccgccagtggcgtcgacaagcgcacgtgcggtgccttcaccgccgtcggccatggggaggcaacggacctcggcatcgtggtcggcattctcaatcccctgagccatcgcccgggccgcctccatggcggtcaggctctctttgaaggagtcaggggcacataagtatcgcgtcatgcttcgagcataccgcacgacacgcggaacggtaagcgctttccgtaattcgcgtgattatttttgttcaaaattcaggctttccaatccacaatgctactattgcaagcaaaactgcgatatcattgcggtaagcgtttagacatgttttccgtttcagggaagaaaaggaccgattcgatcgtggctgtacagaacgataaggcgcaatcgccagcgacattgatggacgtcgccaaagaagcccaggtctccatcgccaccgcatcccgtgtgctcaacggcagcacccgcaaggtacgcaaccaatcgtatgtcaaggtgatggaagcagccaccaagctcaactatcgtcccaacgcctatgctcaggcagtggccaaaggcactgcaccgaacatcgtgctgctggtctccgatatctccgatccctacttcgcatccgtgtcgcaaggcgtggtcaaggcggcggccgaacgcggcatctccgtgaccatcggcgtggcagccaccccgcacgaggagttggaggcggtgcgtaagtccgtatccaccaggccgcgcggcatcatcatctccgaaagcgaatacaccgacgcgccggaacgccaggcgttgcagacggaactcatccagtacgaatcgtccggcggacatgccgtgttcgtactcaaccgcaacctgcccttcccggccgtggacgtggcgaacgacgtcggcgcgcgtgccatcgcaaagcttatcgtcgattccgggtatacgcgccctgcgattctcaagggcgatgacgcacaccgctcctccaaagaacgactggccggtgtgatggaagtgttggacgagacaggcatcaccgtggacccgaaagccgtggcaaacggtaagttcagccgcaccgacggctatgcggccgtcatgcaaatggcccgatccggactgctgaagccgggcgaaggcgcactgtacgacggcaaaggcatcgattcaatcatcgcgctcaacgacgtgatggccatcggtgcgatgaccgcgttgcgcaccaacggcatcgagccgggtcaggaaatcggcgtcaccggtttcggcgacatcccctactccgccgacgtgttcccaccactgaccaccgtgcatctgccgctggccgaaatgggccaggccgccgtggacagcatcctgtccaaccgcgatgacgcggaggccaccggcggcactgccaaccgcctgatctacgtgcaaagcgccccggacgtagtcctacgcggttccctcccccgccggtaaaacaaaaaagctccctctgacggtgtaaccacaactagcgaacgggtaatggcgactgccgcgcaccataccaccgactcatacaccgacgtaatcgaagaactgttcgattaccgagtcattgagcaaccggccacgacgagtgggcaccactcgatgattatcggatacggtaatcaggccttcgctgatcatgggggcgagttggtcaaccgaaacggttcggagagtctggggcgtgctgctcatacctgcatcgttgatggcgcggttgatgcggtcgaggccaaggccctcatgcaggcgcagcccgagcatgatgagctcttcgaggttttcctcgggagtgatcgtctcgctatcggcccacggcacacggttctcgttgatggccgtgccccacaaacgcgggtgcgcgatgtcccagctgcgcagaccgtgtgagacagaaaccacccccagtccggcatccgccggacagcccccgccagcgggggcatgaatttcttgggagttgttcccatgcgcgttgatcatacctagttcggcgttggtttctccaagttcggcgttggcctgtccatcagctgaggcagaggcaatggcttcggacttgcccccgctggcgggggctgtcagcgaagccgactgggggtggtcagcctcggtcaccgcgttgtagtgggagtgggcacctggccctagaccggcccaatcgacgttgcgccaatagccgaggttgtgctggctctcgtatccggggcgggcccagttggagacctcataccattcgaggccggcggcggcgaacaggtcgtcggcgatttcgtatttggctgcttcgtcatcgtcattgggtttgggcagagtgccggccgcgatttgacgacccattttcgtggtgggttccacggtcagtgcgtaggcggagatgtggttcacgccgaggtcgatggcggtcgtgaccgaggtgcgccaatcgtcaaggctctcccccggtgcgccgtaaatcagatccacgctggagcgcaggccggccttattggcggcattaacgcctgcggccacgttggccggcgtatgcgtgcggtcgagggttttgagcacgtgcggcacggcagattgcatgccgaaggaaacgcgggtgaagccgccggcagcgagctcattgatgtaatattcgttgaccgtgtccgggttggcttcggtggtgatttcggcgtcgggcgcgatgctccagatcttgcggatggcatcgagcatggcgaccagatcgcgggcggcgagaatcgtgggtgtaccacccccgaagaacacggtggagaccggtggctcctcgatgccgtggtcgagctgccactgcttggtcagggccatttcacgaatgaccatattggcatagttgccgcgcgaggcccccgcaccaagatccgtagccgtgtaggtgttgaagtcgcagtaaccgcagcgccgcaagcagaacgggacgtggatgtagacctcgaacactagccctcggtcttctgagcggcgcggatcttgtctttggtgtcgcggtcgttggagtcctcgccggtggacagggcggcgatgaacgcctcctgcggtacctccacatggccgagcatcttcatacgcttcttgccggccttctgcttttcgagcagcttacgcttacgggtgatgtcgccgccatagcacttggcgagcacgtccttgcgcaacgcacgaatgttctcacgcgcgatgatacgcgaaccgattgcggcctgaatcggaatctcaaactgttggcgaggaatcagactacgcaatttcttggtcatcatcacaccgtacgaatacgccttatcgcggtgaacgatggcactgaacgcatcgaccttctcgccctgaataaggatgtccaccttgaccaaatcggcggactgctcgccatcctcatggtaatcgagggaagcgtagcccttggtgcgggacttgagctggtcgaagaagtcgaacacgatttcggccagtggaatgcggtagtgcatctcgacacgatcggtggagatgtactccatcgtgcccataatgccgcggtggtcctggcacagatccatcaccgcaccgataaattccttgggtgtgatgatgtcggcggcaaccatcggctcgacgatcttcttgatcttgccgtccgggaattcgctcgggttggtcacatgatgctgactgccatcctcggcggtcacgtcgtaggtgacgttcggggcggtctggatcaggtcgaggccgaactcgcgggagagtcgctcgttgacgatctccatgtgcagcagacccaggaagccgcagcggaagccgaagcccaaggccacggaggtttccggcgtgtagatcagggcggcgtcgttgagcttgagcttgtcgagtgcatcacgcagttcggggaattgcgcgttgtcgatcgggaacaaaccggcgtagaccatcggcttggggtcgcggtagccgggcagcggctcggtggccgggcggacggccgaggtcagggtgtcgcccaccttggactgactcacatctttcgcaccggtgatgatgtagccgacctcaccggcaccgagtgccttggtacgggtcatatcggggctgatcacaccgatctcgatgggatcgtgggtcatgccaatgcccatcatgtggaccttttcgcggtcgtgcagttcgccgtcctccatacggatgtaggtgacgatgccgcggtagggatcgtagacggagtcgaagatcagcgcgcgggcaggggcctcggggtcgccgtgcggggcgggcacgtccatgacgatctggtcgagcaggtcggccacgccttcgccggttttgccggagacgcgcagcacgtcgctcggctcgcagccgatcagacctgcgatctcctcggcatgcttgtccggctcggcggacggcaggtcgatcttgttgagcacgggaatgatggccagatcatggtcgatggccatgtacaggttagacagggtctgcgcctcgatgccctgggtagcgtcgacgagcagcaccgcgccttcgcaggcggccagtgcgcgggacacctcataggtgaagtccacgtggccgggggtgtcgatcataccgagcgtgtattcggtgccgtcaaaggtccatggcacgcgcacggcctgggatttgatggtgatgccgcgctcctgctcgatatccatacggtcgaggaagcgatcgcgcatctcgcgctcgggcacaatgccgcttaactgcaggatgcggtcggccacggtcgacttgccgtggtcgatgtgcgcgatgatacagaagttgcgaatcaccgactgatccgtggaacccggctgattgtgttggacgaccaacgcattcctcctcttggcatatactcaaacttcacctagtgtagccgagggactgtattcggcgtggcattgcgcgggtttttccggggctcatgctatcctctaccttttgtatgtccttataacacacatcgtttggagtaaacgtggcaaacattaagtcgcagaagaagcgcgtgctcaccaatgagaaggcgcaccttcgcaacgtggctgtgaagtccggcctgaagaccgccatccgcgccacccgcgaagccatcgccgccggtgacaaggctgccgccgaggccgcctacaaggttgccgcccagaagctcgacaaggctgctggcgctggcgtgatccacaagaaccaggccgcca

SEQ ID NO: 700 - DNA, 7042 bp, Unknown
  R14_15m  MAG No. k141_30392
ctacggtgccgactacaccgcgcgtctggcgaatcgcactggttccgctgaaacgatgctcgcccgcgtgtgcggtatgcactgcgaatccggcgacattgtggttcacgaggtgcagttgcccgccgatttgaagcgcggcgacattctcgccgtgccggttaccggcgcatacggccgcaccatggccagcaactacaaccaggcgctgatcccggcggtggttgctgtcagcgaggccggcgcgcacgtcatgctccgccgccagaccgtagacgacctacttaacctcgacgtcagcgagtaatcagcgtgcagaggtgagcgcctgacagtctgtaatgtgcggccaaaaccgtcataatacgaaaagggccgtcagcttgatgagtactttcggtctgctgtcggaaataatccgtaaaataggcgtgggatatagaaaactttttggaaggaccctgaattggctcacaacagcgaaaccccgattcgcgtaggcctgcttggtgccggcaccgtcggctcccagaccgcccgcctgattgtcgagcagaaggacgaactgtccgctcgtatcggccgcccgatcgaactgaccggcgtcgcctgcctcgacccgaaggaaaccgagaagttcccgtggatcgaccagtccatcgtcaccaccgatactttgagcgtggccaccaactcggacatcgtcatcgagctcatcggcggcaccaccgtggcccgcaagttcgtgcttgccgccatcgaatccggtgcttccgtggtcaccgccaacaaggcgctgctggccaagtacggcccggagatctactccgccgccgaggccaagggcgtcgacatctacttcgaggccgctgtaggtggtgcgattccgttcctgcgcccgctgcgcgagtccctggtcggcgacaaggtgaccagcatgctcggcatcgtcaacggcaccaccaactacattctcgacgagatgaccaccaagggtctccagttcgacgacgtgctcaaggacgcccaggccaagggctacgccgaagccgacccgaccggcgacatcgaaggctacgatgctgccaacaaggccgccatcatggccaccctcggcttccacacctccgtgaccatcgacgacgtgtccgtcgaaggcatcaccaagatcaccgccgacgacatcgccgccgccaccgccgagcacaaggtcatcaagctgctcgccgtggtcgagaacggcgaggccggcgtctccgcccgcgtctacccggccctgatcgacgagaaccacccgctggcctccgtgcacggctccttcaacgccgtgttcgtcaaggccgaggccgccgacgacctcatgttctacggccgtggcgccggcggcgctccgaccgcctccgccgtcgtgggcgacgtggtgaccgaagcccgccacattgctgctggctgcaccggcccgtccatcccgctgtacaagaatctgccgaaggctccgattaccgcctccaaggctgcattcgccgtgcgcttcctgatccacgacaagccgggcgtgctggccgccatcgccgccgagttcgccaagaacggtgtctccatcaacggtgtgaaccaggatctgaagcccaccatgaccgaccccggctacgacggcgagattcagcagttgcgcatcgtgacccacctgaccgacgaggaaaccctgcgcaacaccgtcaaggccgtgcaggcgctcgacttcgtcaccggtgacccgtccatcctgcgcgtgctggactgacaccgtctaggctccctctgatgaggcggtcgaacggctgcccgtgagttgaaagctgaatacccaagctcccctgacaaggggagctcctttttaaggaacaaccatgaacccaatctgcaatagcgttcacgtgcgcgtgcccgccacgtccgccaacctcggctccggcttcgataccgtgggtctggcgctcgactaccatgacgagctcactttcacgctcaacgacgacccgaacgacggcattgcccacgtgatcatccacggcgagggtgccgacaccctcccacgcgacgaaacccacctcgtggtctccaccttccgccgtgcctgtgccacgttcggcctcggccgactcggcttcacgctggaagcgaccaacaacatccctcaggctcgtggcatgggctcttccgccgaggccatcgtggccggcatcgccgccgccgcggccttcgcccagaccggtgacctcaaccgtccggccatcttcgatatggccgcccagatcgaaggccacccggacaatgtggccccggctgtgttcggtggcctgaccgtctcttgggacttcgaaaccgcggaaggcgtcggctcggtcgccgttcctggtggtgaaccgctgcacggcggattccacgccgtcaactacccggtggacccgtccatcaccgccgccgtgttcgtgcccgactatgagctgtccactgagaaggcccgtcaggcgctgcctagggaactgccatacaaggacgccgtctacaacgtgtctcgcgtgggtctgctgcccgctgcgatgaatcccatggtgctggcccaggccgcccagcagggcaagtccggcgtcgccgctgccccggctcaggatgccgatacgtgcgcttgcgctggcggaacccgtgaatcgccgttcgctgacgagcttgcggccgctcaggcccagtccaacgcgctactgttcaccgccacgcaggacaagttgcaccagccgtatcgcggtaccctgatgccgccgtccaccgagctcattgcgctcttccgctccaagggctatgccgccgccgtctccggtgccggcccctgcgtgctcgtgctgcactacggcaacgcccgcgaagccatcgaccagatcgcatcggagcagcttgcttccggccactggcgtgtgcttcacctgcccatcaacaccgccggcgtcgaaatcgagcgtcgctaagtcgaggagaaggctcccgctggcgggagctggccgccgcaggcggtctgagagtggtccgccataccggcagagaccaccctcagtctcacttcgttcgacagctcccgccagcgggagcataaggacttaagtcatgtccattccgctaattcttgcttccaagtccaagcctcgccgtgacgtgctgtattcggcgggtatctgccccacaattcgcgtctcgcacgtggatgagcctgctgcgctggaagcggccgcccgtgaggaaggcgtcaccgtcgatgatctgagcatcaagcagcgcgtgatgattctggccgtggccaaggccgaggccgttcaccgtgcgtatcgtgatgtggccgatactgccgccgccgcgaccggtgaccgcgtgatcgcctacccgctcaaggccaaggagatcaaggattcggaacgcgaagctgccgtcgaagacctgcgcaaagccgccgccggcaagcctattgactattccaaggcggaaatcgccaccacgcgcgacttctccggcatcgatatgccgaccgtcaccgaacccatcgccaccgctattgccggacagccgggactgaccgaggcgacagtcggcccgctgattctcggctgtgattcgatgttcctcttggacggcgaatgctacggcaagccgcacagcgaatccgtggcccgagaacgactgaagcgcatgagcggcgcgaccggcgaactgtggaccggccactgcctgatcgatttcgcgaccggacgtaccgtgcgcggcgcaagccacgccaaagtccatttcggcgaattcaccgatgacgacatcgaacggtacattgccaccggcgagccgctggaagtcgccggatcgttcacgctggaaggcttcggcggcgcgttcatcgacagcattgagggcgatccgcacggcatcatcggcctcagcctgccgttggcccggcatctggccggcgaactgggcatcacgtggaccgacctgtggaatgtcggccgtggcgaactggagccggaaagcaaggcctcgggcaaccagcacgctggcattctgccgccggtcgaaaacgtgcatcagcccggcgatggctgggtggactgcgcctgcggccgcaagcattggggcaccaacggtgcgtccggcattctgctggctcgccgcgacccggcgagcggcaaggtgactcacgtggtcatgcagcaccgtgccgcgtggagcgccgaaggtggcacgtggggtattcccggcggtgccactgcggacggcgaatcgtccatcgaaggcgcgctgcgcgaaagctacgaggaagccaacatcacccccgaagacatcgaggtggtcggctcctaccgcgaggaccatggcccgtgggcctacaccaccgtgtttgcctttgaaaagcccggccacaccgtcgagcccaaggcaaacgacgacgaaagcatggaaatctgctgggtcccgattgacgacgtgcccaaccgcaagctcctcaccgctatgaagaccgactggccccgcttcgccgcccgcctggacgagctggcctgtgctggacatcggtagtggtgttggctgggccaatgttttgccgatgagtttacttgggtaatgccgtgtgaaccgcgtgtggaccgggacggattctgctgtcccggttcgtcatttcgtctcttttgggacaaccgggacagatttcgctgtcccggttcgtcattttgcctctttttgggcaaccgggacagaatctcattcacctgacgccctatcgtgcgatggtcgccgtcggggaatggcggaattccggggttttggatttgcatatatcgggtgttcatggaagggcctgtcccggttcgccaaaagaggccgaaatcccgaaccgggacagccgaatttgtcccggttcgtatgtcgatcgattgaccccgccaccgggacatcaaccgcgcatagacaggacgcttcaatgtctggcgggcatgaccatatcggatgacacacgttccctcgtgcgtttcgccacgacctccgccccaagtcagtgcgaaaatggcatttttagcggtgtggtcagctgtcgcatgcggaaaacctaaatcaaccgctgaagagacacatcgccgactcggcggaactcgctggtctgcgcgcaatgaggagtgttgtgtctgaatgcgattcagacaatggtcggcgtcaaatagcggtctccagccattaatcattggtgattgtggacattgagcggagtaaacattctagatgattcagggatatgccgaaaatcatatcgttcagagaatgaaataccgcatctcggagtaactgactgtcgacgtgcatggtttgaaatctgatatccacgcccatcatgcctagcaaaattacgggaatggggttcgaactatttcgcctcagccaactgggcttccgaatgctcaatgctgtatgcacttagtgtgtggaaaccagccaatcattgaccaatggcaggccgcagtcgaaaccagaaatatcctcgctcgcagtcaggtgccgaggctcagtgaagttggtcacgtccatatgggatcacgctccaacaattcattcagacgtaggcccataggttcgtttaatgctgcggtgaaatcattccacgctttactgttgagccgaatgatatgagcttcatggatgtcccgatctgcggcggcgagcagattcgataatgcccattgcaacgaagtcatgcctttggactcggccgcttggtcgattctggaacgttgctcttaggtgagtctcatttcaaaacgactgttcttgttattctctgtaatcatgctcctgttgtacgacttttgtacggacacgattggtgtgtgcgggatgtcgattgcgatggccatgtgggctcctttgcttggtctgttgtggttccagcttccgaaccggtcttccactgttcctcgtcttctcgagcaatgaacatctgatatatggattgtcgcgtcgactgcgtatctctaatccttgcggatgaggagcgggccggtgatccagaaaggttcataccgcagcccgatggtcggctgggcgttcgctccgtacgctcgggagtatgaacacagcagcatcgcaattgcagcagcctcagccggcatcgggaccggcggctcagcctcagcagtctcagcaaccccaacagttccagcagccggcatcgcacacccagcagtgggccccggtcatcgaggcgcacgacctggtcatggactacaccgccagcatggcccgcgcacaggcagggcacggcgtcaccggcgtgatgccagccggcacgggagccggttatgcgtcggcgaatcccgctgcggccggaccgggtgccattcaggccggccagccatcccagccagcccagcccggcttcgccatgccgaccatgcacacgctcgccctgaaccacgtgaacttcacgctccgggagggtgagacagtagccgtgatgggcccgtccggctccggcaaatccactttgctgcacgcactcgccggcatcatcaagccgaccgccggcaccgtcatcttccgtggtgccgacctgagccgcatgagcgacgccgagcgcaccaaactgcgccgcaacgccttcggcttcatcttccaatccggccagctgctgcccgaactgccggcggtcgaaaacatcgccctgccgatgatgctcgacggcatgccctaccgcaccgccaccgacacggcgatcctgtggctggaacgcatgggattgcgcgcgctcgccacgcaccggccgggggagatgagcggcggacagatgcagcgcatcgccatcgcccgtgcgctcgccgtcaaacctgccgtggtcttcgccgacgagccgaccggcgcgctcgaccaagccaccggccgcgaggtcatgggcattctcatggccgccgcgcgggacaacggttccgccgtggtcgtcgtcacccacgaccccaacgtcgcttcgttctgctcgcgc

SEQ ID NO: 701 - DNA, 4816 bp, Unknown
  R14_15m  MAG No. k141_30949
accggttcaaatccggttgggggtacgacgaacaactcttcggagttgctacgccaagccaaattggggtgtggtgtaattggcaacacagctgattctggttcagccattcttggttcgagtccaggcaccccagccaataaccctcgcggattagcgagggttttttgtttttacacgtcctgctcatgagatacggccgagagggtaatcctgaatagacaactctggggcaaagactgggctatagtcccaatccgtgactcaaaaacggcagaaatcccgcgtccgaacgtaaggggcgcgggatttctgccgtttcgggccgtgcaggaccggccgacatcgcgcgttgccgcgacttgagcgctgtccgatcctgaaaacgtgagggagaccgccctcgtcttacttcttgaccgcgttgacggcgtcaacagccttctgcagcgacgtggtgtgctcgtggtaccacgtgacctgctgttcgagtttcttggtcgcggcctggtagcccttggtgtcgtcggccacgcagccttcgtacgtcggcagttccacggtcagttccttggacagcgcgtcgagagcggaggcgtccgagacgtctgccttggtcagagcggcggcttctgcagcatcgccattgaccaagttgttgtagtcgttggtggcgttacgtacgtcttccgaggcggcggcgcaggcggccactgcactatcgtactgagacgcgctgtatgcgcgggtgccgaacaccgcgaccgcggcgataatcgccaccgccacgatggcaatcactatagcgacccacttcgtcactcgcttgttgtgcggctgtgccgtcgcttctgcttggttctgggattcgggctggttgccgttcgcctgctgtgcgtcagtcatatttacctctacttctcactgcccctgtttgtatcttgcggagggcctgtttcaaacaacgggtatccaacatatcgaggagagccgagattgccgggcgtttcctactggttgcgctgtggcgtggccgtttttgtctcatatggcgaaagtatgcgccagaggctattgccggccggtaacccacggcgcatccgaatggacgtgcggaatcatcatcgcgatgaccgccagcagacacccgagcatcaccatcaagatgatgttctcgtgtccgtgcgcctgcagaagcgcgccggtcagcgcgccagacgccagcgccagcattacgaccgcacgccgcccgagcttcgactgctggtggccgtgtgccgaagcgtctgcgacgacgccggtcagcgtcatcgtgagcacggtggtgggcaggtccggcaccgacagcttgcgggcggtggagttctggatgcccattgccggggcgagcagcacgatcagcaggatgatgtgcaggtcgatgtgccgtgcggtggggaagttcaggctcggctgtgaggcctgtgaggcctgggtggtctgtgcaagccgtgcaatcgaggagacgccggacgcatcgtctgcggggccggtgatgagctggttcaaaagatagacgccgattagcgcggcgagtacgaacgacgcctgcacgcaggtagaaaccaacagatgcttggcccggttctcctcgaatcgccggatgatgcgcccgccgataagcgcgccgaccatgaaggagacgagcgtcagcgccgacgtccaccagacgaagccttgggcatgggcgatcgaaaacccaagaaacacgatgttgccggtcacgttggccacgaacacatgccccagcgacaggtagctcagcgcgtccaccagcccggcgacgaacgtcagcaccaccaaggcgggggagagcagaccgtatctgtcttccttgcggggaaccaacgtgcgtcctgcttcggcaagatgtgatgtcatggttgcgacgaggctccttttcgggattgaaattatggcgagaacgtgcgtcggtcgacgccgccactctactccctactcccgtacggttcctccggtttccgctcgtgcgcagatcgtcgggacggagaagacgccggtgatgcagatcgatgtgccgaaatcccgcagcgtggtctcgaccaagtcgggcaaggtgttgcgacgccgtatgaaggtggatggtacgccggagagcgtgccgatgtacccgtacgagatcgccacgcgcctgtccgatttgggacgtttggacttttccgcgcagccggtgccggatgcgacccgtgatgatttcgatccccttgaacgcgaccgtctgcgccggattatcggcacctaccaatccagtgaccgtaatttgttggaactgaccgatgaggagctggagaaatccctgcaattgacggtgaccgtcgatggcaagaccatgccgacgctgaccggtttgctgctgctgggcaagggggagtctctgaaacgcttcgttccgactcatcgggcgtctttccaagtcatgtctggtacggatatcaaagtcaaccaagactatgccggaccattgctgaagaccatcgagcaaatcaacgacatgttctctccttggaatccaagcgtcgagctatccgtcggtctgttctcaatgatggtgccggaattcgaccatcgggcgttccgagaggcgctggtgaacgccttcggccatcgtgactacaccctgctgggacgtgtgcgcgtgcagttggatgatgcggggcttaccatcgccaatcccggcgggttcgtggagggcatcaacatccataatctgcttaccgccgaaccgcatggccgcaatccatgcctgatggatgctctgaaacgaaccggattggccgagcgtacgggacgcggcatcgatcgcatctgcgaagggtcgctgcactatggacgtcccctgcccgattacacggcgtcgaatgagcgtaacgtgtccgtgtacctgcagcgcagcgcacccgacgtcgaattcgtgcggatgcttgccgaggaacaggagcgcaccggtaagactatgccggtcaacggtctgctgattctgaatatgctcaggaacgaacggcgctgcacgttcgagaccatgaacaagaaactcgatatgagtgagcagcgtctgcgcgctatgctggggcagcttacggaatccggcatgatcgaaggttctggcaacggttctcggcggacatacactttggggtctacggtctaccggcgcaccggcaagaccatcgagtacgtacgtcagacgggcatcgaccgtgtgcgatggccggagctcattatgaaattggttgcagagcagaatgatgtcatgcgggcggatgtcatggaactgctgcatgtcgatgcgaaccaggcgtactaccagctgtccaagctcgttaagggtgggaagctgagggtcattggccgtggcaaggggacgcgctatacgatcggtggcgttaccgggcgaaagtgatgtgctggcggatgtgcctgtatgggtgttttgtgctgggcatcgtccgaacttgggaagtcgtttcggtacttaggaaggtacctaggaacctaggaagtggtgtgggtaaggttcctaggttcaggtatgcgttcgtgtggcgttcatcggagggggtcagggggaaccttcgcgctgggccgaccggtattcgctgcgatgcgcttgcgatacggaggctgggattgttgcgaaccaaaacgaaaaaaactgcgcggagaacacacggggaacgacaccatgggcgctgcgcccgtccccgccagcccatcaccctccacccgcgacgaggttgcgcgaagcgaaaaccttcccgaaccatatcgcggcccgagtcgcgccatagttgcaccacaagtcagaccaccagcgcgaccggcccgcgaaaacggcggttttccaacgcccccacaagaaaaagataggcgggaagaatagaacaacatgatcgagcggctgaacagggagatccgccggcgcacgcgcgtggtgggcggcttccccgacgggaacagcgcgttgatactcatatgcgcccgcatccgtcacgtcaccgcgaacgaatggtcgacccgccgctatctcgacatgtcccggctcggtgacaacctcgtggaagcgaactgactatcgcgccatggacggccacgatccaaagtgcgcaacttttcgggcactaccgccattcggcaggtggagcaataactggtgagaatggagtgctctgggagtgcccgaaaagctgaaccgagataatgtcgttttgaatcaagcaaatgatggtggacgaacattccatgcgatgtttgtccaccaccatttgcttagggttatgcctttgcgttactccgcttatgttcgccccgttcgatccgtttcattgctttgtcccaaaccagttcgaaccagtggccacggttgcggtttacggtcactgcaaacagtccttgacgcatgaagtcaatcagagtgcagacacaaaatagatagtcaacaggatgccgaggatttgcagaatggcgaaaagctgctgatagagggtagcccgaaagattgtgcacttttggtcatggccgcccgtggcacgatgatcagttcgcttcctccagcgtgccgccaagccgaggcatgtcgaggtagcggcgcgcgttccacttgttcgcggtcacgtaccgtatgcgcgcgcatgcggtgcctgaacgtcgaggcagcgatgtcatctcaatcctcaagatcagaagcgaacttccctctccttcaatcttctagcagatttagtacttcatcgactgagacaactgtatgaactgtgcc

SEQ ID NO: 702 - DNA, 19525 bp, Unknown
  R14_15m  MAG No. k141_31330
cctgttttccccgacatctttagggacatggccgaacggccaattcccatcgcttcggccaagctggactgcgaataaccataagccgtcaatagcattttgacattgaaggtgattgtcgactccagctgcttttgataaggggctgcggacattttcttggagaccgaacggaaagattttcgtatgttcagtcttgaggaacgagagcgtgcggtggagttgtatttcaccacgccgatgacgacggcccaggtggtggagcatctgggttatccgaccaggcagtgcctggagcgttggctggcgatggattcccggtatgctggccatatggccaaacccatcatcccactggagaccaggcgaagggcagtcgagctggtgctgggcggcatgcagcagaagcaggccgccaaacagctcggcgtgagcgtcggcgcggtgcatggctgggtcagggcgtaccgcaagggcggcatggccgcgttgcagcccaaaaacaggaactccgcgcagggcaataagcccgctgactcccgtcgccggccgtccgcagccgatgatgatgacgcggaggctttgcgccgcagggtcgaggaaccggaaccgggggaacgcgttgatgagggaggtggcggaggctcgcagaaaaagaccccggcgccgacctgcggcgcctgtcgaacagggagaagaccctgttgatcgaccggttgaggccggcgtattcgcccggctcgatggcatgcttgcccggcatcgcgccgagcggccacctactgccaccacgcccggctcggagttgacaagtacgccggactcggggcggaggtggccggggcgttcgccgattccaagggcaggtacgggtaccgcaggatcaaggcggtgctcaagaccggcgtatcggagaagtcggtccgcaggatcatggcggaggaagggctcgtggcgcatgtgcccaagcgacgcaggtatagttcctacgagggcgagacgacgccggctcccgccaatctcgtcgaccgggacttcacggccgagcgtccgaacgagaagtggctgacggacatcagcgagatcaaggccagggacgggaagggcgtgcctttcgccgccggtcgactgcttcgatggcaagatcgtcgcatacaccgccggcttcagccccaacgcggagctggccaaccggatgccggagaaagcggcctcgacgctgccggggaacgcgcgtcccctggtgcattccgaccgtggatggccattaccggtggcccggatggctcgcgctcatggaacgcttcgggctgacgcgctccatgagcgcgaagggctgttcgccggacaacgcggccgcggagggattcttcggcaggatgaagaccgaggcggtctaccccgagaagtgggaggaacacacccgcaacgaggtgctcgccttggtcgatgagtacatacgctggtacaaccacgagcgcatcaaacagtcgcttggttggatgagcccggtacaataccgtcaaagccagggaatggctgcgtgattatctccaagaaaatgtccgcagccccttatcccctaccccttgtggcatgattggtggcggtgagatcaatgacgagtccggcgaaacgtcaccagtcccgacacgcggatttatttggcgaaagacatctttaatgagccgcaagcgctaggccaacacttgcggctcacattatagataaaactagtccggctttaccagacagatttggttatctaattattgttattactctttatgggaggatagccataatatacggaaccgtaatgcggtgaagaagtattgtactttaacaacgtgtatgattctgcctcgccaactttactgctgccactagcaattgaattccaaatttttgaagcgaaagtagaacagttgttaagatagccccatctatcgttatttttaatattagaattcactgtatctaaatcaatttgccttaagggtaattgaatggaaacattctgaagattaataccattggaattaagcttcgaataaagattgagccacagacccttatattctctactgacatctacggattcatcccaagtgcttgctgttatagatttaccatcagcaacgttaatcccagcaatgtctgccgtagaaccagacaggtttgtgatcataagccaagaatgaccgagattcgtgaaactagatgacgagccggatcctgtagtagaataaatccgcagtaaagctacagcctctgcagcgcacgttttgtaattagcaccccgagaaggagatgagataattctcagatcttcgttatctgaggctttctcaagatcttccagagaagcattagacggaaagctggatagggtaggactcctatagggagtttcgatagattctgctgccgacgcatttactgtcacagttccagccaatattacagatactagagcagtgacaatttgtttgagtttctttatttatttctcctttttgtcaggaataaaatagtttcgatagcaccagcagcgacaaggaagggaaccgctcgtaaaaaataaagatatgaaggaaagctagacacgtattctggatgcaggtagtcaaaaataaagccgcttactgtgcgtaggagtccggcacacactaggagacctgcaagaatgtggcaaattcggcacatattgactcgattctcgaactgcggaggagtgagtcctattgtagtagggcttgccggagaggccaggcccagttcaaggagcggaaggcttgcgtcgctcctgcggaatcgacgagaaagtgttccagcctcctggtgaagagccacgagcaccctgcttggggacccgacatcatcgatgtacgacatacggcatctacgacttcgcccggttcgtgcagacgcttgaaagagcgagggtcatacaggcctcgtggaggcgcgcgtcttctcctttgtgggcgtttgggtttttctggtggtggtcttgatggactggcgtgtgcctctggaatgatgatatggaggtttcattatatcgtccgccgtctggctgggttgcattcgcgggggattggcgctattctgtaacagcgaaataagctggacttcgttcggttcgctgaggccattccgtggacgcggggtggcctcagtgctttcatcgctggattgggggaggtcggatccatgtcgttgcgcaagccctacaggagtgtgaacgaacagctgcgcattctgcgctcccgtggcatggccgtcgatgccggtgcgggtcatgtgctcaggcgcgagggctattatccgatcgtcaatggctataaggatttgttcctcgaccgaaaggcatgcctgaccgctggtgatgaccggtacggaacgggcgcgcgtttcgatgatctgtacgccctgttcctgttcgaccgtgagttgcgtgaactgttgttttcctccatcacacgggcggaggccgcgctcaaggcagtgtgcgcgcatgagttcaccgggctgcaccccgacgaggtcaacccgtatctcaatcccgactattatgattccaggtgccgtccgagcgccatggcattgatcgacaaggtcttcaagcggatacttgagttggacggcaacccgcgcaacaggggcgactatggcggcaaggcgtatatccgccattgcatggaagaccacaacggccaggtcccgttgtgggtgctggccaacgatctttccttcggccagacggtatggttcttccaagtccagtccccggccgtccgattggcggtcgccgaaagtttcaccggtttgtatgcggacacgcacgacaggccacggcgcatcaccatcaagcggctggacagcatcttcaacagactggtgttctaccgcaacctgtgcgcgcatgacgagcgctgctattgtgcccggtacgatgggcgcgctaacgagaacgtgtatcaggccatcggtgatcttggttatttgcttgacaaggacgattacttggaattgttcggtcgcttctccgcattggtcgcacgggtgacctccaccatgccatcgcggagccaagcgatcctgtctgccatgggtgtgcgcgaacgggaactggccgacagggcggaaatcatactgcgcagctgaccgttcctgctattgggacggtggcgtcgcaggcggctttggaccatgagccagctgatctgggctgtctgcaatgggcctgtgggattcgggatggatttggatgccattggcggctgggacggttgcacgggctgcgtatcgttctgtctattgtccgccatggagacatgctgccgggtgaatgcttctgggcaccacccatgcggaacatcatgaaaccacagggggtattgcgcttttccgtgccggtcggcgaagacgctgagcgccggcagggtggtggaacgttcccggattattcttgggtgcctgtaggtgcctcgtggaaaacgagcgtaaccggcaggtttcccaaaaattgaaaaccttggaacaaagccaaaaacgaccacatgcgattatcatcagaggtgcgcatgatgatggtagtcatggtcttaagtgtctcatgtgcttgagaccgggtggtgatgcctgattgcaggaatgcgggttgtgattaggggcatggggtagccgaccaccaagattgagaccaatgcattgggtaacgatgcggcgagcggttccggcattctgccgttggaccgtgactgagatgccgtgttcttcgataatttgtgtcacgttggccctgtagatccagttctcgccacagtaagcgcccgatgtctatttagaggtgcaacacccctgttggtcctgcaattctagcagttcgtcggcgaatgcctcggcgggcgtccggtagtccagcacgcgcatgggacggttgtcggcctcgtcgacaatctcccgcagttccccggccatgcccatccggatctcgctgcgtttgggcagataccggcggatcatgccgttccggttctcgttgcttccccgccgccggctggagtacgggtcggcgaagtacgtgtccatgcccggcccgtcgcgcaggcgcgtgtggcgggcgaactcggtgccgttgtcgtgcgtgacgccgccgcgcgcgccggccggcagcggcgagaacatcgccagctgcgccccgacgctttccccggcggtcttgccgggcacgatcccggccatgaggaacctggtcttcctctcgacctcggtgtgcgggttgcatccggcgccgatcacgccgtcggcctcccaatggccgaaaccgctgcgctctccggcctccggcggacgctcggagatgggaacccgtccgggaatcgggaaacgcgacgtcctcctgccgccacgcctgcgacgcctcctgtggccgcgtggaaggcagcgcgcccagcgttcacggcgatggcggtcggcgtggatccaacggtagacggtctccgggcacacgcgcatggcggagtcgtcggggaacaggacgcgcagcctgccgctgacgggcagcggcgaccagccgcgacccagccattcggccacccgcgcccacaggcgttcgcatgacaggcggtagcgcttgcgcggtttggcgcgcctgcggtcggccttgcgccgcggcggggccggcgatgtagtatccgcccgtccatgggcccgtcttcagccgtttcggccggtacggccgtcaggactcgttctcgttggacgggaaccacgtgtcgcgtttgatctccctgccgaccgtcgaggcgttgcggccgagcatcagaccgatcctgcggatgctggtgccgttgccgatctcgatccggatgacctggcgttcctcttccgacaggtgcgaacatgcttccccccataggtgcaacatcccttcggactggttatccggacaatctccaatctaacgggtgttgcactttcaattagacaacggggcgcctgacatttcaccaagggcggcttataatggtggaatcagcatatagagattggggttacaggagggtgattgtggaaaacaaaggttggagaattttccaaatcattcaattcatattgttcttatgcattagtgtattccttttcataagaacagtggacgggcatggaactgtacagacactaggagtaaagctgattagtttttccgtatgggcgcttttctaccttggtatcttagccatagagtggttgatttactgtattgtccgacatgctaaaaaataaattgatatacgaatttgctgaactaatagaattcctttagtctctaaggggataacgaccgaattcttgcgcatttttggattccggccttgatggaaaaggacatgggccgtgccgggtacgattttcagtcgccagacaatgaaaaaccgcgattggaaagaggcatggagccatgtccaaggaaatcatacagttcgaccaggccatgttcgagagcaagctcgacgccatggtgcgcgagaaggtcgagcggatcgtcaacgcgatgcccgacgcttcaggcgaacgagatcgccaacgccgcgagatacgagcgttccggctgatggtggccgaccggtggggtgggaatcagttgagattattcttgggtgcctgtgggtgcctcgtggagaaacgagggtaatcggtaggtttcccaaaaatcgaaagccttggaacaaagccaaaaacagttggctaggattatcatgcgaggtgcgcatgatgatggtagtcatggttccaagtgtctcatgggcttgagaccgggcgttgctgtttgattgcggggaatggcacagagggcccgtggactggcttcgaccgatagccgggaagccgagccgcagcgtgaagcgtcatgcgagttgtctcgcgatggccaacgcgccggcaacgaccatgagcgccgagaagacacgcagaagagtccttttgcgttctcttcccggtttttggatccgatcacgacgtatatcaggaccaatccgacggccagcggcaccaaggccagcggaaacagcggttcttccatggcatctcatctcgaatgctgtggttcagatttttcgatgttcggtttttctgcgcttactgacaagagccatggagcagcatgccgatacgcacagattcactatgcaggtcgccgccggcagtagccgtatgaacggctgactgtagaaatcgaggacatctggatccatagatcctgagtatatttcaaaaaccggatatgatgcgagagccggcgccgaactcacgaggaacagtatccaaatgacgggcaatctcaggatggatactgttcggcctttccgatggacttctttcgagaacatgaaaagagcccaagaggtcactgcgattaatgcacccgcgcaatacaacagaccagggaactcgctacgcatgattccgtcctcacttcagtcgcaggtaatttggcttatcgatcttctggctggttcgagattaccatacctgacatggcagtcgaattgcctgttgtctattggcagagcatccgactgttaatcggacggtcgctggttcaagcccagccgcaggagccagacaaaaacccggaacttcggttccgggtttttgttacccgccccccgaaactcctttatcaaggaatcatccataagggatgccgcagcagacggtctccaaggcactgcaccgtgctcatccccatggacgacggcaactggcacgtcaccgtgtactgtcccgcctcgctggacagcccactgctcgacaaggattccaacgaattcgacacggacgacgtgaaacccggcgacaagtcgtacaccgttgccaatccattccacctggatcacgcacccggaacagacggtttcatcttcggccctgacaccctccgacgatagcgatggactaaccattcaaccgcacgcgtaggaggagcgcattccaaccatgaatgaatgacatatagacgtcaagggcttgcggacatcgtgtccgcaagcccttgacgtctcaatccaacgaaatatcgacttttacccgtttgtcggattcaggctttcgcgcaagtccggcgatgaggagggccaccagcagggggatcgttgtcagtgtaccccaggaaatcgagaacgtgtcggcgatgtagccgcacagcggggtgacgaccgcggtgaaggccatcaatacgagcgatcccacggagaacgcggtcgcgcggatcgaatcgtcaatgctctcgtgcaagctgctggagatcatgttcgccacgtacatctgcgcgcaggagaacacgaagaacgccaggatcctcaccgccggcatcagcgtggccgcaagcaccaccgccgacacgatgagcacgaggatcgcaatgtcgccggaacgtggatgcagccgtagcatacccagacgactgccgacgatctgcgcgatattagtgaacactaggccggcgaactgccaccagaccccggtctggtggcccatcagcagcagctgccagaacgtcagcaccgacaacgtacccagattgaacaccaccatattccatatctccggcttccgcagcagcacggccgcggccgccacggtctgcctgacatgatccaacaccgtcagcgaggtcccggactcgcccggctcggcggatccatcggattcgacggacgcctcggcctgccgttccgtcgtcccgctcccatccgtcgctgcggccttggtgcgcgacccggccctcatcagaccgagaagcgggatgatcgccaatacgtagaacaccgtcgcgcccagccagatcagctgggagtcaagcaggaacagcacggcaccgaccgcaccgccgcatatcgtgcacacagcgatcatcgccgacagtcttgacaccaaggtcttcatacccagcgagggatcgtgcttgcgggcgtattcgatgtacagcgaggacgccgcgccgctttcgaccgcggccccgatgccggccagcacgttggccaggcacagcacggcgaagttcgcggaccagaacagcatcaatatgaatcccgcgacgcggcacaacacgccgatgatcagcgtccgttcccgggaccaccggtcgaacagcacggacgtgggcagctcgctggccgattcgctgacgtcgaacaccacattgacgatggagatcagcagcaccgacaggcccacatcatgataggccaccatatagtagaccgaaaaacatccggcaccaagataaataagcgcattatacaaacaggcaaaccgaaccatcaatcattcccttacataaacaaagaaccggtatacgtgggactgtctctcgaagtgtgtaactggccttaactggccggtcgtgtggccggtcggaaaggctggtggacgatgtgtgctgggacaatgggaaacatgacaccgacgaagaagccggacgcggaaaaacgcaacgccgagcgggaggcagcgctcacattcgtgcgcatggccaaggaaaaaggactggacctgacagggcccgacggactgctcaaacagttcaccaaaagcgtgctggagacggccctggacgaggagatgaccgagcacctgggccgcgccaagcacaagaaatccaaggacggcagggccgcgaacacgcgcaacggcaccaccgccaagaccgtggtcaccgattcggtaggtccggtcgggatcggggtgccgcgagaccgcgatggctcgttcgagccggtcgtcgtcaggaaacggcagcggcggctgcccggggtgggcgaggtggtgctgtccctgtatgccaggggcctgaccaccggcgagatcagcgcccacttccaggagatctacggggcggacgtgtccagggagaccgtcagtcgcatcaccgagcgggtcgtagccgagaaggatgaatggtgctcgcgtcccctggatcgtgtgtacgcggccgtgttcatcgacgcgaccgtcgtcaaggtgcgcgacgggcaggtcgccaaccgcgcgttctacgtggccgttggcgtggatctggagggcgaccgcgacgtgctgggcatctgggcgtcgcccgccgcggagggcgcgcgctattggctgtcggtgctcaccgagctgaagaaccggggcgtggacgatgtgttcttcctgatctgcgacgggctcaaaggcctgcccgacgcggtgggcgcggtatggcctctggccatcgtgcagacctgcgtggtgcatctgctgcgcaacacgttccgccacgcgtcgaagaaggactgggacgccatcaaacgcgatgtcaaacccatctacaccgcggcggcggcccgcgacgcgatgctggacaagtgggaggcgagatatcccgcgatccgcaggctgtggatggacgcgtgggaacggttcataccgttcctggactatgacgtggagatccggcgcgtgatctgcacgaccaacgccatcgaatcgctcaacgcgagattcaagcgctccatccgcgcccgcggccacttccccgacgagcaggccgcgctcaagtgcatgtacctgaccgtccgctcgctggaccccaccggcaagggacggatacgatggagcgcgcgccggaagcccgcgctcaacgcctttgccatcaccttcgccgaccgctggccaagcgagggaacacaacaatgaaaacgccagttacacacttaacgagacaggcccgcgtctgggccggtggccggcgatccgctggtgccgctggtgccggtgctggttgaagtcgattccgacggatctttttgcgtcgagccggtgccggtgccgttcgaaccggtctggctgccgccgacgccttggctggtcgggtcttcggtggtcggattctttgaggtgccggtgccgttcgaaccgttggcggtgccgtcggttttcgaatccgaggcgccggcgccggtcgaacccgaggtgccgttggcgtcgaggtcggtggagggggcgtcggttttcgaatccttgctggttcccttcgaatcatcgccggtgcccgtctggggcagagcgttgttctgatcgggggtgcccgttcgcgtgccggtgtcgttgcgcgcgggcgtggtcgtggtgggggatacgagattgtccgtgccgcgtccctgcgtggccagcatcacgacgccggccgtcaccgccacggcgagcaggccggacaccaaggtgacgatcatggcggtgtgcttcgaagcgcggaagcgggacttgcgcagctcatcgaccgagtacgtcctgccgttcgcccgactgaacacgatttcacgcggtctgcgtgtggaggaagcatcatcggcggtcacgcccgtcgccgtatcgggctcgtcccgaacgtcggtccggctgccggccgttcggggggtgccgccatcggcatcgccgttctcggcgtccttcgtgatcccgttgccggaggacgaggccgattggagtttttcgccggaggcggtgagcacgttctggtagatcttggtggccacggcggagacgacgtaactggccgccgctccgatcactgaaccgccgatgccgatcttcgatgcgagcaggaacgaggtgacggcggcaagggtgcccgccacgatggatgagagggagattccttcaaaaaacttcttcacaatgcacgaccgtagggtgtcgggctgacaggttgcctgagactcgatggaagcggggcgaggcctacacgagaccttcaaaatcggccttcgtgcaggtccgacacgccctgcagcgcacacacgtgcgtttcgcgtcgccgcaggccgcgggacatcgtcaattacgatgcagcgactgcccggtcggtctgatcaccgacatcagtacggcggcgaaaatcaaagcgaaacccaccagtgagctccacatgatcctctcgccccagaacaaagcggaaaacgtgacggcgaacagactttccgtacacatgatgattgacgcctgcgaggcaggcacgtgagccagaccgatgttctgcatgatctgggcactcatcgtggcgccgaggaacagatagagcacgctggccactactgagggtgccagccagctggcgttcggcatgggttcggtgaacaacgcgccgatgatgaacaatacgccggcaacgccgaactgcacaaaagtgacggcgatagggtcgaagcgtttggtgtagacaccaaggcaggtcagattgaacgagaagatgacggcggttgcgatggtcagccagtcgccggcgcccagcgacaacgaaccgcccggcttcaacgagacgaagccgacgccgatcagacagatcacgccggcgaccagattgatggccttcgggcgggttttcgaaatgatccacgtggcgaacggggtgagtacgcagtaggcggccgtcaggaacgcgctgcggcccggttcaatggtctgcaacccgacggtctgggtgaccatcgtgccccagtaggtcagacccaccacgagcgccggcacaatgatcttcggcgtcagatacggcacgatgtgcttatggaacaaggccagcatgcacaggcaggcgcctatcatgcgcagacccatcagccattggggcggaatcgcctccatggcgaatttggcgagcagataactgccaccccataatgcggcgcagcccagcaacatgagtcgggcgagattcgggggaaagctgcgggaccagcggctgcgcagcttgctgaaacgttcgaccaaacccatggtgcacctcaggacagttaggaaaacttgtggctctctcggctcacagattacgggaactaccggccaaaatcgaccggtcgatgggcgtcgggtgtgtgacaggtgtgtggctggtgcgcggccggggcgcggcatcgccaaacaggtaagaaccggatgaaagctgtgcgaaggtgaggttactcacagcgaacatccgggctagtcgcgctcgaaaccggtactctggaaagagtaaaaatacgttgtccatagcaatcatgaaaggattcgacatggcagtcattactccggaaatcaaggaattcatcaagaacaacctcggttggatcaccaccgtctccaaggacggcgaactggacctcggcccgaagatgtccctgttcgtgctggacgacacgcacatcgcctaccacgagcgcaccgccggccagcactacgagaacctcaagaacggctctccgctggtcatcgccttcgccaacctcgagaagaagcagggctaccgcttccgcggcaacgtggtgctgcacgttgacgacgacatctacaacgagcaggtcaagatcgccgaggaaaagggcaccaagaagccggccgtgattccggttctcgaagtcaccgagatccagaaccttgcctccggtccgaccgccggcaagaccatcgccaaggactgattagctgacgtattggtggcttcctcgtcagagggagccactttttcgcttttcagtgcgcagtactaggtgatggcctttgaggtcggtggtggcgaagaggtaggtgttgccgccgtccttgagtttgagttttttgcgcagctgggccacggatagggggaaattgcgtacggcgatgttggcgtgcgtgagaccggccaatagctgcttcagttctttcttgttcatggtgacgatggattcgatgacgaatgatctgcctggaaaatcggaaataggttcagccgccacgaacaggtggctattcgggctgatgtgatgcacgacgaagcgctgttcgagaacatcaaagcacccggccttcatgattgaggcgttgggttcgtaaaggtacttccaatgcgaggaatcgaagccgttcgcgctttcctcagccgggaaatcctcggtattacaggtattgcgtgcaaccaaggcagaatcgctgataggggtgtgattgtcgctgttatcgccggccttgtacgacagcacctgcccgtcattgacgcataccacgagcggtgaggcgcaacggccgcgccccaacaccaacaacaattccttgcattcattcccggtggagacgatatgcacctcatgcaccgcgccggcgaaatcggcgacggtcttatgccagtcgagcatgggggagagcttgaccatgaccgtcggtgccttggccagcagcgtatccttcagggtcagcacatccggcgtgcaatcggcaatcgcgtaggtacgcgagccatgatcgtcacggcgggccggatcgaggaagatcatggagactcggccaagcgtatcaagcactgctgttgaatcatcattgatgacttcggcgtggccaaggccgagtatcgggaaattatggcgagcgataccacataaaatggattgttgttccacatatatggcatggtcaaacactcgggacatgtaagaaaagtcgacgccgaaaccgccggtcagatcgactagggatgtcggggaatcgtcggcgtcgtcgactgcttccccgtccaacaatcgctgtgctaaccgggctttgtattgagccgtgaactggctggaacattgttccattgggacttgcggcgggaaaatcagcccatcatgggacgcccagtcaggtagcttgagcgaagcgcgctgccagccggcaatctgctccagcgcgaacggcacatccacgtcgccatcatgcttggcgtgcaaggccacatcacgcacatcttcacggcggtgtttggcgatgaacgcccaagtcgactcagaaatctccatgccgccattctaggggttgtgctgagatgagtatgaaaaaaccgcaagagaacgaggtggcgaaaaccgatgatcgatgaagtgatgatgctgcgccatggccgtacgcaatacaatctcgaacatcgcttgcaaggccagatcgatgtgccgctcgacatcgtaggccaatggcaggtcgaccagaccggattcgcgctcgcttcacggtactactgggccaaggtgaaccggcttgccgagcatcccgaagccatcgcccagcccggtcctgacgccgccgaacgcactgatacgcgacagttcgaggaggcccccgccgccggccggcgcatggtggtgatgacctccgacctgttccgtgcccaacagaccgcacacgccttcgccgatattttgggattgccggtcacctgtgaccaacgactgcgtgaacgcagcttcggcgagtgggaaggcatgacccgcgccgaaatcaaagccgtggcagccgacgactacgcctcttggaaacagcacaccgggggcgaaaccaagcatggtgtggaaagccgtgccgccgtgggccagcgaggtgccgatgccgtgcgcgcactggtcaccgactccgcctattcagacagcatgcccaccacgctgatgctcgtcacccatggctcatggattaccgccaccatctccaacctgctcgaactcgacccggacggcatgaacgcactcggcggcatgcgcaacgcctgctggtgccggctcaaagtgcgccacagcgtcaacggcatccccgccgaacagcccctgtgggagttggaggaatacaacaaggctcccgccatcgccgacagcgccgactgggagaacgggccgaccgatctgcgaggaccgcacatgccgagttggcagccaatcgtctggtgacggtcgctatgcgaaaccccgctcgcaaattcgaacggtgggtctagactaatctcggtttggaaccgtacagcgatagaacagtaggaaagcgcggaaggcgggtgaggcgacatgctgagaatcttcagctcaatcaatggccaggtggagcagatcgagaaaccggaaaacggctcctggttatgtttgagcgaacccactgatgtggagctcgccaccgtcgcctcgcagaccggcatcgacctggccgacctgcgcgcccctttggatgacgaggaacgttcacgtgtggacgtcgaagacgattacacgatgatcatcgtcgacatccccaccgtggaggagcgtggcggacgcgactggtacgagaccatcccgctgtcgatcatcgtcaccgaaaacctcatcatcaccgtctgcatgcaggacacgcccgtgctccacccattcatggaaggcacgatccgaggcttcaacaccttcatgcgttcgcgcttcatcctgcagatcctgtaccgcaacgccacgatgtacctgcgttacctgcgcatcatcgaccgcgaaagcgacaagcttgaactgaagctgcgccactccatgcagaaccgcgagatcgtgatgctcatggaactgagcaagaccttggtgtacttcaccacatcgctgaaatcgaacgagatcgtgatggagaaactcaccaccctgcaacgcatcaagcagtatccggacgatgaggatctgctcgacgacgtcatcaccgaaaacaagcaggccatcgagatggccaacatctacagcggcgttcttgcgaacatgaccgacgccttcgcctcgatcgtgtccaacaacctgaacaacgtgatgcgcatcttcaccatcatctccatcaccctgtccatcccgacgctgatcttctcgatgtacggcatgaacttcgacggcggcatgatgggcatgccgttcaccgacaagccttggggcttcctgctcatcatcgtgatctccatggtgctttccggtgtggtcgcctggttcctcacacgttcgcgcatgttcaagtaaggcgtttgacggttatgcaccactggtcatcgttcgtcagccgtagcatgctccgcgctcgccgcccgatgcggcgcggatttcgctcccgactgatggcaggattcgccgcggcctttggcgtgatattgtcattatctggtctggccggttgcggccaaattcaagtcaccaccgtctccggagcgccggagggacccaccatcgccattggggtcgcagccgacgaaccatcggtgggagcatggcatgacggcacataccagggcttcgacatcaccatcgccaaatacgtggccgccaaactcggctatgcgaacaagcagatcgtcttcaagcaggttcgccccgaaaaccggcgctccatgctggacaatggacaggtcgacatggtcgtcgcctcttggcctatcaccgatgggtccagcgcgatcgttgattttgccggaccatacctcacgaccagcgtcggtttgctggtcaggtcggatgagcgtggccgattcaccaatgacgcaggttcggtgggcgacgtaggcgacggcacggtgtgcgcagtgaaaggtgacgagacagtcggcatcttccgcggcaaccacccgcaggctcggattcaggagcgtagcagttatgcgcagtgcgtcacggccgtgcaagtagggtcggcggatgccatagcctccgatatggcggtgctttccggtcttcaagcggccaacgggccccagtatatggacgtgattgcggacaagggcgaggtcagttatggcatcgccgtgagtcaaggcaccagccaattggcgcagaaaatcgcggaagcattggaagacatggttgaggatggcagctggacggccgccaaggatacgttcacaagccaaacaaagctcacggtttcgctgaacggtgaccccaaagccatcgtctcggatgctgaataacgattgacgacgtgtccagttgcgaggctaccttgctgatttatgagtgacaacgagaagagcacgcaaaccgaagagcccaacttccgctacaacgccgcactggcgcaggacatcgaaaacaagtggcagaagatctgggatgagcaaggcaccttctgggcggccaacgtcaacggcgatttgaaggacggcaagggccgcaacgccgaggggcgcaccgcctacttcgccatggacatgttcccgtacccctccggcaagggtctgcatgtgggccacccgctgggctacctggcctccgacgtggtgagccgctaccaccgcatgaagggcgagaacgtcctgcacgccatgggttacgacgccttcggcctgcctgccgaacagtacgcagtccagaccggccagcacccgcgcgtgaccaccgaggcgaatatcgccaacatgagccgccagctgcaccgcatgggcctgagcttcgacaaccgccgcacgttcgccaccatcgaccccggctacgtgcgttggacccaatggatcttctcgcgcatctacgattcctggtacgacgaggacgccaccaacccgtccggctccaagggctccgcacgcccgatcgccgagctcgtggccaagttcgaatccggcgaaaaggccattccgggccacgagtccgatggcaagcagtggtccgacctcactgacgccgagcagcaggatatcttgaacgacttccgcctggcctacatctccaagtccccggtcaactggtgcccgggtctgggcaccgtgctggccaacgaggaggtcaccgccgaaggcaagtccgagcgtggcaacttcccggtcttccagcgtgagctacgccagtggtccatgcgcatcaccaagtacggccaccgcctcatcgccgacctcgacggcatcaactggcctgagaaggtcaagctcatgcagcgcaactggatcggtgaatcccatggtgcctccgtgcacttcaccgtggccactgccgacggtgacaaggacatggaaatctacaccacccgtcccgacacgctgttcggcaccacgttcgccgttgtttccccggaacatcacctgctggagaacgtgcccaccgaatggccggccgatgtacccgaagactggaagggcggctatgccaacccggtcgaggcggtgaaggcctacaggctcgccgccgaagccaagaccgccaaggaccgcgtggacgagggcggtgagaagacaggtctgttcaccggcctgtacgccaccaacccgatcaccggcgcgaagctcccgctgttcactgccgactacgtgctgatggactacggcaccggtgccattatggccgtgcctggtggcgaccagcgcgattacgactttgccgtgaagttcggtctgccggtcatctacaccgtcaagcctctgccggattccggcgacgacttggccaactacgaaggcaaggcgccgttcgtctcccatgacggcatcgtgatcaactcccacgtcgaatccacgtacgccaagggcgacgcgctgtcgctcgacggcctgcgcgtggacgatgccatcgccaaggtcaacgcctggctcgaatccgccggcgtgggcaagggcaccgtgagctaccgtctgcgcgactggctgttctcccgccagcgctactggggcgagcccttcccgatcgtgtacggcgaagacggcaccccgcacctgctgccggattccgcattgccaatcaacctgcccgacgtgcccgactac

SEQ ID NO: 703 - DNA, 5708 bp, Unknown
  R14_15m  MAG No. k141_31608
cgtcgcctggtgttggccgcattggcgtacagggtgaagaagtagtaggagctccacaccggcagcatgacctggcgcacggtgtcgcgaatgccttcggcggtgacgatcaggttgccgccacgcaggagcggcgaagacatgaggaaccagcgcatggcgtcggaaccgtacttgtcgaacacgccgttcacgtccgggtagttgcgccggtgctgggacatcttctggccgtcggagccgagcacgatgccgtggcagatcacgttcttgaacgccgggcggtcgaacagggcggtcgccatcacgtgcagcaggtagaaccagccgcgggtctggccgatgtattccacgatgtagtcggccgggaagtgctgttcgaacttctccttgttctcgaacgggtagtggaactgcgcgaacgacatggaaccggactcgaaccagcagtcgagcacatcggaaatacggtgcatgtgcgacttgccggtcgggtcgtccgggttgacgcggaccaggttgtcgatccacggacggtgcatgttgatgttgccgtccttgtcgcgcggatagtcgccgaagtcggccttgagctcttcgagcgaaccgtagacgtccacacgcgggtacttcggatcgtcgctcacccacaccgggatcggggaaccccagaagcggttgcgggagatggaccagtcgcgcgcgttggcgagccacttgccgaactgaccgtccttgacattgcccgggatccagttgatctgctggttcaattccagtagacgcggcttgatcttggtcacggacacgaaccaggaggagaccggcttgtagatcagcggggtggcgcagcgccagcagtgcgggtaggagtgcacgtagctcttctcctggaagaggatcgcgcggcgctcttccggaatctcggcgagcgggccgtcgccggcgcgcaggttgcgcaggatcggcaggttggcgtcgaacacgaaatcgccctcgtagtcagggcactgcgcggtgaagcggcagccatcgtcgagcacgtcggtgctcttgatgccgtgcgcgttcagcgtattcatatcgtcctcaccgtagggagcctggtgaaccaggccggtaccttcgacggtgtcgacgtagtcggcggtgaagatcgtgtagccgttcgggccgggcacgtggccttcggattcggcctcgtcacccgcgaagtacgggaagaccgggtagtagcgtcggcctgccagctcgttgcccttgagttcgcgcacgacctcgtaattctcgccgagttccttctcatagtgcggcagcaaatccttgccgaggtagaacttcttgccagcgaacttgccttcggtcgggcggacctcgacgtagtcgatgtcggcgccgaccacgatggcgaagttggtgggcacggtccacggggtggtggtccagaagacggcgtaggcgtcgtcctcatcgcgcatcttgacggccacggatacggtggtgtcctggcggtcctggtacacgtcggcgtccatgcgcagctcgtgcgcactcaacggcgtgcggtccttcgggcagtacggcagcacgcggtagccctggtaggccaggcccttgtcgtagagctgcttgaaggcccacatcacggattccatgtacgggatgttcagggtcttgtaaccgtgctcgaagtccacccaacgggcctgacgatgcacgtagttctgccattcgttggtgtacttcagcacagaagcgcggcaggcgtcgttgaacttgtcgatgcccatcttctcgatctggtcgaccgagtcgatgccgagctccttctgcgcctcaagctcggcgggcaggccgtgggtgtcccagccgaacacgcggttgaccttgcggcccttcatggtctggtagcgcgggatcacgtccttggcgtagccggtcagcaggtggccgtagtgcggcaggccattggcgaacggcgggccatcgaagaacacgaattcgttctggctgtggtcgccggaagggttgcgttcaacggactgctggaaggtgtcgtccttgtcccagtagtcgagaacggtctcctccatgtcggggaagctggggttcggcgcgacgtgcgcggtctcgccgccctcgctcgccttgggatatacgttttcgctcaccgtaaatctcctgttagtactgtgcactggtcctacaggagcgtcattgatggcgattgccgggcgccgacgtgtgccggctggtttcacgaatgtcacgtaccgaaccgtgggccgattagtcaatcgcctcgcagccggaaccgactgtgttccgcccggaacagccatgtctgccgttcctgcctacgaggacgatgacgagcgctggtatgcgctccgcaccgcggtaccacctcgcttatcgcaccggttgcgccgctccgaactgttgcactcggagccgcgagcctgcgcgaccgcttgtgttcggctgtctcgggccgatcccgtcggttctactgggcgattgccgccgttcttccgaagactccccgctgataacggatcactgcctcacaacggtgcatatcctaacacgccacgcggtcaaatcgccgcccacggccacggcaccgtcaggagcccgatttagattgggaccggccaccacggaccgagaaaggattgtcggacaatgacgtatgatttcacgtccatcatgaacaggcatggcatggattcgatcgcggtcgacggactgggcaccgacccgggattcgcgccggacccgccacgcgagggtttcgacgtcatccccatgtgggtggcggacatgaacttcccgaccgtgcccacgattccgcaggccatcatcgaacgggcgaagcatcccgcctacgggtacttctcccccaccgacgactattacagctccatcatcgactggcagtccacgcgcaacggggtcaccggattgacccgggaggcgatcggctacgagaacggggtcctgggcggtgtgatcagtgcgctgaccgcgttcgccgcccccggcgacggagtgctgctgcacagcccgacctatatcgggttcacccggagcatcgaaaacaacggctaccgcatcgtccacagtccgctcacgctggacgagcgcggcgtatggcgcatggattacgaggatatggacaggaagctcaaggagcatcacatccacgtggccgtgttctgcagccctcacaatccttgcgggcgcgtgtgggaacgttgggaaatcgagaaggccatggaagtgtacaaggccaacgattgcgtggtcatttccgacgagatttggtccgatttgactctggggaaccaccagcacatccccacccaatcggtcagcgaggacgcacgcaacaggaccgtggcgttctacgcgcccagcaagaccttcaatctcgccggactggtgggaagctaccacatcatctacaatcccacactccgggaccgcatcgtggccaaaagctcgaaatgccactacaacgacatgaacgtgctttccatgcacgcgctgatcggcgcctaccggcccgaaggccatgagtggctcgacgaactgaaggcggtgctcaccggcaacgtcgattacgcctacgactacatcaccaagcatttccaaggagtgagtttgaccaaaccggaaggcacctacatgctgctgctcgactgcgagcagtggtgcgaacgccacggcctgagcctgcccgagttggagaaacgcggctgggatgtgggcgtcgcatggcaggacggcgacatgttccaggccccctacagcatccgcgtcaatctcgcattgcccttgagccgcgtcaaggaggccatgcgccgccttgaccaatacgtattcaacgcgtaaacggcatgcatccgcgattgcggtgtcctggaaagacgaatgccgtcaacgaggttggtgcccgttggcggcattcgtcatacgttggccgaaccgggcgaaacccaagttgccgtgcgctatgaggtggatgccgccagcggacgtgtacatctgaccgcccgatatgccggtgccaccgatgcgccgacgctgccggcattcggattggaatggacacttcccaagcagtacgagaacctgcgcttctacggccttggccccgaggaaacctatcacgaccgtctgcacggtggcaagctcggcattttcgagcgcaccgcggccgaagacaatgcaccgtatctggtgccgcaggagaccggcaaccatgaagacttgcgttgggccgaagtgcttgacgcccaaggacacggcatgcgtatcagccaggccggcagcgaacatttcgcggcgagcctgttgccgtacagctcgctcatgctggaagaggcgacccaccagaacgagttgccgccggtccgtcacacgttcctgcgcctgttggccgcgtaaatgggcgtgggcggagacgattcatggggcgcgcccgtccatgagcagtaccagctgcccgccgatcgcgcctacacgctcgacgtgaatctggaactgttctaacagcgataaagaagctccctctgacgagggagcttctttatcgcacagagggagcttctttatcgtgctggtacgaaactgtcacgcaccactagggtggtggagatgaaggtatggtggtgcagcgtgcgccgactggagatggcctcggcaagcatcgtaatcgcagtatcggccagctcattctggtcgatatcgtaactggtcaatgtcggcgaagtgtactgggcgatggcctggttattgatactgatcacactggtatcgcgaggcaccagcactcccgcagcggtaaacgcctgcagtacgccgactgcaatcgagtccgcagccacgatgaacgcatccggcatgtcatctcgatgatcgttaaccgcttcctcccctagagtgcgcccggtgtccacagtgaacgcgccttgcgcgtaaatcaggccttccgcatccagccccaaacgctcggtccaattgcggaatgcggttaatcggccgtcttccggatattcgtgcaaacccatcgtgaagccagtaccgccgatatagccgatgcgtcgtttgcccgaggacaccaacatatccaatgcgtccaaaatggtttggcttaaatccggttgtaccgaatcgaacaggctgggcgcaggattggtgtcgatgaatacgccatagggcaataccagatggagcttcaacagtctatccgaagagagtacggacggtccgatggagatgaagccgtcgaaatcaccggcgtcggcaatcagatcgtcgatatgggaaaacgacgtgagttccatgtgctgggctctggcattgtcgccgagcacggaccgtagttcatcgaaataggcgtccgccagttcttcctcgcgggtggcgttgtcgagtacggccacacggcgtggcaatgcgatacggcgtgatccggtagcgtagccaagctgctcgctgacctcgatgatgcgacgtcgcgtctcctctttgacagacaatgtcgggtccccattgagcagccgggataccgtggcctgcgagaagcctgatttctgtgcgatttccttcatcgtgaccatagttgagccttccacgcctcagtacgtaacaatacgcagtatttcagtaaataactttactacatagtgtaactcacg

SEQ ID NO: 704 - DNA, 11091 bp, Unknown
  R14_15m  MAG No. k141_32107
ccatgtgttgcgtttgattccgcggctgaccgtggaggcgtgtctgccgatcaggccggcgatccgccgtatgctcgtcccgttgccgatctctatccggatgatccgccgttcctcttccgacaggtgcgaatacacttgacccaaggcgcgacaccccttcactggttatctggacaatctccaatctaaagggtgtcgcactttcaaatagacaacgggccacattttcatgctttatgcaaaaaatgtgaggcatacgcacatttcccatcaaacgcacaggtgcaagaatggcagcaattcgccattttttgaaatcaccatgtgcgtttgacggcgcgtaagcctcaccttgttctcagcaggaccgaatttctgtgagctccctatagcgctcccctacgcaatatgtccgcaaacgaccacaccacatgggcgatacgcgccaattcggcgtagcggccgatggacagccactgcacacggtaccgttcgaaccacaactccagatcggcggcaagacgggcgcggcgcgaggcatccagcgcacggccggtcacatccttggtgtcacaggcgtcctcgccgccagccagtaccagcagttcctcgcccagtctattgaacaaccgctgcccatccagcatcacccacagcagttccgggttcaatcctcctcgtgccgagccatcgagcaccgcaacaaccgcactgccgcaatcgatcaacgcccggtcgcaatcccggcatcgttcgagtcgggcatggttccgcaggagcagccggcggcgcgcatcggcgcatcccagcgtacggtcaaacacgagctctcccccgcacgaccgttccacatacgatgccacatccgtattcagcatgccggtgccggaaccgtattccagctccagcacctgcacggcaaggtcccaggggaatgacaccccatcggagtcgatgcggacgaggcaatccatgatgcgaccggactcgtcgccatacaccagaacggagatccgacggttcatctcatgcgcatcgatctcaatcggattccacgcgttctgagcgccataacacaggcccggcacgctcagacgcggatcgttgacgtggccgtaatcgccccaatcggtgaccaccatgccttccgcgccatacttgacacccgccaatgccatgtgatacgtgttcagccaggcacccgcataatcggggaagaaccggctccaagcccgcaccgcggggcacacgaactggcgacggccctgcgcggcgatggtctggatgttgctctcgtcgatctgcggctcgtacatccagttgagcatcgtgatgtcgccgggcagcagatccatcgtgcgcgggctttcgagcgcgatgtccgcccacaacatcggctgccgaccatggcgggcgagcgtttcgcacaaatccctgacgaaaccggcatacagttcatcgcggccggcttccggcgcgtcctgcgcggacctgccacgtcccaagtcgaacgtctcatcgccgccgatattgaaggacttcgaacggaacagcggcgcgtattcctcaatcaggcgcgaggcgaaatcatgggccttgggatcggcggcgttcagcgtgtgatgctccatgcgttcgatgaagctgaacgggcggtcggcgtcttcggggaactcacccagcccgcgatgctcacgggtgcgcagattcatgtacatgtgcccgaacgtggccaacgacggcaccaactcgatgccgcgacgcgcgcagtactcgtccagatacgtgatgtcggcggccgtgagcggatcggtgccacgccacgcctcgctgagctcgacgaacgcgaaggcatgctcgacatacagctggaactgattgtatttatataaggccagctggtcgacgaaccaggtgaggaactccatcgtcggcactcgtccgcgtgtcacgtcgagactgtaggcgcgcaccgcgaacgcgggcttgtcttggatatgcaggcagggaatggcacgcgaggtctgcccgatgatctgccgcagcgtctgcagaccgtaccgcagcccgctttcgccgccgccacgcacggcgatggtatctgaggcgaacacatccagcgtgtattcgtcatgcgccaatcgtgaatccaggcccagggatatgacggtgccgttcatcgctgccggcgcacccgcacgcgcatctcgcgcatcttcggcggcattggcgctggcgtcgtcttcacctgtggctgcacggacacggcgcgtacggacggtgacgccgcagtaacgctcgagctcgctggacagctgctcaatcggcagcgtttcccaagtctcatcggcaccttcggtggcggcatattcggaaattcgtttctcgatcgtcaccagggacccgatcatagccgtgccatgcgtgtattccaatgtcaccggagcgggaatcagggtgagacacagcgttgcggcatcgactgtatattcgaatgtgggcacagctgttcctttcatactgtttttattatcgttcgtccgctaatggcaggcgacacgtggtcgcgccgccatcagcggacgaatcgttggtgaggtacggcggcatacgctatttcacggcaccggtcgtcacgcccttcatgatgttacgctggatgagcatgaagaacaccaccaccggcagcgagaagatcaccgaagcggccatctgcccgccgaaatcggtgcccatggtgggtgtcgagaaggacgacagccataccggcagcgtgtacttcgactggtccttcatgaacgtataggcgatcatgtagtcgttccaggcgttgatgaacgcgaacaccgaggtcgagacgatgccgggcgcagccagcgggaaggtgatcttccacaggatctgccagtcgttcgcgccttccacggccgcggattcgaagatgtccttcgggatgttcaggaagaacccacgcatgttccagatcgcgaacggcagcaccatggcgatgtacgccaagatcagaccgctgtatttgttgagcagcccgagctggttgtagatgatgaactgcgggatgatgccgccggaggtcatctggatggccagtacgaacaccatgatcggcttgcggccgcggaagcggtacagggtcagggccgcgcacgcgaagaacgcgacgatgatcgacaggacgatcgagatggcggtcacgaccacgctgttcttgaggttggtcaggaacgaggtctgggtcacggcaacgatgaagttgtcgaacgagaggtgcgtgggccagaacacgggggtcgtggtcatgatctcatcgcgaggctttacggcggtgataatcatccagtagaccgggaagaaccatacgacgcagaacagcagggcgaggatagtggtgccggcgcggcgcgcgatcttgccggggttggttcggcggcggggcgctgtggcctgcgatacggcctgtgcaggacttgcactcattgacgtactcataggtcctctcctgacttgagcaggtaacggatgtacacggaggtcagcgcgagcagcacgatggtcacgagcacggaggcggccgaaccggtgccgatttcgaagctgacgaacgccttcttataggtgaagatgccgatggtggcggtcgtgtcctgtgggccgccctgcgagatgagccagatctggttgaacacgttgaagtcccagataatcgagagcatggtgatgaccatgatgctcggggagatcagcggcacgacgatctgccagtagcagcgcagcttgctgcagccatccagctgggcggcctcgatgcaggactggtcgacctgggtggtggccgcgtacagcgtgatggcgatgtatggcacggcctgccagaccacgagcagccagatctccagaaatgcgagccaggtgttgtcgatccaggaggtgttggtcatgtcgccgaagacgtgcagctgggtgagcagccagttgatgacgccgtaaccgggctggaacagccacttccagaccaccgaggatgcgacgttcggcatggcccacgcgaagatgagcacgaagatgaccaggtagcgcatcacaccgccgagtttggtcatcagctgggcgactcccatgccggccagcacgctgccggccacgagggctgcggtgaagccgaaggtgcgtagcagggccgcatagaaggccgggtcggtgagtacggattggtattgcttgaggccgacgaagtcgaattcgccggtgaacagcgtgcgctggctgaaatccgtgaaggacgtgaagatcatgaatcccagcgggatgaccaccagtgcgatgatgacgatgccggcgggcgtcagcagaaacgccggggcgcgattgccgcgtttcttagccggccgtgaggccggggcctcgccgtgcgcgagttgcgttgagcttgtcatggtccaacccatcacttggcatacagctcgttggcgtgttcgtcgaacttcttggcggaggcctcggccttgctggtgtcggtggcgatgtccttgaacagggtcagcgagccgtcgctttcgatggtggtccactgcggggaggcgggcgtggccttggtgcgcttggcggcctcgaagaagccggtcagggcggtcgggaagtcgtcggaggccatggccttgtccagtccttcgacgttgttgggcaggtagccgtccttggcgaacacgtagtcgttctggatgtcagggctggaggcgatcttgatccacttcagggccagatcctgcttggagctcttctgggccacgccccacacggagccggccatcatcgacggctggttctggccgctcaggccgggcatcgggaaggagccgagttcgtcggcggtgatgtctttgttgtattcctgaatcacgcggatggaggcgctgttgccgattacggcgccgatcttgccttcggccatgagctggctggtgtcggggctatcggtgtcgagcgggcgggaggcttcggatgaccacttgtgctggaattcacgccactgctcaaggccggacaccgattccttggtggacagggagctgacccatttgccgtccttctgcacggcgtagtcgccaccggcgtcccacacccactggatggcggtcttccaatcggcacccggcacatagaacggggtgaagtcctcgccttggtgcgcgtccttgagaatctgcaggtcggcttcaagctcggcgtaggtggtcggcggctcgttgatgccggccgcggcccaggtcttcttgttgtagaccactgcgcgggcggcaccgagggccggaatgccgtacagcttgccgtccacggtggcaggctcttccagaccggagagccaggtgacgccctggcgcaactcgtcagcgtggtcggtcaggtccatgaggccgccgctggccgcgaagccggcgacctgcgtattgccgaggtcgagcacgtcgggggggggtgctggtggacagagccgtggtgattttggtgctgatgtccttccactgctggttctggatgttgacctcgacgccggtctctttggtgaactggtcgttgatggccttgatggtggcctcgctttgatcgccctgcatgacccagacggtgagcttgccatcgctcgaaccggtgtccgaggatggtgcgcccatcgagcatccggcgagggtaagggccgctgccgtgacgatggccgtggcctggagcaccctgcggatggcggggcgtacgttgtgctgctgcttcatgatgttccttcccgtccagttgtgaaccgttgcggctcgcttgatctggccgtctccattgactggtgatttcttgtaaacgtttacgagaaggagtataacactcacgtaaaggtttacaaatatcatgtgcgtgtcgtacttcacttaatatcggtaaatctcttttactatttacttcgtacacccttacggcagagaatgtttaccgactttcatacgccggcacggcaatccacaggcaccggacatgggccatgcggaatcatcaggaaaatcgcgcggtacaatcactgtgaacggccctaggacaggaaggagacgggcatggccataccccgtaagccggccactatcatggacgtcgccgcggcatccggcgtctcctacgccaccgtctcccgttatctcaacggcaatccgcatgtctcggccaaggcagccgagcgcatcgccgccgccgtcaagcaggtgaactacacgccgaacaacgccgcccgatcattggtacgccaacgcacgcaaaccgtggcgttcgtggtgcacgggcagccggattcgctaatcgccgaccccaatatcaacaccatcctgctcaacgccaaccagacgctcggcaatgccgattatcaactcatcacgctgatctccgactcccctgcggccggcgcacgcatcgccagactcgcctccagcggattcgccgacggatggattctcaacacgttccataaagatgacccgctatttcagagattcgccaatatcagcgtgccggtcgccatttccggcgtcggctatggcagcgccatccccttccccaccgtcgatatcgacaatcgactcgcttcacgcaagctcaccgagcatatgttggggcgcgggtatcggcgaatcgcctatatcatcggaccgccgtacttgccatgttccgacgaacgactgctcggattccaggatgcgatggccggcgatttcgacccggcactggtcattcggtccgacggctggacccggcccgatggccgcaacgccgtcgtgcggctgctggactcgctggctgagccgtcgggtagccgacttgccggcgccgacgccagcgtgcccgagctcctcgccgagcatcatatcgacgcgctgatatgcggcagtgattgcatcgccgctggagccatgaattatctgctcgaccgcggcgtgcgtgtgcccgacgatattgccattgccggcttcgacgacagcgccgacgccacagccatgcacccgcagctgaccaccgtgcaccagccaatggacgcattcggcgtcagcttggccaccctagtgcttgaccagatcgagggccgaccgttccagcgcacggtgttcctgcccaccgaggtcgtggccagaggctccaccggagagtaggcgcgcagagaacggttctcaataatatctgtgcgcacttctctacgcccgaagcgcacatgggatatgccctaatcactgccatgtcgccatttgcgatgatgtgagattgttatgttcttgttcatttgagcgcacagatactactgagaaccgttctctgcgcaaatagacaatgtggataactccataagctggaaccacattgccctgcctggcttgcattcaagtccaaatcagctttacggtcgcatcatgagctcttttatgcatgaggatattgtcggccgacgccgagcagaacgtgaacgttgcaatgatgctgcgcgccgttcaaaaggtccattgctggtgggatacatcaatgcggccaactactacggcgcgcccatcccccgacattgcacgctatctgttgatgccgtgcacgcctgtgtttccagtgccaacaaacgcagacgaatcaaaggcgtggtcttccatgtgtttaagggaaaactggatatccgcaaaaaggactatgaacatttctggattgcctcgccggtcatgatgtgggctcagatggcccaatactccacattggaggaacttgcggccattggagcctctttgatgagccgcgataaacggcgcagaatggccactcgcaaggatttcgatacttacttggaaatcagtccgcggttcataggtcgtaacaaatgccacgaggcactgccctacatgacagagaacacggattctccgccggaaaacacgctgtttgggatgctgaaggattcgggcttgggataccccaccgccaactatcgcgtgaatatcggcaactcatacgtcatattggatatggcatatccggactgccgcgtcgcgttcgaatatcagggagcctatcacgccgatccggcacaaatgcgaattgacgcggcaaagcgaaacgcattgcaactgctcggctggatcgccattctcgtcactgcggatgacctgagaacagccgacacgcggcatcgttttatcgagatggcccatgtcgtggtgtcccggcaacgcaatctcgccgattggaaccgctcatgggccattacctcttagcatcgcaccgataatgcgctatgccgctatttaccgcgaggtgcccgccagacatcgggctcgacgtagatcccccattcataccaaggcagcgcggcacggcgtcctcgtccatgtgaatggcctgcaggttaatgcagcctatccacgccggcagtgcgctccactgcctcgaccaccaggtcgcgggtgctgtggtcaagcgattcgcccaccagcagcgagccggacttaaacgccagccgcctacaaaagtgtgaggctgcgcaggctcacactgccaacagccgttcagccaaccctcggaaggtctggccaatgccatccgtgcgcaaggcgccatcgacatccagcaccgcgggacggcctgcttcgccgatctcgcgcacttcgggttccagcggcagctgggccatcagcggcacgtcatagccaagcgccgcgcttaactgttcagacacgcgctgaccgccgccggcaccgaaaatctccagcttctcgcccttgtgctcgtagtagctcatgttctccaccacgccacgcaccttcatcggcacctgcagggccacgagtccagagcgcacggcgatgtcggaggcagagggctgcggggtggtgaccaccacgagttcggcgttgggcagcgcctgggccacggaaatcgccatgtcgccggtgccgggagccaagtcgagcaagaggacgtccggctcgccccaccatacgtcagacaggaactgttccaaggagcgctgcagtcgcggcccgcgccacagaatcgcccggtcggcaccggcgaacatgccgatggagatcagtttcacgccccacgcggtgaccggcataagcataccgttcagattggtgggctgcgtgtgcacgccgaacaggcgcggcagtgagaagccatagatgtccgcgtcgatggcggccgtgtcgaagccgagggccgcaaacgtggcggccaggttcgcggtaaccgaagacttgccgacgccgcccttgcccgaggcgatggcgaagatgcgggtcttgacgcccggcttgctgaaggggttctgcttgcgttcggccttgaggtcggcaaccagatcggccagcttgtcacgactcattgaaccgacttcgatatgaggcagcagctgtacgcccggataggagctgaccgcgccgttgatctggttggtgatggtctcgctcagtgggcatccgggaaccgtcagctcaacgtgcacggtgacgtcgtaagtgccggcgtccgacgatgcgggcgcggcttcgatagcggcaatcatgccgaggtcggtgaccgaacgaccgagctcggggtcgatgaccttgctcaggcgttcgtagatgtcggcttcgatctgacgtgcgtcgctcataaatccgtatcctcctttagggcctgttctaccctagcgtgtgatgcggcggcatgccagagggagtggagtaagtcacactggggcgggattcgcttttcctctcccccagtcagcctaaaggctgacagccccctcatcagagggggttaatgaagcgtctgagggggctattttagatggtgccggtggctaggagctgggcgaattgggcttctcccagcatggggatgccgagttcctcggccttggtggccttggagccggcgtttgcgccgatcaccacgtaatcggtcttcttgctcaccgaaccggccgccttgccgccgcgctcgataatcgcctctttggcggagtcgcgcgaatagccttccagagaaccggtgaccaccacggttttgccggccagcgtctgcggcaacgaactggtctcggcctcgtcgacgcccacgccggcggcctgccaagcacgcaaagtcgcgccgcgccagtcgccgggttcgcgggtggcggcgaaccagttcaccaccgattcggcgatttccgggcccaccccgtcgatggccgtcagatcttcaatcgtggcgttttcgatggctgccagcgagcccatcgccgaggcgatcaggcgtgcggtaggcggaccgagccggcgaatcgacaacgcgaccagcacacgccacaggtcggcgtgacgggccttgtccatttcgtcgaacatcttgcgcgtgttttcgccgggccgaatgatcaccggcacatccgtgacgccggtgcgcgtggtcttgtggtccacgcgcacgatgaccgcgtcggccggcacgtcatactcgggataggaggctgcggcaaagcccggcatagtaccaagtggagcctcagccccggtaggtgcgccggtcgtctcgctggcggcacctccctgtgttccggcggattcgactgcggcctcttcttgcgcgcgttcggccaactgcttggccgtgagcttcttggccggcgtgggcgcggtccagaaggcaggcacctgatgccacaggccagagccgccgacacgcttacgcacctttttcttcttaccgttcgcatcgaccgtctcatgcacttcgacgattgcggcctcacgccacacacgcacgtcgcgcagatcggcggcggtcaggtcgaacaacccggattcgttagacaacaccggcttctgcgcggctggcaattccagcccctccaccggctcgtacggttcgggctcttcgccgggcgcgaccagaacctcggtgatgttcggcgcgtaggtcgccaccgaatcaggccggttctcctccgggttggtcagagcgatggccgactgttcacccagatgctcgatgtcgaacgccttgcgtgaggccagcgaaatcacgcgctcggtc

SEQ ID NO: 705 - DNA, 6931 bp, Unknown
  R14_15m  MAG No. k141_32211
acatggcaaaggaaaagtacgagcgtactaagccgcacgttaacattggtaccatcggccacgtcgatcacggtaagacgaccctgaccgcggccatctccaaggtgctgcacgaagagtacccggatctgaaccctgagtacgacttcaaccagatcgacgccgctcccgaagagcagcagcgtggtatcaccatcaacatcgcccacatcgagtaccagaccgcgaagcgtcactacgctcacgtggactgcccgggccacgccgacttcgtgaagaacatgatcaccggtgctgcccagatggatggcgccatcctcgttgtggccgccaccgacggcccgatggctcagacccgcgagcacgtgctgctcgctcgtcaggtgggcgtcccgaagatccttgtcgccctgaacaagtgcgacatggttgaggatgaggagctcatcgagctcgtcgaagaagaggtccgcgacctcctcgacgagaacggtttcgaccgcgactgcccggtcatccacacctccgcttacggtgctctgcacgacgacgctccggaccacgagaagtgggtccagtccgttaaggacctcatggacgccgtcgacgactacatcccgaccccggtccacgacctcgacaagccgttcctgatgccgatcgaggacgtcttcaccatctccggccgtggtaccgttgtcaccggtcgtgttgagcgtggccagctggccgtcaacactccggtcgagatcgttggtatccgtccgacccagaccaccaccgtcacctccatcgagaccttccacaagaccatggacgcctgcgaggctggcgacaacaccggtctgctgctgcgtggtcttggccgtgaagatgtcgagcgtggccaggttgtggccaagccgggctccgtcaccccgcacaccaagttcgagggcgaagtctacgtgctgaccaaggacgagggcggccgtcactcgccgttcttctccaactaccgtccgcagttctacttccgcaccaccgacgtcaccggtgtcatcgagctgccggaaggcgtcgagatggttcagccgggcgaccacgctaccttcaccgttgagctgattcagcccatcgctatggaggaaggcctgaccttcgctgtgcgtgaaggtggccacaccgttggctccggtcgtgtgaccaagatcctcgcctgattttcatcagacaagaatcttcgcttgaactagcgttatagaaaatccccttcgaggaaactcggaggggatttcctataaccgcagcaggatatggatatgtaccacgacttccggcctggatgcgctagtgttgctttccaatagataaacggactgctgcactgcgagggtatgacactgatggcaggccgggaaagaaggtcgatgatgactggttcgcaagccgcacactgtggttccgtatccgcgctttcactgggactgcccgtctccacggcgattcccgaagccaaaggcacactgccgaaagccttgttcgtgggcaaggcaccgatttcaggcaaactcaagcagcgattggtgaacgaaatcgaatccattaccatgctggcgttggtccggtcgattaacactgggcttgcggacggcaaactggttccggaagtgctggtcatcggactgaagcttacggccaaagccactggcataccgaacgaggtcatcgatttgattgccgggcagcgtaaatcgggcatcgtgttcgtgtgcgtacgcgacgtgccgttcgagggcagcacacgtgaggaatgtgcgttcgccgtgcgtcgggcgataccggggcgtgccggccacacgccgatctatcgggtatatgccggcgattggcagccggcgggggaggcccagctggagctggccggctctactattgatgagctgtgggcctcgctgtgctcacagaccattctgggcacgccggagatcgaaaatctggatgcgcgcatcattcgccatactgaaattgctcggctcgaatccgaagtggacaagctcacccgcgaccatcagcgcgtcaagaatcctgttcagcgcaatgaaatctatgccaagctccacaaggccaaaacacagctcgcagaactgcgcgaagcatagtgatatgaaaaccattggggtcccgctggcgggagctggctcgcaaagcgagactgagggtggtccaggtccgtggcccagggctacgcccaagctaattgaaatattcgtgcatcatacagcgtacagttaaaccatgttccctctgctcgaaaccctggtcgccgtatacgaggtgggccagttcacgctggctgccgacgaactgaaggtgtcgcagtcgacggtgtcgtcgcgtatcgcccaattggagcagatggtcggcgcgccgctgttcgtgcgcaatgcgaaaagcgacgtgacgcccacacaggccgggcggatgctgtaccagaccgccatcggcatcgacggattatggcgggatacgcgtgagcagatcgcccgcgtgcaggaggcgcgtgagccgctggccgtttcgttctcgcacacgaccgcggcgattctgctgccgaaggcgttgccggtgatggctcggaacatggacagtttcgacttcgccgtacacgtgatgaactcggatgcgattctcgaacgggtcagcatgaaggccgtgcagctcggcgtggtggaaaagccgatcgtgaacgattcggtggaccgcgtcaccctgtgcgaggaccggttggtgttggcgggggagcccgacggcgtgtggatggtgcgcgagcacggttccggcgtgcggtattacacggatttgtatttcaagaccgctcaggttgtgcctgcacgcacgatggaagtgtccagtaatgcggcgattgtggcggcgctgtccgccgggttcgggcagtcgttgatttcggaagccgccgtgccggcgggcgtgccggtgcagcgggagcttggcgatgagtttgtgcggcggttctatgcgctggtgccgagatccggtctgacgcacgatcagcgggagttggcggagatgattattgctgcgctgcgcgggtagtcagatagtcgactgagggaaggtcgcgaacgttgtttctctccctccgtccgcctgcggcggccacctccctcatcagagggagatcaattaggtatcgacaaaatcgatgatatgtattggttgcaatgatttgaccgatgtaaatgcttgagcttcaatagacaccgtgagagagttctgtacaaaatggtggaagcgcattaccaccgttgacatgttgttcattggcgttctgactctgctggcctcgctgttcgcctcctggctcaagcagttccccggattcagcctgttcggcgcgcttatcatcgcgctgctcatcggtatgatcatccagttaccgatccgcagtgcctacgtcggttccaatgatggccgcaaggcaggcgtcaaggacgccgctggcctgatttccaacaagctgctgcgcctcggcatcatcctgctcggtttcaagctcaacctcgccgtgctgttcacgcagggcatcaagtgtctgccgatcgcagctgtggtcgtcacgctgaccatcatcgtgtgctatgccatcgcccgcaagctcggtgtcgacccgatgctcgccatcctgactgccggtggcaccggcatctgcggtgcggccgccgtcatgggtctggccggttccatcaaggtgcctgaggacaagcaggacgagaaggacaacgacgtgaccatggccgtggccatcgtagccattatgggtactgtgttcgcgttgctggagatcgcgctcggcccgctggccggcatgaccaaggaccagctgggcatcaccgccggtgcttccctgcacgaaatcgcccacgcggtcgccgccggcgacgctttcggcgcggtggacatcgccaccatcatgaagctttcccgcgtgctcatgctcgtgttcgcggccatcatcatcgctatctggtgggagaagaagcactccgaggtggagaacaccggcaagaagaccgtggccttcccgtggttcatgctcggcttcatcggcgcttcgatcatcggcaccttcgtgccgctcatcgcctccatcaccccgcagctcgtggactttgcgtacatcgtgctcggcatggccatggccgcgctcggcatcaacgtgaacttcaaggccatcgcttccaagggcaagaagccgatgctcgccagcttcctgacatcgattctgctcatgtgcttcgccgcaggtgttgcgatgctgttcttctgataagcgctccaaatacaaataggcgaaggcgaacgacagtgagcaattggaatgtgtcacctaaaaatcacgtacttgcacaacggataaccccagccgaactggcaggccatcgcaatgaacttcaccacatacgggctcaggtccgtcgcgcccggcatccagccgatcagcagtgtgctgaacgtgaagttccagatccacagcagcacgaaaagcatcacggaacgggtgaagttgcttgacgatttgaacgtcacgttgcggttcatcacgaagttgtaggtcgccgaacacaccacggcgataccgttggagatctgcgagggcacgccgatcaagtgcaggatggcgaacgtcgcatactccacaatggtctgcgtggcggaaacacccatatacttgcccaacacggcgagtccattttgcttcggggttgccgtgcccacggtattttccgcagtattcgttgtggtcgaggtatttgtggcgcccacaccttgattcggcttcacatccgctccattgttcgccatgcccatatacctcccggatgtacctgtgacgttcgacctcgcaatgataccgctgaccgcgtcgggaatcgtcgtggcggtcagacgagaaaaccgcaggccgcagcaacgaccggcacacccagcgacagcaccagataggccgttgccgtggggtagcggcgtttgtggaagagcgtcaccatttcgttgatcgcggtcgagaacgtggagaatccgccgaggaaaccggtggccagcaccagccgccacggttcatcaagtgtcccgcccagtgccagcgccgcaaccagaccggtcaggaatccggcgatgagattgatggtgaatgtggacagcgggaatgcgcgttgccaatacgttttgatggtcgcgtcaagcagatagcggcaggaggcgcctacgccgccgcacaggcagaccaagattggtaggaatacggtcatcacgccttacctcccttgctggtcgtagcggcattcgtatcagcggacgcttcggcggatgcgttcgaggagccggccagatgcgttcctgcccacacgccggcagacgcacaaaccagacccagcgcgaacgtcaccagtagataggcaatgccggccgccacctgaccgtcgcgaatcgcggtgaagccttccaatgccaacgtcgacatcgtagacaaaccgccgcatacgcccatgccgagcccacggctggtgagctccttggcacgcgtgtcgaaccgggaagagccggccaaataggcggtcagacccgcatagcagaagcaggccagcatgttggccacaaacgtgccggtatggaagctgccggctgcgggaatctgcgcgaacgcatagcgaatcgcggtgccgatggcaccgccgcagaagacgaccaacacaatatcaagatggatatcggggagtttgtgcgccggaggagtggccgtgcgcgtgcccggccgggcatctgcggatggggattgcgagcccataatagcctttcctgaaaccgctgaatcctgctgaagacacaacgattccatgcaatgtcaaatcgtgtgtaggaactatcagcagtgtgcggttcgaaacaagttcaggcgggtcccatcgccggttctccagattactcatggcgacgaatcgaacagtgagcgtatctcggatattggcctatcgcagtgaattgctcggttgttgccatacctcatgggtatggcgaaacatggtttatggctattggttaatgcaaggcgattattgtttaatagaacacgaggataacgggccttaagcgctcgatgccggaaaacaaggagttatgaacgtatgtctgaaaccatgaaagctgcgattttcgtggagcctggcaagatggccgtggaagaagtgccgaaggcgacgcttgaacaggatgatgacatcgtgatccgcgtggtgcgcacgtgcgtgtgtggctctgatttgtggttcttccgtgggctgagcggacaggccgcgcacagtcaggtgggtcacgagtccatcggtgtggtcgaggaggttggcgcggcggtcgaatccgttaagccaggtgatttcgtggtcgtgccattcccgtacagctgcggcaagtgcccggtgtgcaaggccggcttcgaatccgtgtgcccgcacggcggctacttctccgcttgtcaggccgaatacctgcgtgtgcccgaggcggacggcaccgtggtcaaggtgcccggttccccggaagattattccgatgaacagctcgcatcgctgctgaccatttccgatgtgatgtccaccggttatcacgcggcggcttctgccgaggtcaagcccggtgacaccgccgtggtcatgggcgatggtgcagtcggcctgtgcggtgtgattgccgctaagatgcgcggtgccacgcgcattattgccatgagccgtcacgaggatcgcgcggcgctcgcccgcgaatttggtgcgactgatatcgtgcccgagcgcggccaagaagctattgacaaggtgctgggaatgaccggtggctatggtgcggacgcagttctcgaatgcgtgggctccaa

SEQ ID NO: 706 - DNA, 21188 bp, Unknown
  R14_15m  MAG No. k141_33027
gggtcgccaccgccgaggcgggcggcgatttcgatgttcttgatgagcttggcgaagagcttgccgcgcttggcgtcgatggcggccttcttgtgcttggtggtcgcccacttggaatgacctgacataatgctcctagcaattattgaaacggatgatgtcaaacgaaacgattgtaggccgttaatcagacatacccgtgatgtttccgatgattgtcttgttatgcgtaccgataagaccggtcacgcggggtgccgcacctgtgttaggcaagcggcagatgatactgcggagccagctgttcgaatgcctgggcataggcttctcgctggtcggacagcagaataggcatggtgcgtgtctgggcgacgatgggcatgaagttcgcgtcaccattccagcgaggcactacatgctgatggaggtgagcggcgactcctgcgcctgctacttcgccctgattaatgccgatattgtaaccgtgcggacgggagacggtttccatcaccttcatggcgagggtggtggccttctcgaattcgaacagttcggcatcgtcgagttcggtgatgaatccgacgtgacggtacgggcagatcatgagatgcccgacattgtatgggtagaggttcatgatggcgaacacgtgcgtgccacgccaggcgatgaggccgtcttcgtcggatttcttgggtccggcgcagaacgggcattccttcgtcttgggcttggttgggcgatcctcgctgttgcgcagcacataggtcatgcgctgcggagtccacagtcgttcgaccgtgtcctcctgaggcggaaagtccgccggattatcgacacgcacgtcagtcattttcgcaccctttcttggctcccctctctgaggggagctgtccgtgaaacggactgaggggagtgcgagccatgcaggactcccctcagtcgcctacggagccagctcccctcagagaggggagccagtaccattcacatcactcagccacagcggcgttgaagtcgtcggcggagttcacctggacgcgcttcttgatgacggtgaggatctgctcgcgggccttgtccaccggaacgccgttgagctggctgccgtcacggaagcggaagctgaccgcgttgttgttcatgtcttcctcaccgacgatgaggatgaacggcaccttggacttggaggcgttgcgaatcttcttgccgaagcgatcgtcggagtagtcgatctcgcaacggaccatctcgtcctcaagggacttgacgaaaccggccagatgcggggcgaactcgtcggcaaccggcacgccgagcacctgcacgggggccagccacgccgggaaggcgcctgcgtagtgctcgagcagcacggcgaagaagcgttcgatggagccgaacagggcgcggtgaatcatcaccggacgctggtgggtaccgtcctgcgcgatgtactcgagctggaaacgctcgggcaggttgaagtcgagctggatggtcgagacctgccaggtgcggccgatggcgtcgcgggcctgcacggagatcttcgggccgtagaaggcggcgccgcacggatcgtcgacgagctcgaggttggattccttggcgacctcggcgagcgtgttggtggcctcctcccagatctcgtcggagccgacgtacttgttcgggtccttggtggacagctcgaggtagaagtcggtcaggccaaagtccttgagcaggttcagcacgaaggtcagcaggctggtgagctcgtctttcatctgctcgcgggtgcagtagatgtgggagtcgtcctgggtgaggccgcgcacgcgggtcaggccgtggacctcgccggacttctcgtagcggtacacggtgccgaactcgaagaggcgcagcggcagctcgcggtaggagcgctgacgggacttgaagatcaggttgtgcatcgggcagttcatcggcttcaggtagtagtcggcgcccggcttggtgatgttgccgtccgcgtccttctcctcgtcgaggtgcatgggcgggtacatgccgtccttgtaccagtgcaggtggccggaggtctcgtacaggccgcccttggtgatgtgcggggtctgcacgaagctgtagtggtgcttgcggtgcatctcacgggagtagtcctccatcgcgttgatcacggcggcgcccttcgggtggaacacggccaggccggggccaatttcatccgggaaggagaacaggtccatctcggcgccgagcttgcggtgatcgcgcttggcggcctcctcgagacgggtctggtaggccttgaggtcttccttggtggcccacgcggtgccgtagatgcgctgcatggtcgggttcttctcggaaccacgccagtaggcggcggcggaacgctcgatcttgaaggccttgatgtagcgggtgttcggcaggtgcggaccgcggcacaggtccttccaaaccacattgccatcacggtctacgttgtcgtagaagctgagttccttttcggagatctcggtggcggcggccgggtcgaggtgtgcttccttgtcttcgatcagttcgatcttaaagggctggtcggcctcttccttcagagcctcttcctcagtcacggaacggcggcggaaggactgggaggacttgatgatgcgctgcatgcgcttctcgatgtccttgaggtcgtccggggtgaagggctggtcgacctggaagtcgtagtagaagccgtccttgatgacggggccgacgccgagcttggcgttcgggtagacttcctgcacggcctgggccatgacgtgggtggccgagtgacgcatgattgcgaggccgtcttcggagtcgagggcgatggggtcgacggtatcgccatcgttcagcggcgtgtacaggtcacggttctcgccgttgatcttgaccgcgatgatgttcttgtcttccgcgaacagttctacgccggtggtggttgcttccacctccttcgcttcgccgttgacggttatggagatggtagcttgcgccatgatttgtcctttgctatcggggcccacggtactaatgtgcaggcctggactggttaatcaacgtaggacacgataggttgggcgtgcgacaaataccaccagcatctgaaccaatacgaaaaaaacctcgccgaagcgaggtttcgttgtggagcggacaacgggactcgaacccgcggtctcaaccttggcaaggttgcgctttaccaactaagctatgtccgcaaaggaatccgccgtgagaagcggaatccagtgggcgatgtaggaatcgaacctacgaccccttcggtgtgaacgaagtgcgctagccgctgcgccaatcgcccgaatactcggttcttcagttatatccagtcgaattgcttcgactttcgtgggcgatacaagattcgaacttgtgaccccttccgtgtcagggaagtgcgctaccactgcgccaaccgcccgggtcatatttcatcccattgaattgcttcgctggtctgagaggtgggtacgagagtcgaactcgtctatacggctttgcaggccgctgcctaaccgcttggctaacccaccgtaaggtctgtcaactcacggacctagagcggacaacgggactcgaacccgcggtctcaaccttggcaaggttgcgctttaccaactaagctatgtccgcgtgtgtttccttggcgaggtctccctgccgaagcacgagtgtttactatactcacatgcgtgtagttcgtccagctgcggcgtgtcgcctgtaattgcatactctcgcttatggctaaagcgtgcgcttcgggcaatgaattccagttactctagaggtatgagtgaagcagcgaaggacaccggcgcagtattgatcgccgcattcgagggatggaatgatgcctgtcaggtggcgacgaacgcggtgcgccatctggtcaagcgatatgagtcccgcgagattcgtcatattagatgtgatgatttctatgactatcaggttgcccgtcctatgctgtgccatgttgcgggacgcaccaatcttatctggccgcagaccacgttctacgacatcacgttggacgcaggcaagcatatctatgcgcagatcgcccccgaaccgaactatcggtggaaggaatactgtagccagagtctggccattgccgatgagctggatgtcaatcggatcattacgttaggttcgatgttctccgattgcccgcatacccgcccgttgcccatcgccgtcagcgacggagactgtcaatgcgaaggagaccggtcgtataacggcccggtaggcattcctaccgttttggatgtggccgccgcgcagcaaggttttgctcattcctcgatgtgggtgtccatcccccaatatttgggcagcgacgaatgttctgccggcactatgcgattgctggatgcgttgggcaagcatatcggcttcaccttcgatacggcagatctgaagcagaaagccgaacagtggaaggcgcaagcctcgatactggttcgttgtaatgaccagcttcacgattacgtggagcatttggagcacgactacgacttgcagcagaaagccgaggcggaggcttccttgggagcgccccaggccgaacaactagtcaaagaagcagaagcgtttctgcgccagatgggcaattagcccatatatggtgtgctcccgctggatgaacagccctgtgggctgttcatagcagtgcaccatgtgcacgtcgcacaaaatgtcgggagctggctcgcgtagcgagactgagggtggttctgctggcatattccagtgaccacccccagtcagcttcgctgacggctcccgccagcgggagcaccattatattggagtcgtctatcgacccgtcttatgccgcagccgccacggagggatcgatggccggcagcacgcccacaatcagcagcaaggcgacgaccacagccaaaccgatgcggtagatggcgaaggccttataggagaagttcgatacgaacttcaggaatccgatgatcacgatgtagccgagtacgaagctgatgaccatggccacgagggtcggcccccagccggggaacatcgcatcggttttgtagttcttcacggccttgatggcttcgagcaaacctgagccgaacaccgcggggatggccatcaggaagctcagacgtacagcggcctcacgcgtgtagcccagtgcgcgaccgacggtgatggtgccgccggagcgggacacaccaggaatcagcgccatggactggcccaaaccgaagaggaacgcatcacgatacgtcatatcattcatggttttgttctggcgagccttggcatccaccatccacagcagaatgccgaataccaacagcacggttaccgtaatccacaggttgcgcaacgaggtctcgatgacgttctgcagagtgaagccgaggatgataatcggaatcgagccgacgataatgttccagccgagtgtggcgtaattgtcgccgcggcccatgcgggccttccaatccttgccgttcttgccgaacaggcagctgaaccagtgagtaaggatattgatgatgtcgtgacggaaatacagaatcaccgcaagttcggtgccgatttggatgatggcggtaaacgccgcaccgggatcagagcccagcatcaaatcgccgaaaatacggatatgcgcgctggaggataccgggagatactcggtcagcgcctgaacgatgccgagaatgatcgcttggaaaaaattcataacccctcgtgatttctaagtatttgatgtgttatgacgatgaacaccctacccaagggggtgtagaacaacactaagaatcggtaacatccacggcttctacaatgaaagtggatatagtacgtaagcgacgaagggagcattatggccacgtatcgcaaaagcagggcattcgcaccggaaggattcttcgaatgcgagggtcgaggactcgaatggttgggagcggctcatgcgcagggcggcccgcgcgtggtgcaggtatacggctggggcaaggattatctggatatcgaacgtgtgggcagcgcgtcccccacgcctcaggcggcacgagcttttggtgcggctctggcccatatgcatgatgtgggtgccgaatatttcgggtctgcgcctgacggatataacggcacatgctatttcggaccattgcaggacccagtgaaaatggataccggcgagtggaccgacccgatcagctatttcgctgatggacgtctgcgcccgatggtcaaccttggtgtgaggcgtggcgagctggataagcgcgatgtcgaactgaccgagcgcgtgattgaagcgttgccggatctgatgggccgagccgcgtccgacaagccggcgcgcatccacggtgatctgtggagcggcaatgtgatgtggaccgccgattccgggcagcccgaggctgtgctcatcgacccggcggcacatggcggtcatcgcgaggaggatctggctatgctgcacctgttcggcatgagctatctgagcgaaatcaccgagggctaccagtccgtgcatccgttgaaggccggatggcaggagcgtatcacgctctggcagctctaccccatcgccggtcactgtgtcttcttcggcggcggctacgtcaacgaataccgctccatgtgccgctccctgctgaagtaacagacttggctcccctctctgaggggagccaagaacgcatccactctcagctcagcgcgtccttcaacttgctgaagaagcctttcttttggccagcctgtggacgggatgcctgggagacgtgcgtggcgcctgaatcatgcgaggcggcgaactgttcgatgaggccgcgctcggtttcgttgagcttggtgggaatcagcacattgacgtgggcgatgaggttgccgcgctcgtccttgttgcggatgttcgtgacgcccagtcccttaagcgtcacagtgtcctcaggctggcagccggccgggatggacacggtcttctcaccatcgaacgtgtcaatggacagatcgtggccgagcacggcccagctcatcggcacctgaatccagcagtgcaggtcgtcgccatcgcgggtgaactgcttatccgccttgatgcgaatgtcgatgtacaggtcgccggcagcgccgccgccctcacccacttcgccctggttggccaaacgtagacgcgcgttgtcgttgatgccggcgggcacggtgacgcccacggtacgtgtggtacgcacacggccgtggcccatgcagctggggcacgggttcttgatgatggtaccgtggccctcgcaacgttcgcagggggcggaggtcatcatctggccgagcatggtgcgcacgaccttctgcatgaatccctggccgtggcagtcggggcaggtgaccggctgtgcgccgccctgggcgccggagccgccgcactcctggcacagggagaacgtgctgatcttgacgtgcgcggtgccgccgaacacggcggtcttcaggtcgatggacgcggaggccagggcgtcgcggccgggctgggtacgcggcaccgggccctgtgagccaccaccgaacgcggaaccgaagaacgtggagaacacgtcgctcatatcgccgaagcccgccccggagaagccgccggcaccggcgttcggatcgttcgggtcgacgcccgaatcatacatacggcgcttgtccggattggacagcacatcgtaggcgttgttcacttccttgaacttgtcctcgaattcagggcccgcgatgtcggggtggtacttacggctgagcttgcggtatgccttcttgatctcgtcgtcactggcgccgcgttccacacccagcgtctcgtaataatctgccacttgattgatcctttgtgttcgtttggtctgcaggtcattgtgccacagacggcggtcagtcttgggtccggccctcggagaggaaggcggtcaaatatctggctacggccctgacggcggccatagtggccgcatagtccatgtgggtcggccctatggagccgacgaaggcgatgggttccgtgtcgttcgtctggctctccgtctcggattcggtttcgggttcgcctacgggatcgttccccgccggttcgcccgccgcaccgctgcgcccatagccactgctgaccacggaggcatgcagtaggccgggggtgtgcatttcggagccgatggccacgcccacgccggatgcattcgtctcctcgctcaggttgctcatgagcttcatcagcacgacctgttcttccagcgcgtcgaagagcggggccagatcggccagggaccgggagtgggccaggtgcgaggtgccggacatgtacagttcgtccgcgcgttcgtccaatgccatcgattcgaaggcgtcggccagcgcgtcggccacgccgcgcaccgactcgtagccggcgctggcggcgatggatcgcacggtctccgcggatttcgatagggacagtccgacacattgttcgttgacggtgttggagagccggttgatctcgtccacggcgggcatggatgcgatggtcaggccgtgctgggccacgcggccggtgtcggtaatcaccaccgcgagcaacgtggtcatggcaacgggcaccatctccacgtgccgcaatgtggccttggccagcgatggcgaggtgactatggccacttgaccggtgatttcggacaacagtcgtgccgaacgctgcagcgcgtccttgagactcaccgatccggacaggaagctgttgatgccgcggcgctgtgcctcgctgagcggcaccacggtagcaagtcggtccacaaagtatcgatagcccttttcggtgggcacacgaccggccgaagtgtgcggctgaatcagatatccttcatcctccagagcggacatgtcgttacggatggtggccgaactgacgccgagatcatggtcgcgcgtcagcgaagtggagcccacgggctcctgagaacggatgtaatcctccaccacggcgcgcagcaccagcatgcgtcttgattgcgtcatgcgcgcctccttatatatgcatacatattcatatcagtcacggttcactcagggcgtaccccgacggtcggttcgccacgccgcgacacgcgggaacccagaaatattgcctctttcttggctccgccacgtgcaggtggcgcacttcaccttagaacattgtattagcactccttaggcttgagtgctaatgcgttcgtttgcagcgtagcaatgttcactgtgaacgctaacagaacacaaactaccaaaacacgccaaaattgcaccgcaacgtcgcaaaccgacgctagcatggtaatcgcaatgtgagggcgtcaagcgcccggcacaagccggatacgcggcccgaccaattggaaggaaagtaatccatgaccgaattcaaggagaccgagctcgacgagcgcgccatcaagatggcgaaggtcctttcggctgacgcggttgagaaggcaggctccggccaccccggctcccccgtctccctggcgcccgtcgcctacacgctgtaccagcacttcatcaagcacgatccgaatgatcccaactgggaaggccgcgatcgcttcatcctttccggtggccatgcctccctcacccagtacgtccagctgtacttctccggctacggcgtgaccctggacgaccttaagaacttccgtggcggcgctgccacccgcaccccgggccacccggagtacggcctgaccccgggcatcgaaatgaccaccggccctctgggccagggcttcgcctccgccatcggctttgcctacggcgagcgtttccagcgcggtctgcttgacccggagaccccgaaggaagattccccgttctaccacaagatttgggccatctgtggtgaaggcgacatcgaggagggcatctccggcgaggccgcttccctggccgccaaccagaagctcggcaacctgaccgtgatcttcgacgccaaccgcatccagatcgaaggcgacaccaacctggtgctggccgaggacgtgctcaagcgcttccaggcctacggctggtacaccgacgagttcagcttcatccagcccgacggctcctacaaggaggacatcgagggtctggccgacgtcatcgccaaggccgaagccgccgccccggaccagccgaagctcatcaaggtccactccctgatcgcctggccgaccccgggcaagaccaacgacccgtcctcccacggctccaagctgggcgccgaggccgtcgccggcctcaagaaactcctcggctacgatccggaggagtccttccacgtcgacgaagaagccctggcccacgcccgcaaggtcgccgatcgcggcctggaggcccacaaggcctgggacgagaagttcgacgcctggcgcaaggccaacccggacaaggccgccctgtacgaccgtctgaaggccggcgaactgccggaaggcttcgacaaggcccttgacgaccttgaggccaccttcgaagtcggcaagggtgtcgccactcgtggcgcctccggctccgtgctcaacgccatcgccgccgtcatgccggaactctggggcggctccgccgacctcggtggctccaacaagaccgacctcaagggcgctgccaccttcgccccggccgagtgcgccaccaagcagtggccgaactgcaacgagttcggtcgccagctgcacttcggcgtgcgcgagttcaccatgggctgcatcaccaacggcatcctgctgggttcccacacccgtccgttcggcggcaccttcttcatgttctccgactacgagcgttccgccgttcgtctggccgccctcatgcagatcccgaacctgtacatctggtcccacgactccgtcgccgtcggcgaggacggcccgacccaccagccggttgagcaccttgcttccttccgcgcgattcctcagcttgaggtcattcgcccggccgacgccttcgagaccgccgaggcttaccgttacttcttcgagaagaagaacaccctgcctggcgccatggttctgacccgtcagggtgtcccggttcttgccgagaccgctgccaaggccaaggacggtgtcaagaagggcgcttacatcctggtcgacaccgagggtactccggacgtcatcctcatggcttccggttccgaggtccagtgggctgtggctgccgccaagaccctggccggcgagggcgtcaaggctcgcgtcgtgtccgtgccgtccatggaatggttcgaggagcaggacgccgagtacaaggaggctgtgcttccggccgctgtcaaggctcgtgtctccgtcgaggccggcgttgccatgccgtggtacaagtacctcggttcctacggcaagcctgtctccatcgagcagttcggcctgcagggtgacggcgctcagaacatgatcgacctcggcatcaccgccgagcacgtggtggaagccgccaaggcctccatcgccgaagtcgaagccgccaagtgagcaactaagcaataattcaataattgttggctcccctccctgaggggagctgtcaggcgaaagcttgactgaggggagcaatgcttgagcccactcccctcagtccgcgttgcggacagctcccctctcccaggagaggggagcctagggcttgaatccaaggagaaaataaatgactgaagcaactcagcgtacgtccgacaacggcgtttccatctggctggacgacctgtcccgctcccgcattgagtccggctccctgcaggacctcatcgccaacaagaacgtggtcggcgttaccaccaacccgtccatcttccagaaggccctgagccaggtcggcccgtacgacgctcagctcaaggagctcggcaaggttgacgttgagaccgctgtccgcgagctcaccaccaccgacgtgcgcaacgccaccgacatcttccgcgagatcgctgaggctaccgacttcgtcgacggccgcgtctccatcgaggtcgacccgcgtctggcccacgacaccgagaacaccgccaagcaggctgtggaactctgggagaaggtcaaccgtccgaacgccatgatcaagattccggcaaccctcgaaggcctgccggccatcaccgccaccctggccaagggtatctccgtcaacgtcaccctgatcttctcgctcgagcgctacgagcaggtcatcgacgccttcatcgagggcatcgcccaggctgacgccaacggccacgacctgaagcacatcggctccgtcgcttccttcttcgtctcccgcgtggacaccgctgtcgacaagctgctggaagccaacggctccgacgaggccaaggctctggagggcaaggccgctgtggccaacgctcgcctggcttacgagctcttcgagaagaagtttgccgaggatccgcgttgggccgacctggctgccaagggtgccaaggtccagcgtccgctgtgggcctccaccggtaccaagaacgccgcctactccgactgcacgtacgttgacgagctcgttgccaagcacatcgtcaacaccatgccggagaagaccctgaacgctctggccgaccacggcaacggcgctccgtccatcgagggcacctacgaggagtcccacgccgtcatcaacaagctggctgagctgggtatcaacctcaaggacgtcactgacaagctggaggccgacggtgtcgccgccttcatcaagtcctgggattccgtgctggctgacgtccagtccggcatcgaccgcgtgaacgcctgagattattagctgatgcgcatttcgcgcattaactgattagctcacagaagctccgaccccaaccggtcggggcttcttacgtttgttgctacagtagtacgagcacacgagagaaaggccgaaccgtaatgaacaaacttgtcgcacgccagcggctggtgatgacctttaccttcttttcgatgttcttcggagcgggcaacctgatcttcccgccgtttgtcggagctcaggccggttccgcgaccataccggcggccatcggcttcatcgtctccgcggtcggcctgccgattctcggcgtgctggcggtcaccttcgccggtggcttcgacaaactcgccggccgggtctcccccaaattcgccctgttcctcggcttggcgatcatgctcaccatcggcccctgctttgcgattccgcgtacggcgaccacctcgttcgaaatgatggtggcgcctttcgtgccgtcctcctacggctggctggcccaactcatctactcgctcgtgttcttcacactggcgttcctgttcgcccagcatcccgaaaaactctccaaagtgctcggccgattcatgggaccgttgctgctggtgctgattgccgtcctgttcatcgcctgcctaatccacggtatcggtaccccggccaaaccgatgggcgactactccacaaaccagattgcacgtggcttcctcgacggctaccagaccatggatctgctcgccgcactctatttcggcatcgtgatttccgcgaatatccgcacccagcaggtcgatgacgaatcgcaagtgcagaaggagaccgcgtatgccggactcggcaccggtgtgctgctgatcgtgatctacggcgcactgagctacgtgggcgtggtgtccggcgccatcgccaccatcgatcccgccaaagacacgggcgcgaccgtgctcaccaatctcacctcgtccctgttcggcgcgttcggtaccgcgttcctcggtatcgtcttcgtcatcgcctgcctcaacgtatgcaccggactgatcggtacctgcgccacctacttccacactcggttccagaccgttgcagggagaacgttgagctaccgcacctggcaggtcatcttcaccgtgttcagtttcatcgtgtccaacgccgggctaagcgcgatcatcaaggtttccgtgccggtgttgtccgcactgtatccgatcgccatcgtgctggtgctgctggcgctgacccacaagtcgcttggcgcgcgattcccgcatgtctacttctggaccgtgctgctggtgggcatcgactccttcgccacctgcatctccagcctgatcaccgtcttcggcggctccatcggctggctggacacgacgctggccatgctgcccttgcagcaataccagctcggctgggtggtcccggctatcctcggtgttgccattggtatcgccgatgctccgcgacggtagttcttcccggtctgtgccggagtctggcggtcggtcggtgatggcggttgttgcgacgctcagcggtgccggtgtatcgttcgcaccactatacaccactatatgagcgcatttggggcggcatgatgctgcatccgaactgtccggcgattggcagaatgacctactatctctcgggccaagcaactgacgattatggagtctgcgtcacctcaccactgtggtttatgacggtgactgcgctgagtgttgtcgcgattctctgtctgaccgttgcgggagtacagggcttttcgcgccatcggctctgttcccgttgccctgttctggtcaggtctcacgttctttacctacagctacaacactggtagacacaccgatttctgcccagcgctatcggcaactgacaatgcaggtcttgtcgcttattgcatcggccgtgaagctttgggactgctgaccgtcgtgttgtgcgtgctgccattgttctccctgctttcggcgattatggccatcacgttggctgcgcacgacgcgacaccaccggcataaaatctccttcatatcacgaaacaacgggcacccgttttgcgaggcattctatccgtcccgtgtttcgcaacgcatgagacggcacatccattgaatcaggagtctagaccatatctcgccgaatcttgcggtaggtggcatagaacaggaagccggccacgatgccggaggtggcgtcggagatgggttcggcgatgaagatgccgttgacgccgatccagtgcggcagcagcagcgcgagcggcacgagcaggatgatcttgcggaagacggccaagaacaccgactgtttggcctggcccatgccgacgagtgcgcattgcgcgcccatctggatgccgaagataccccagccgcagacgaaaatcggcatcatgcgggtcacgatgtcgatgaccgtctgttccgaggtgaaccatgaggcgaagaagccggggaatgtggcgagcacgttcgcggcggccgctcccctgacgccccatccgaacacgaaaatgaacacggggtcaagaaggatggatatgccggtgccgatgagtacggagaccatggccacagtggttttgccaactgcagcagcacggtgagggtcagggctatggcgatgaggaacgcggcgctggtgccgaggatgcgttcggctttcttgaagttgccgcgcccaagttcaatggaggcgcgcggcgcgccgcctgcgccgatcagcgaggcgaaggcggtgacggccggcagaatcgggaagcagatgcccacgccggtcatcgccgcgttgcccacttcggggatgtgcccgatgaacagtcggtcgatgatcgtgtacgaggcgttcgccgcctgtgccacgatggtggggaccgacatggtcagggccagacggcccagcccggcatcgatcgtgttcgcctgtaccaaggatcagctctgccagtagtagctgaagaagtcggcgagctcccccatggtttcgtgcagcatgcccatgcgcggcaggtacaccacgcggaagtggtcggggcgatgccagttgaacgcgccgccgtggctgatgaggatgtgcttgtcatgcagcaggtcgagcgcgaactgctcgtccgagtggatgttgaagcgtttgacgtcgatcttcgggaagatgtagaacgcggccttcggcttgacggcggtgatgccgggaatctggttgagcatgtcgtaaacgaggtcacgctggtcgtgcacgcggccgcccggcacgatgtagtcgttgacgctctggtggccgccgagcgcggtctgcaccacggactgggcgggcacgttcgagcacatgcgcatgttggcgagcatgttgaggccctcgatgtagtccttggcgatacgcttgttgccggacaggatcatccagccgatgcggtagccggcgatcatgtgcgatttcgacaggccggagaaggtcacgcagaacaggtccggggccatcgaggcgatggagatgtgctgcaggccgtccatgacgaggcgatcgtagatttcgtcggagaagatgatgagctggtgttcacgcgcgatgtcgacgatctgctggagcacctcctttgggtaaagtgcgccggtggggttgttcgggttgatgatgacaatcgccttggtgttgctggtgatcttggagcggatgtcatcgatgtccggataccattcggactgttcgtcgcacaggtagtgcacggcggtgccgccggccaggttcacgcaggcggtccacagcgggtagtccggggagggcacgagcacttcgtcgccggtgtcgagcagcgcggacatggacaggttgatgagctcgctgacgccgttgccggtgtagatgtcgtcgatggtgacgttcgggatgttcttcagctgcgcgtactgcatgatggccttgcgcgcggagaacaggcccttggacggcgagtagccttcggtgtcggtgagctggtgggccatgtcatagacgacttcgtccggcgtgcggaagccgaagggtgctggattgccgatgttcaatttcaggatgtgggtgccgttggcctccatgcgcatcgcctcgtcggcgaccgggccgcgcacgtcgtagagcacgttgtcgagcttgtgcgatttgccgaaggtacggcggcggcccacgggaatctcgctgtccgtcaggggcttggcggtgcccgtggcaagcggcgtggcggcgtgttcgccgtccgtgacgctgttggaagcgtccgagttcaattgcggggtggattcctcgccgcgcagccagttcgcgtcgacgtccagttcgctggccaggaattcgagcacgtcttcgcggggcatggtcttgccggccacgtattggctgatatggctcttgcccatctttacgccacgatgttcggcggcgtgcaccaaatcgacctgcttcaatcccctactgttcatcgcattgcgcagacgttccgcaaacaccgatacgctcatatccttatgcctccaaccgggagttcaatttatcttttgaacaacagttcaaagcatactcccggttcaacacaagttcaattttggcgtgttctcgagtctcggccggttcagcccaactgcgcttcaatccattgggcgacgccgtcctcgttgttgggcgggcagatctcgtcggcgatagacaacaccttggggttcgcgttggccacggccacaccccggccggattcgctcatcatgttgatatcgatgaggtcgtcgccgaaggcggcggtctgttcgagcggcacgtccagtcgttcgcacagcaggtgcagcgcgtgctccttgttggcctgcgggttcatgagcatccacatcacgccttcgctaatggagatgtcgaagtccggcggaatcagcgcacgcagctcgttccactgttcaggctcggggaagatggtgatcttatccgccacgccttcgggcacgtcgtggaagttcgtgtattggaaggcctgtgttttccaatacacgcgcacatcgaagttggtgtagcgcacgtcgttcatcacgatgccgagcttcaggccgggcatgcgatcgagcaggaacagacagacttcgcaggcacgccgtgaggagaagccaatcttgatcaaatggttctcatcggccggcgtggcacctgaggtgagcaggtcgaagtcggagtgggccgggtcgaaatcgatgagggcaccgttcagatagattacggcgtccaccggcagtttttcggcgaactggaggccggtactcaccggccgcgcggtggcgatggcgaatttcagtccggcatcgtgcgcgcggttgatggtgtcgatgctgcgctgggtgatgaaccggtcctcgaatacctcggcgtcgtgcagcaacgtaccgtcgaggtcggcgaccagcagtcggggttgtttcggtgtgatggcgtcgagaatcacagcagcccctcgcagtgttcacgcacgagttcggcggaatggtgcaatttggcctgctcgtcctcgctcagatcgagttcgacgatctcgttggcaccattggcgcgcagttcagtggggacgccgaggaacacgtcatgttcgccgtattcgccgttcagcagggtggagacgggtacgatgcggcgttcgtcccacaggatggtctgcacgatgccggccacggtggaggcgatgccgaagttggtaccgcccttggccgcgacgatctcatcgccacgggtgcgggtcttctcttcgatttcggtggtggacacggaggcgaaacggtcttggttgtcggccaggaagcgggcgaatggcttgccgccgagcgagacggtggaccatgcggtgaactgggagtcgccgtgctcgcccatcacgaagccgcccacgttacgcgggtcgaggccggtctcttcgccgatgatggtcttgagacgcgaggtgtcgagcgcggtgccggtgcccagcacctgggtgcgcggcaggccggaacgtttccaggcataccaggccatcacatcgaccgggttggagaccatgacgatcacgccgtcgaagccggaggccatgacgttgtcgaccacttcgcccacaaggcccacggtgaagccgagttcggccatgcggttggagttggccggcggcttgcggcccacggtgatgacgacgatgtccgcgtccttgcagtcggcgtagtcgccggcgcgcaccttgacgtggcggtcctggaattcgctgccgtcatcgaggtcgcgggcctcccccagggctttggcggcggagcggtcgatgagcacgagctcattgcacaggccgtgcgtgacgatgccgaaggcggcggtggcaccgacctggccagtgccgacgataacgactttgttgcggttcatagtgaccatggtgatgtcctttcgtaatactcgatagaacgcatacgacccatgaccgacggtaacggtcatgggtcgcgagcgacaagtctatatggcgtgcaagccgatcagccgaggttgaacttggtcatcatgtcgaggccgatgatcaatgccacccacaccagagcgatgataacggtccaacggttcaggttcttttcggcgacaccggaagtaccggcgttctgggtcagaccgccgccgaacatgtcagacaaaccgccgcccttgcccttgtgcataaggatgagcagggtcagcacgaagctgagcagcacgacgatgacttgcagcgtgatcttaagagcggtcacagggtacctccggattgattggactgttgaccagcatagcgcacacacgggaaaaccgtggtattagttccgtgatttcgtggatttcagtgccagtcgagcgattttggcgagttcctcaacatccagggccgcccctccgatcaggaagccgtcgacgtcgggttgggaaatgagttccgccgcgtttttcgaggtgaccgatccgccgtacaggatacgtacgctatcggataccttcgtgccaaaagtggtcttcaaatcgttgcggatggcgtttgcggcatcctgggcggattgcggagtggccaccatgccggtgccaatggcccagacaggttcgtaggccacgatgagttcggcggcttgttcttcgttgagatcgcgggtgacgtctcgtacctggcccacggcgaaatcgagttcaatgccttgacgtcgttcctcgaagctttcgccgacgcacaaaatcggctgcatgccggcggcgagcacggcacgtacctgatcgacgatattggcgtcatcttcaggatggtatttgcggcgttcggagtggccgacgatgacgtacgagcagccgagatgggcgatcatgtccgcggacacatcgccggtgaaggcaccttgggtggtcacggaaacggattgtgcgccgtaggcgacatggagcttgtcggcttcgaccagcacctgtacgctgcgcaatgacgtgaacgaggggaaaagcgcgacttcgcagcgtttgaagtcaaagcgagcgtcacgcaacagccataccagcttctgcacgaagtaagtggcttcaagatggtcgaaattcatcttccagttgccggccaccaacggaatgcgtttggacgccatatgtttcccctctaaaaaatacgtagctcccctcaaggaggggagctagaaaatggattactcaagcaccttcagaccagggagctccttgccttcgaggaactcgagggatgcgccgccaccggtggagatgtgggagaagccgtcctccgggaagccgaggttacgcacggcggaggcggagtcgccgccaccgacgatggtgaacgcaccggctgcggtggcgtcgaccagaccctgggccacggccttggtgccggaggcgaactcaggaacctcgaacacgcccatcgggccgttccacacgacggtcttggagtcgacgatcttgtcgtggaagagcttctgggactccgggccgatgtccagacccatcttgtcggccgggatggcgtcggcggcaacgacttccggagcaaccggggtgtcaccggccgggaagccggcgttcacgacgacgtcggtcggcagcacgagctcaacgccgttcttctcggcggtctcgatgtagcccttgaccttctcaagctggtcctcttcaagcagggaggtgccgacctggtagcccttggccttgaggaaggtgaacaccatgccgccgccgatgaccagacggttggccttgtcgagcaggttctcgatgacgccgagcttgtcggagaccttggaaccgccgagcaccacggtgaacggacgctccgggttctcggtggccttggacagggccttgac

SEQ ID NO: 707 - DNA, 3442 bp, Unknown
  R14_15m  MAG No. k141_33378
cgccacaacaacgaggagctcgcctcctcgtggggcaacctggtgaaccgcgtggccaacctcatcaacaagaacttcggcgagattccgccgctggacgaggattcgatgaccaacgaagaccgtggccttctggaagaggcttccgccgcgttcgacgtggtcggctcctccatcgaaacccaccaccagaagcacgccctgtctgaggcgatgcgtgtggtcggtgacatcaacaagtacatttccgccaccgaaccatggaagattaaggacgaccaggctcgtctcggcaccgtgctgcacgtggccgcccaggccgtgtctgacgcgaaccacctgctcgcgccgttcctgccgcactccgcacagaaggtgtgggaggcgctcggcggcaccggtaccttctcgccgctgcctgagctcaaggaagtcgaggatctcgacaagcccggcttcacgtacccgatcatcaccggcgattacgagctcggtgtgaacgtgcacccgtggaagagcgaggcgatcgaggtcggcgccgtggtgcctaagcccgcaccgatcttcgccaagattccgaccgaggccgtggaagaggagctggctcgcttcgatgaagcgctggctgctcgccgtgccgccgaagccgagcgtctggccgccgagaaggccaaactcgccgccgagtgattcggcattgctagctcgtagctgacgggccacctcgcacatgaagtgttgcgaggtggtccgttgccgtatgtgcggtcaagccccgacaatgcgaggccggttgtcggcgggcgtcacaaattcgtcacactccgccaagacttttcccagacaagcacatcaattcgccaagcatggggcggttatatagaagatgtcaacggaatgaagttcataccggtggcgaggttcttcgaaccccataactgaacccttcttctctcttctctctcacccggcggccccctccgccgggtttctttttttttaatgctgggaatgccatgggccgcatattgaaaaaaggattatggcagagtgctgtctgtttacaataaggcattgctgttctagaaaataacaaagaaggggggactgatgatgtataccgtcacattttcgggcaacctgactcaagcggaatcggccttggtcaagcgaggcgccatacagatcgccgcgttgctggccgcaaaaatcactggccgcggactcatcatcaacgacggtgacaccgaatactcatgggatttcatcctggtcgatgccagcagcgatgagcggcacacctttgacgagaggctattgcggatgctgtccgactacatccacgccggtttccccgatgccgtgatccgccacgccaagcacgaggctccaaagctcggcaaataatattggtcgcgtggtgagtcccatacttccgtcggaatatcgctatcgcgatatggtcgcatgcctgttgcgcattgaagcgttcgacctatgcgcagttgatgttccggtgatgacggcaaccgattgacgcgattaccgggacagatttcgctgtcccggttcgtgatttcggcttctttttgggaaccgggacagccccccttgtaaacgcccattatccgtaatcccaaaaccccggaattccgccgatgtacgatggcgaatattgcacggtggggtgataggtgaatgaaattttgtcttggttgctcaaaaaggggcgaaatggagaaccgggacagcgaaatctggcccggtccacacataaatcgattgacatcgctaccgggacatcggacacggacaccgagtcgcgcagcgtcggcgcaacatggatactgtacgactttcgcgataaacgttatattcttcgtcgcctccgccgggcgatctcatcgagtggcgttgccgtcaaagtgaaatcgaatacggcacctcgcaatgccaactgccgcccgacccggtaggcgagttcggcttgggatggctcatcggccatgttcgcggcagtggcgatgatgacgatccaatgatgatgtcgcagcagttcgcgcttgtcgttgtcccgccgccactggtttttgtcggcgcgatgatgatcgccgtcatattcgatggcgacgcgaaattcgggccaagcgagatcgagcgttatcggcgcgccgttgctgaatgtcgcgccgggcaccgtgtaatttgtcacggctggcggaagcccgtatttcgtcgtcgcgatgcgggtctttgattccatcggagagtccacgcggggcgtaatgaatgcaagagcgatcatgcacttggattttgcgttgaatttcgggagtccagtgacttgccgcacgaagtcctgataaatgccgtcagcagtgcggccgttcgccagacccggcttgcgggcgattgccgtaaggattgcgtcgccaagtatgaccagcgattcgagcgatatatgagcggcgagttgtgcccaagtgtgtatcagatccagtgcgtacacatgtttgttgatacgcacattgtgcgcatcgctcagcggcttccagatgtgtggtgtcgttggcggcacgatggcacgtattcgtgtgcggtgtgagtcggagacggtatggagctcggcggggtcgatatcgcaatccttgggaagcggcacggattgcagtatcagcgatgtggccatgccgaagagcaccggttgcccgagctgttgcgcggcgtccgtgcatcgtttaagcatttcccgcttacgttgggtgagggtttcgctcattgctggcgacacagggcctgtaatcacagttggcgcggaactcgccatacgtggtgatgaacgtagctcaggattgatggtgcgcgcagacgcaacgcccggtgtgtggggccgggtccagccggacggttcgtcgtcgaatacgccgggcggtggagtgggcaatatgtcgttcatgacgccaccgtagcgcagcggtcacatgctcgctatgaaaaccggggtatgtggctctagcttgcgggagatgtggataactctgtggataactagttcggaacaattagcgaggccggaacctaccggcaattggccgatgatgacggcacttttgctcagctcagccgcgatagtctcgaataggtgcggccgggcgtactcgcataacgtaatgccccttctctctgaacagagagaaggggcattcgaaatatatgctcccgccagcggaacgtcagcggcagcggcgggtgagaggctgccaggggtcgatttcgaccggttcggtggtgagcagggcgcgggtggcgtcgtcgaggtattccttgcggatgatgagctcggtgacgtagcggtcgaaccaggcgtcggacatgacgtagtagccgtccttgccggcgtccttgccccagctgttctccaccttccagcggttcggcttgc

SEQ ID NO: 708 - DNA, 3639 bp, Unknown
  R14_15m  MAG No. k141_33399
acgacgcggttgatctggcggcactcgttggtgatgcgcgtggagatcgtggcgagcacatcgtagggcacgcgagaccagtcggcggtcatggcgtcctccgagctcaccggacgcagcacgatgggggagccgtaggtgcgctcgtcgccttggacgcccaccgagtgaacgtcggcgagcagcacgaccgggcactgccagatgtcacggtcgagaccggccttggagagctcctcgcgggcgatggcgtcggcctcgcgcagcaggtcgaggcgctccttggtgatctcgccgatgatgcggatgcccagacccgggcccgggaaaggctgacgccagacgatttcgtcgggcagaccgagctcggtgccgatggcacgcacctcatccttgaacagagtgcgcagcggttcgatgagctggaacttgatgtccttgggcaggccgccgacgttgtggtgggacttgatgttggccgcgccgtcgccgccgccggattcgacgacgtcggggtagagggtgccctgcacgaggaacttgacttccttgccgcgcgcgccggcctcttcaagcacttggcgctgggccttctcgaacgtgcggatgaacttctcaccgatgatcttgcgcttgcgctccggctcggagactcccttcagggcctcaaggaagtcgtcggccgcgtccacggtgatgagcttgatgccggtggcggcaacgaagtcgtgcttgacctgctcgacctcgcccttgcgcagcaggccgtggtccacgaacacgcaggtgagctggtcaccgatggccttgtgcaccagagcggcggccacggcggagtccacgccgccggacaggccgcagatcacctcggcgtcgccgaccttctcgcggatcttcttgacttgatcctcgataatcgaggaggcgtcccagtcgttgggcagcgcggcgcaacggtgcaggaagttttcgataagcttctggccaagcggggagtgcttgacttccgggtgccactgcacaccgtagagcttgcgggattcgtccgccatggcggccacgggcgcgccttcggtgtgggccagcacttcgaagccggccggggcctgttcgaccgccacaccgtggctcatccacgtggtctgctcggcgggggagtcggcgaggatgccgtcggcgtcgtcgatggtggctgaggtcttgccgtattcgccgagagcggccttatccaccttgccgccgagctcataggccatgacctggaagccgtagcagataccaagcaccggaacaccggattcgaataccttggtatctatggtcggcgcgccgggctcgaacacggaggccgggcctccggacagaataatcgccttcggatccttggccaggatctcgtcgaccggcatggaatgagggaccagctcggagtacacgcctgcttcgcgcacgcggcgggcgatgagctgggcgtactgggcgccgaagtcgacgacaagcacaggaccgtttgccattgatattcccctaacgttcattggaattttacgtgggctgaacacccctgattatcactggtcaaggcgacaaggccgacacgcagggactatgtgcgcaaatcgaacaaactacatgcctgtagtcggacaacacgccgatttcgaacatgggaaatcgaacgtgcgctgttctagccagatgctagatttccgcatgcttccgccgttctgaaaaagtatgttgaaaaaactaatgttgacaaacggtcagttgaaccgcacaaatactgaaatttccgtaacaatttcgaacacacccgcaagaaatcgttcaaaagtcgcgttgtcctcgtaccatgacgattgattgggaacggaaaaccttggcaccgcaagggtcaggaaccgtgaccgaacagaaataatcaatcgcacgatcacgtgcaggagtacaggagtacacatgacgagtcctgttattggcaccccttggaagaagctcaacgctccggtttccgaggaagccctcgaaggcgttgacaagtactggcgcgttgccaactacctttccatcggccagatttatctgcgttccaacccgctgatgaaggagcccttcacccgcgaagatgtgaagcaccgtctggtgggccactggggcactacccctggcctgaacttcctcatcggccacatcaaccgtttcattgctgaccacggccagaacaccgtgatcatcatgggcccgggccacggtggcccggccggtacctcccagtcctacctggacggcacctacaccgagaccttcccgaagatcaccaaggacgaagctggtctgcagaagttcttccgtcagttctcttacccgggcggtattccgtcccacttcgctccggagaccccgggctccatccacgagggtggtgagctgggttacgctctgtcccacgcttacggtgccatcatggacaacccgagcctgttcgtcccggccatcgtcggcgacggcgaggccgagaccggcccgctggctaccggttggcagtccaacaagctcgtgaacccgcgcaccgacggtatcgtgctgccgatcctgcacctcaacggctacaagatcgccaacccgaccatcctgtcccgcatctccgacgaagagctccacgagttcttccacggcatgggttacgagccctacgagttcgtcgctggcttcgatgatgaggaccacatgtccatccaccgccgcttcgccgagctgtgggagaccatctgggacgagatctgcgacatcaaggccgccgctcagaccgataacgtgcaccgtccgttctacccgatgctgattttccgcaccccgaagggttggacctgcccgaagtacatcgacggcaagaagaccgagggctcctggcgcgctcaccaggtgccgctggcttccgctcgcgacaccgaggcccacttcgaggtcctcaagaactggctcgagtcctacaagccggaagagctgttcgacgccaacggcgctgtcaaggacgacgtccttgccttcatgccgaagggcgagctgcgtatcggtgccaacccgaacgccaacggtggtgtgatccgcgacgacctgaagctgccgaacctcgaggactacgaggtcaaggaagtggctgagtacggccacggctggggccagctcgaggccacccgtcgtctgggtgtctacactcgcgacatcatcaagaacaacccgcgcgacttccgcatcttcggaccggatgagaccgcttccaaccgtctgcaggcttcctacgaagtcaccaacaagcagtgggatgccggctacatctccgacgaggtcgacgagcacatgcacgtctccggccaggtcgttgagcagctgtccgagcaccagatggaaggcttcctcgaggcctacctgctgaccggtcgtcacggcatctggagctcctacgagtccttcgtccacgtgatcgactccatgctgaaccagcacgccaagtggcttgaggctaccgtccgcgagattccgtggcgcaagccgatcgcctccatgaacctgctggtctcctcccacgtttggcgtcaggaccacaacggcttctcccaccaggacccgggtgtcacc

SEQ ID NO: 709 - DNA, 2538 bp, Unknown
  R14_15m  MAG No. k141_34380
caggcatttccgacgagacgcggagacaagtcgagcaaatcctcaaagatcacggttactcaaggcctctggtcaacaccaaactctcccccaccatagagctcgtcgtcgaatacattgagcacaacggcacgatggaactcatcaaatacgcctcatactgggcgcagcaggcgggcctcgccatcacggtcacccagaccaaccatggcgatgccacggaagactgtttccgcggcatcatcgatagaaatccccaaggtgtgattatgcagcagatgggcggtctgaccactcaagcgaagtctttgttgaaatcgcgcagtattcccgtggtcatcatcgacccaatcgataccgtcgattcggatgtgatgagcgtgtccatcgataactggaccgcaggataccaggccggcaaacacctgctgtcgctcggccatcgacgcatcgccgttatccgggggccggcgaacctacagaccagcatcgcgcgctatagcggattcaccgccgctctgcaacaggccggggtggatctgccggagtcctatatcgaacagggcgactacttccccgccgaaacaagctatgaagcagcctgccggctgctggaactcaccgaccgacccaccgcgattttttgctgcaacgacttatctgcagtaagcacgtatcgtgccgcacgagagcataagatcgcgttgccaaagcaattgtccgtcatggggttcgacgacattttccccgccggccaactcatgccctccctgaccagcgtgcatcagccgttcagcgaaatagcccaacgcgccgtgcagatgatcatcgacagccgcaagggcaatcagggtgatatgcacgtcatcctccccaccagtgtcgtcacccgggaaagtaccgtaccgcctcagtcatcggcccgataatcggccagattcaagctggcggccacccgattggacgcgaacgcacccaccgaaaccagcgcatagcacagcgcaagcccgccgaagaagctggccagcgtggccggttcggtcatcgaagcggcgaacagaggggccataagcagcatggaacagccgccggccacgatcaccacgatgttgagcggggtgagtacctcgatgaatcgcgcacggttcaaggtcttgacatcagtgccctccaacaccagcatgcgatattcgccggcctgatcgtacacgctgccggcctgcatcacaccggagctgaccgcggcaagcacagcggcgaacactagcgtcaggatgccgccggtgccgatgtcgcgaatgaacacgatggacgggtcgttggcgtcaccgaccacggcggccgagccaaagaatccgcagatcgaggtgatgccggcgatgaacacggccagtgcaatgccggacacattgcgccacgcgcgcttcggattgtcgagaatacggcgcatggcaatcatcgtggccgcgtccttgggccgtttggccttggctttggcgcgggcggtgaccacccaggagcccacgaggttcaccagcgcgaagcacagcagcatgaaaccgatgatcacgccgtacatcactacttcaccggcctgagccagcaccatcggattcttgaacagaagaacggcaatcaccatgatgacggcgaacaccaccacacgccagccggacggcagcgtagtcgcaacgcgtgaagtgacgccgagtggcgtgatggccacgcgccgaagcgtgaccagcgaagagatcagcgccaacacggtcacgccaacaagcgtaatgatcaaggcaatcggccccacccacagttgctcgaacgtaaacgtctgattctggaaatgcagcaacatgattagggggatcaacacgcagtaccccgcgatgccaatcagcgcccccaccaaggcctgcccagccgcatcaagcgccgtaaggcgaataacttgccccgtggtcgcgcctgccaagcgcagggatgcgagccgagcgtcacgacgggacgcagccaatcgcgcggcggaaccggcaagcgccacgaacggcacaatcagcagcaggcaggcaaagaacgccagcacgacgtatgccgtggcgtattgatccaggctgtggggattggcgatacgctgcttccagatttccgctgttccgggtttgcaagcgtcgagattgattgcgcatccaatggtgtggtcggcggaggcgcgccacatgaacccatgcacgccgcccaaaacggtgagaaagatagtggtggctgcggcaaaagcaatgatggccaacaccgaagtatgacccgcactgccacgcgagccggggcgatggaacaatcgccacaatgcgaaagcgctcatcgtacgcctcccagctggccgtcctgcatggtcacggtgcgcgagcagaacgaagcgacgttggggtcgtgggtgacgacgaccacggcggaaccgttgtcccgcgcggcggccatgagaatgcccatgacctcgcggccggtggcttggtcgagcgcgccggtcggctcgtcggcgaa

SEQ ID NO: 710 - DNA, 21672 bp, Unknown
  R14_15m  MAG No. k141_34411
aaaccgtcgaaatcacaaatggatgagctgggactcgtatggttggaggtcggcgcccatcgcattcagaatcacgaaccagcagttttcgggcagcgagtcgagcttgtcgatctggttcttgagcaggcgcacgtcgcgaccggtgagcgcgctccacaggttaaccatgatggagacgttgtacagcatgtagcactcgggggcctcgggcgctattccacagaaatcgtcaccaccgcggaggcaatcggaccatcgtggctcagggaaatatggatatgcggcatcgaccccgcaccgagagtcgagcgctgcgccgaacgcgcattccgccgctcctgcatcactgtataaggcccgttatcggaagcaggggaataagcagaggaatagcgagcgccgtcagccgaattcgcgtaatcagtttggaagactgacgccgcccccttacccagagacacatacggcacaccacgggaatcgtccaagatctcgatttcaggccacgggaaattatcaagcgtgaacggatagggggcatcgccaagataatcgcaccaggctttgaggaacgcctccttgcccgcccatttggcggccagatggacggcctccccatcattcttctggcgcgcgcggtcggatgcctgccgcacctcacgcacggagaacagcgcacgcatgcgagaccccggctccgccaactgttcggcgaatgcggccacatccaccacgtcatgccccaaaccacaagtattcatgcttcctattgtgtaccgcttcgcgcgtaatctctacacctcatcagaattggggcctgatttccatttcagggggaaaagattcactatgctggatgacctcgcgcaataccgcaaacatcttgggctggctgcctagccgtccaaaaaacatccgcgccccgcccggaggtctatctccgtttcgaggggctgattttgaccgttccggaggtctacttccgtttcaaggggctggtcatcctccataccacgagtatccacagcataacgccaacgccattccgccgtttttacgccttgtctacttgggtaacagccccttgaaacggaagtagacctccggcgaatgccaaatcagccccttgaaacgcagaaagcccactccgagggaggggctttcgtatgttctgcatatttctctcactgagtttgcgccagcgagaaagctccaggggaaactcccctcacccgcttcgcgggagctcccctcaaagaggggagccgagatccggtgcgctactggctcccctcaaccgaggggagccagaggaatcaggcctcgtagtagccgtcggcaccgaggcgggcgtccgggttgaggagcatcgccttttcgacctcgtggtggtcgtagccacggtgatcctcgcggaagcgacggttgtcgatcggctcgtagagcgcggcgcgacccatcatgccttcctcgaggtgacgctggccggcggccaggcgggcgttggcacgctcacgccaggcttccagcgcggcctcgccatcggccttggccacggccgcttcgaaggcacccggatgaaccagggccacgaagccggaaacatgtccgaagccgagcgaggtggccagaccggccttgaccgggcgaccagcggtctcgcgaccgaactcgtcctcgccaccgccgatgcgcaggggcttcctaacccagaccatgtggtcgtcgcgctggagcttcggatccacgcaatcgagcgccgcgttcgccggaatcacgccggacttgaacagctgcgtcagaccgttgacctggaagatgcaggcaccacccttggcgtggccggtaagcgtcttctgcgagatcacgaacagcgggttgccgtcggtgcggccgatggcgtgggccagcgtgttgtgcagctcggattcgttcgggtcgttggcgttggtggacgtgtcgtgcttggagaccacggcgatgtcgtcggctgagacgccgagcttagccaggtcgtgcacgagcttggagtccttgccaccgaggccggcagccagggcaccgaggcccggagccgggatcgaggtgtgggcaccatccgcgtaggagtggatgaagccgaccacggccgcgaccggcaggccgagcttttcggcgatgtcaccgcgggtcacgaggatcgtgccgccgccctgggattccaggaagccgccacggcgacgatcgttcgcgcggctgaagaagcgcgcgtcgatgcccttgccgtacatttcctccgaattggcggtggcgttcatgttgccgaagccgatcacggattccacaccgatgtcgtcgatcgcgccggtgaccacgaaatcggccttgccgagggcgatcttgtcgacgccctcttcaagggagacggccgcggtggcgcaggcggagacaggctggatcatgttgccgtaaccgccgatgtaggactgcatcacgtgagccgcgaccacgttcggcagggcttcctgcaggatgtcggtcgggatctcgtggttgaggaagcggtcgaggtacagcttgcgcatcgacatcatgccgccaaagccggtgccctgggtcgaagccaccagcgaggggtggatggactcgaggatttcggccggggtgaagccggcgcccaggtaggcgtccacagtggtgacgatgttccacagggcgatcttgtcgacgtcgccgaccatcgaagcggggatgccccaacgggtcgggtcgaagcccttcgggaactggccgccgactgtgcgggtcatggtggcgcggcgcggcacgcggatcatcgagccggcgtggcgggtcacgttccattcgccggattcctcatccggggcgatggtggtgtgagcctcgtccaacttgacgtattcggcggcgacttcgcgggtgggcacagagaaggtgacgtcgtggtcgaggaagacctcggcttcttcttcgtcagcaccgtccttgtagtcgttgcccatgccttcctcgaacgggcggatgccggagcgggccacgacctcgtcgtggtagcgctcggcgatgtcctcttcgggcacgaggttgccgtcggtgtcgtaccagccgggcttcgggctgtcggcccaagtcagcagacccatgttccacgcaagttcgagcactgcgccggcgctcaggtcgacagtgccatccgagtggatgccgagctcggcctgggtgcgcgtacgaccggagccccacgggcccagctcaccgacggaaacgatgacgatttcgtctttcggcttggcggtgacgttggtccagtcggcaaggtcgaccgaagcctgcttggtgacgatcggggtgggcagcgccttgatttgctgcccacgcgaggagtcagacagtccagtggactgtccggcgacggagccatccgtttcctgagacgaggccgcagcagcttccttctccgcatcggccatggcctccgcgcgcaacgccttgatgtcgatgggctcggagccgaggccaccggtcaggtccacatcgagcggggccttgagggcctgctcgcgcgattcggcagtgcacaggtcgagcagcttggccgcaatctgcgcggtggagtaggtgtggatgccgtgacgctcaacgacggcgaccagcgggtcgttaccgcccatcaggccggtgccacgcacccagccgatcttcgggtgagcgaaggtgacgcggctcgaccacaccttttcagcgcgggcacggttgacgatggcgtcaaaggcgctcttgacttcgccgtaggcaccgtcgccgccgaatacgccgcggttcggggagccgggcagcaccacgtggagcttgtgctgcacgttggtgtcggcaccgatgtggctgaagccggcgatggcgcgttccacgccccacagcatcagtcgcgcctgtgattcgaacaggtcgccggagtcggcgagcgtgccatggaccggcggagcggcgaacgggaagaacagggtcggctcccacgcgggcttcagaatcgtggtggtggcaccggaggtcttcttctgctcgtgccccacccagtcgaccagagcgtcgacgtcgcggtagctggagaggttggccggaaccagccacagcttggcgttgccggtggcgtgctcgcggtaggcctgcttggcccaagccttgatggacggcttgaagctgtgcgaagtggccaccacagtggcaccgcctgcgagcaggccttcgaccacctgagcggcaatcgagttcgggctcacgccggtgacgatggcgatatcattcgcgtaacgggaggcgttcttgttggaagcgacctgttcgagggcctcggagccggccttctggaaggcggccttaagctcctcgctctccgactcgttggcgaaccactgggcttcggcggcgatggtcttgccaaggccgatgaagctgccgttcaaggcggcggggtcgttgccgtagtaggcgcgggcgaggtcttcacgggcggaggcccaccggtcatcgaagaggatggccttgttggcgtcgaagcgcggagcgacctgcttgggccagtcggaaccaagttcggcttcgaccgcggccacgacggcggcgttctcgtcctcggattcttccggagccggagcggccacgccgagctcgttcagcacgaagcgggcggtggcggcgagcacgccgttggaaccggtgaccttctcggcgaaggcgtcgagcgcggcggaatcgaccacagcgccaccagcggcaccaccggcggacggcagggccacggcaacacccttgagctgggcgacgatctcaacggccgcatcgatcagcttgtcggcttccggcttgttctgcacggcggcggtgggcagcttggccagatcgccgccacgggagctggcaccctcgcgagtgtcgagcagcagtgcggcgagcacgctggccacccagccttcgccgagctgccatacgttggccacacggtcgcggatgtactgctgtttgacgccggcggcaccgaacagcgagcgcaggcggtcgcgcagcgcctcggagagcacggcaccgaacggcttgtagttcggggcggccttgttgacgatttgggcgagcttgtcgagcgtcgcttcagcagcaccgtccacgctggcgactcccagctcggagctgatgtccatgagcagctggttgcggcgagaagagacaccgttggtcagggtgtcggtggtgtcgttgctgccgatctggtcgaggcgcaccttggcggagtaggccatgagtacgccgatggcatcggaagccttgaagggcaggtcggcgacggcggcaccagacggtgcgccagcagcggcctgccctgattgcaggccgcgcgaggaggcggacagtccagtggactgtccggcgacggagccatccgttgtctgagcagcctcagtcgcggcatttgccggagcagcacccgatccgagcttggcgacggcggaaccaccggcaggagcggtttcgaccgaggccgaggccgcagcctcttccggctcgtcgtcgggaaccagcgaatcggtgtcggtcatgtagacgcggccttcatcgcggccgacgttgtagacgaccgtatcgttgccggcgaactcgggcagacgtagggtcttggtaccgaggttggccagggtcggggcgttgccgaggccgacttcgacgtattcttccacgccgaggccgccctgttcgcgctgaccgaagagcagcgcctgggtttcaatccaacgcaccggggaggcgaactgccaggagagcagttcggtcaagagcagacggccgagcttctggtcgtcggcggcgtaggaatcccacacggccgggtcgtcgagcacggccttgatgcgttcggacggcacggcttcgaggatcttggcggcgaattccttggtcatctcgaacggggtggccaccaggttcgggatgtagcggtccaccagacggccacggtagtcgatgtaagcaggaagcagcgcgtcgagcttgtcgcggaattccggcacgcccttgcgcagtagcgtggagtggaacggcacatcgatgccgggcaccagcatgaacgcgggcttgccaccgaatgcggccacgcggcgggcggaatcggccttcagggccttgagtccggcgatcgtaccggcgatggcgtactgctggccggcgaggttgtagttcacaatctccaggaattcgccggacgccttggccacggattccacatattccttgacgtgcgcgtcgtccacaccgaactggttcggacgaagggcacccatgcggtagttggagcgaccctgtgcgtcacgctcgatgaggtggtgcatggtggaaccacggtggaacacgagctccagcacggtttccagcggaatcacgtcggcgaacgcggacaacgcgttgtattcgccgagcgagtggccggcgaagtaggcgggccagatgtcggcgccggcttcgcgcagacgggcggtctgggcaaaagcaaccgtcgcgagcgccacctgcgtgaactgcgtcaggttgagcaggccttcggggtgacggtaggtcacgccgttggcggtgagttccttcgggttgtcacgcacgaggcccaggatcgagaagccgagcttggagcgggtgagcttgtcggcgcgctcccacacgtcgcgggcggcggcggacttggcgcgctcgtccagaaccatgccctgcttctggatgccctggccggggtagacgaaggcgacgcgcggcgcacggaccagtgcggtgccgcgggagacgagctggccgtcgatacggcaggtgacttcgagggtcatgccgccgtggcgcactttgccgacgcgctcgacggagatttcgacggtgtcgtcaagctggaccatgccgtacatgttgtaggtccagccggcaatctcgtagtgggcacccttctcgtcggtcgcctgcacggcgtgctgggcggtggcggacagccacatgccgtgcacgagcggggcggccaggccggagatgcgagcgccacgagtggaggtgtggatcgggttgaagtcgccggaagtgcgggcgaaggcggtcatgtcgtgtggggcgacgaccttcacgcggcgcagcagacggcgcggagtggcctgcactacttgcaggccgcgcgaggaggcggacagtccagtggactgtccggcgacggagccatccgcttccttattcaggagggcaccaccatactcgggggcgtctgcaggcaaagcatcggagtagacgcggccgcggatcgcgaaacgctcggtttcgcgggcaagcggcgtgccgtcggcggcggtgtgggtcacgtggatggtgaccacgcggccggaggcggactcgaagtaatcctcggcccaagacttcagggtgatggtttcgccggtgtgcttgagcaggtcctcctcgttcacctcaagttcgatgaggtggtcgaggtggacggcgttgagcaggccttcaatcaccgggtagcccttgacgtacacggagccgagcgccgtgtagattgccggccaggcagggccgaccagcgcatcgggggcgatgcggctgggctgcagggtggtcggcagagcggcgccagtggccgcttcgtggtcgaagccgaggttggcggatagggtgtaggttgcggttgcggtaccgaacggacgctcgtcagaggtcttgtcgtcaagcttcggcatctcggtgagcttgtcgccggtgatggcggtgttgccgatgcctgcggtggcggcgagcatcgcgtagacgtccggaatcaggcgttcgcggtccacgaccggcacacggccgggctcggtgccttccacgatgagcgggatgacgatatcgcgcacggcgtgcttggaggtgccgccgtccgggtcgttgtcccagtaggtgtcgaggtggatgtccagatcgtacttgccggccgcggcgtcaaacgcgcggatttcgtagtactggtcgcccagggcggtgccgtaggccgggttgtcggtgatgtggccgacccaggagatgttcggggacttgcggatgaagtcttcggcgctggtggcctcgccaagtgcggcgaaatcgtcgttctcagcggcatcggcggcttgctgttcgtcctgcacgcgcttgatggcggcggtttcgaagcggccgaggatgtcggcgatcggctcgtcgatggtggtgatgccggcaacggagatcgggccggggatggcacgcacggaatcggcggagtagcgctggtcttcggactgccagagctggtcctgaccccaccaacgcagcaggtcgttgtcgatgacgggtacgaacggcatgggcttggggtattcgcgcacgagcaccgggaaccaagccacgtcggtcgggaccaccttgagttcggcggtctgcgggtaggccagtgcgagcttttcgagcgcgggggccgggtcggcgagaatgtcgtcgtgggtcagcaggccagcggcagctgcctcttcagcagaaacgccatcagcggcgaacaacttggaggtgaattcgccggagtccgtgtcgttcacacgggcttcgatgcgctgcagcaggtgctggaagcggtcggcgtaagtcgggtcgacccacgggaaggcgagttcggcgaagcgctgcgcccactcaaggtaggtcatggaggccaggtcgccgaagtaaggcttggcggtcttgttcagggcttcgatgatttccttgcggcgggagtcgagctcttcggggtgcttcatgacgcgcacgagcagacggccgcattcggcggagtcgttctcgagctcgtaaatgtcggcgtgcaggtggctcaggccggaggacatgccaccgacggacttgccggacggcacccagtgggcggcctgcggggcgaacacgtcgtcggacttggcgtcggccggaataccgggcgtcttgacgagcagctgcttgacttcggggctggtgtgagcctccttggcggtcatcgcggcggtaccgataagcacgccgtcgaccggcatgtcgggcaggccgtaggcgtgggcccactggccggaaatgtagtcggccgcgcgttcgggggtgccgatgccgccgccggcgaccagcacgaggttgtcacaggcgcgcacttcggcgtaggtggcggcaagcaggtcgtccagcgcttcccagctgtggtggccaccggcttcaccgccctcgacctgaaccatgatggtggtgggggacacggccttggcgatgcgcacgacctggcgaatctggtccacggtgccgggcttgaaactcacgtacggcagaccgtccgcctgcagcgactcgatcagggccacggcttcgtccagctcggggatgccggcggagacgaccacgccgtcgatcggcgcgccggaagcacgcttcttgggcacgatgcgggaggagccgaactgcaggttccacaggtaacggtccatgaacatcgcgttgaattcgaccgtgcggccttcctccagctcgtcttcgagggcggcgatgtggcggtcgaacacttcggcggtcacctggccgccgccggcgagctcggcccagtagccggcgttggccgcggcggccacgatttccggttccacggtggtgggggtcatgccgggcagcagtaccggcggcttgccggtgagcttggagaacttggtgaccagcttggcgccggccggggtgttgatgacgcgcggggcgaacgccttccagttctgggtgcgctcaggctcgctttccagcgtggagagcgtggagcgttcggacagcgtggtggcttcgaccacgccgatgccggtgccctgcaccacgttgccgatcagcttgccgagcgtgttgccggggccgaggtccacaatccacagcttggccgggtcggcggcgtcgaacagcgccttgacgcgggcattccagtccacatggttgagcagcacttccgcagcgagtgcgcgggtgcgatcctggtcaaagccgcaggcgccggcccaagacacggtccgctcaacagcttcggccatgagcggagagtggaagggcagggtgacttcgaggtattcgagggtcgggttgaacacggtgccgccgcggagcttctgttcacgcagcttggcctggtgcttgtgctcgcgctcggcttcgagggcgagtgctgccaggtcttccgggtagccggaaagcacgtggtggttgtcggagttggtgacggcgatggagatcgggcctcgggcgttgttcacgcgcttgaccagagcctcaacctgttcgcgggtggcgcccttgacggagagcatcggactggcttcgccatacttggggttcaggcccagttcgcgcacgcggcgagtgccggctgcaccgatcagggcggcgacggccagaatctcgtcgagggtcttgccggcggcctcgatggagccggcggcctcgatggcgcgggccatgtgcacggcgagcacgccctgggagtggccgagcacggcgagcggcttggcctgggccacgctgtagccgaggtgttcgaggtcgagcagggcgccgagctgggtcagtgtcacgccttccacggacgcggtggcgtcggctgcggcgccgaggcgggccgggttcggagtgaagccgaacaggtcgaccggacggccggtggtggtcagcaggtcggcggcgaccggggtgagcagtcggttggctgcggcgatgtggccgcgcagggcctcgtcaaggctgggatcggtggtctggtctgccagggctaccggccacggggtggactggccggcgaaggcgagcgcatggggctcggtggccaggcgattgaggaagaaggtggtcattgctttccttacttgtgtttggttgatgtcttcagaaatcagaggggctggttgccgtggtgtttggtggtgcgcttgacgcgccgcttggtggcgagcgtggccagcgattcgacgatcacctcacgggtctgttcggggtcgatcatgccgtcgatctgcccgatttccagcgacaggttcgcgttgacggtgctggtctcgtactccttgatgtacttggcccgcagcgcatcgacgtcctgcccggaggctttggccttggccaggtcgtggcggtggatgatgttcaccgcgccggccgcgccgagcaccgcgatctgggaggagggccacgcgaagttcaggtccgcgccgatggctttggagcccatcacgatgtacgcgccgccgaacgccttgcgcaacaccacggtcaccatcggcacttgcgcgttggcgtaggcgtagatcaccttggcgccgcggcggatgatgccggcgtgttcctggtcggagccgggcttgtagccgggcacatccacgagggtgaccacgggcaggttgaacgcgtcgcacaggcgtacgaatcgggcgaccttctcggacgagtcgacgtccaggatgccggcgagcacgttcggctggttcgccacgatgccgaccggcttgccgtcgatgcaggcgaagccgacgagcgcggaggcgccgaacagttcctgcacctgcacgaattcgccgtaatcgacgatgcaacgaatcacttcgagcatgtcgtagggctgacgttcgttggcgggcacgatggtggcgagtcgcttggcggtttcgcgttcggcgcgggtggcggcgtaggcgtagaccggcggcttgctttcgctgttggacggcaggtaggcgagcacggtgcgcgcatagtcgatggcgtcggattcgtcctcgccgaggtagtgggccacgccggacacccggttatgcacttcgccgccaccaaggtcggccatggagatggtctcgccggtcgaggccttgaccacgtccggcccggtgacgaacatgttcgagttctcacgggtcatgatgatgaggtccgtcagggccgggcagtagacggcaccgccggcgcaggggccgagaatcaggctcagctggggcacgaagccgctggcctcgcaagtcttgcggaagatgcggccgtactgggtcagagcggccacgccctcctgtatgcgggcgccgccggagtccacgatggccacgatcggcactttgaggtcgatagccatgtccatcagtcggcagatcttctcgccttcggcggtgccgagggtgccgcccttgacggagaagtcctgggcgtagacggccactttgcggccgtagacctggccgaagccggtgatgacagctgcaccggcgttgccgccggcgatgttgccgccctggaagcggccgatctcctcgaacgtgccggtgtcgaagagcaggtcgaggcgttcgcgcgcggttttcttgcctttagcgtgctgcttgtcgcgggcgcgctcttcggcggcgcgggccagttcggcggccttgaccacggcggtgcgcagcggctggtgggccgagggctgggcggcgttggcggccgaggccgcagccgcggccttcacggccggcgaatccatgatgtcagtcattgccgccctccttcttggcgtcggcggccttggccttgccggcgttcacgtccagcgtgaccagcgtgtcgccggcctccacgccatcggccgggccaacgaaaatcttcttcacttcgccggcggccggcgcgtacacgtagttctccatcttcatggattcgagcaccaccagaaggtcgcccttggccacttgctggccttcggacacgttgatgcgcgtgaccacggcctgcatcggggaggcgatgacgccggatttggcaccgtcgttggccgtggcggcaccggaggccacgttgtgcaagcctgcgccgcgcaacggctgggtggggcgcttggcaccgcgggcgcgggccgagccggtgatgttctccacgatgtcgagtggcacggtgagcttgacgcggcggttgttcatctcgatgacgaacgtctccgacttggacttgtcgggcgcggccggggcagcggcacccggggcagtggccaaagaggccggctggccggaggcggcggaagccggtgtgcggttcaggtacgtgcgctccagccacttggtggacacggcgaacggatggccatgctcggcggtgaagtcgtcgttgcggaagatctccttgaacagcggaatcggcgtgggcacgccttcgatcacgagctcgtcgagcacgcggcgcacacgggccacggcatcgagacggttctgggcagtgacgatgaccttgcccatcatcgaatcgaacttcggggagatggtgtcgccctgttccacaccggtatcgatgcgcacgccggggccggccggccactggatcttctccaaggtgccggagccgggggtcaggttggtggccgggtcttcgctggtgatgcgcagttcgaagctgtggccgcgcggttcgggggcgcgggtgagctcgccaccggcggcgatattgagctgttcgcgcaccaggtcgaggccgctgacctcttcggagacggtgtgctccacctgcagacgcgggttgacttccaggaagtacactttgccgttcggggtcaccatgaattcgcaggtgcccaggcccacgtagccgaccgtggtgaacaggcggcgggagtattcctccagcgtgctgacgatttcctcggacaggaagggcgcgggcgcctcttccacgagtttctggttgcggcgctgcagcgagcagtcacgggtggagtacacggtgaagttgccgtgcgagtcgcgcccggactgggtctcgacgtggcgtgccttgtccacgaacttctcgatgaagtattccttcagatcgccgccttgcagcgcgtcgtggttcatgtagaagcggcgcagctcctcgtcgtcatgcaccacggtgatgccgtggccgccaccgccatcagtgcgcttcatcatgatcgggtagccgtgggtgtgtgcgaagtcgagcagcgttcgcacgtcggtcaccggttcggacaggccaggcaccggcggcactttggcgcgcaaggccactcggcgggcggtgatcttgtcgcccaaatccaccagcgcggtgtggtgcggacccacccagatggcaccggcatcctcgaccttctgcgcgaagctcggcacttcggaaaggaatccgtagccggggtgcacggcgtccgcaccggttttgtgcaggatgtcgatcagcagatcctcgttgaggtacgtgtccttgtaggtgtcgccggagagcaggtatgcctcgtcggccatgtccacatagcggctattgcggtcttgttcggagtagacggccacggtggagatacccatctccttggccgtgcgcaccacgcgcagagcgatctcacctcggttcgcaatcagcagttttttgacagtatgagccatagtgtcaaattgtgctctccatatagaggagaaggcaagccgcgttcgcacaaaagctttcacgcccttttgtaggctacgaacaaacgcgcgcgtaggttccggcaacgtaaccgttggcgccggctatcaaaaacgttgcaaatccgtcgattgcacatccttgcgcgccggttcaagaagttgacgttacggttgcgttcgtcaacttatgacaaatcgaaatcgacaattttgtaagttggtacgaaaccgcacgaaatcgaacacctctacgatggcaaccgtaagttcgggggaaggctcatctgcgggcgaacggaaggcgaccggaccggcatcggtccatcgccgcacgattcgcccgcacagggccggattcatttgggaccgtccaccatatggacggttcgggctgtcggggataccgcacggcccgccggaacctcccctcatccatcgcataccgcccgccgttcacggcgatatcacacaacataggggttattgatatgcagacttcacacaccaccgcatccgcagcggccaccacgccgctcgcccgtcgtatcgtcgccgcatcctggaagccggtgctgttcgccgtgctgatgtggctgtccgcggccgccggcgagattccgattccgggcacgccggtgccgatcacgctgcagacgttcgtggtgatgctcgccggtctcatgctgccgtggcgtcaggccggtgccgccgtcgccacctatctggcggccggtgcggtcggcctgccggtgttcgccggcggcacctccacgctggccctggtcggcccgagcgccggcttcctcttcggcttcctgccgggtgtggtggtcatcgccctgctgcgcggcaagtccgacacttcgtccttcgcggccgccgcgcgcaccgcgggccgctacctgctggccgcgctggtcggcggcgtcgtggtggtgtacgccttcggcttcatcatccagtccgcgttgaccggtgcgccgctcgccgccgtggccctggcctccatgggcttcgtcgtcggcgacgccatcaaggccgtggtggcctctctggccgccgccggcctgtccaagctcggtcgctgacctgagctactagctagctactggccggctattacagcactcccacatcggcggtgcggaccgtatggtccgtgccgtcttgtgttctcaggatcagtgaggcgtcttcgttgaggccgatggcttcgccggtcagcgtggtgccgtccgtgaaatgcgcctcgacctgacggccgcgcgcccagcacaccgccttcatttcctcgcgcaacgactcggcctggcccttcgggtcggcgatgaacttcgccagtcgttcacggaagccctcgacctgacgttcggccaccgcatcgcgcatctcgccaaacgacggcaagcccgtgacatgcagctgcagcgaagtcgactgcggcgtgggcagccaacaggcacccagcgccagattcaggcctacgccgaacacgatgacgacgtcgtcatcggcatcagcatcagtaccggacgacggcggaatcaccagttccgagagcagcccgcccagcttgagcccgtggcagaacacgtcgttcggccatttgagttccagcaagcagtccggctggttcggcgcggcaccgtattcctcgatcatgccgttcagggcgtccagcgtgaccagtccggcgatcatctgcagccagccattgacggattcgtcggtggcgatcgcgcgcggaatgcgcacggcataggacatcgtcgagcaacggccgggctgactgatccacttgtgaccattgcggccacggccggcggtctgccggtcggcggccaccacggccaccgccagttcgccatcctggtggtcgggcagcgtcaacgacccgtcgccgatcatctgcgcggccagcgcgttggtcgaatcggtttcgtccacggcgaccacatgatccgcgacggctgtagttctgggtagctgcggcgttgcagctttcaatgcaatcatcatggacactacgttacctcggttgcgccgttttttgcccgcgatattccacggaaaagcgcacaaaatcaaccattttgggccggacagcccgtgttagcgttcacaacttcggaaattccgcattcgccgagcccacgcatgcacccggccgtcgtattggcttgcgaacaatggcgatgcccggcagacatcgaatatcaaccgttgacctgtgcggctaccatatattgtcatgacgtcaccagccaccgcgaagcttgccgccgtatccagccgccagtcccacccgcatcttgcgcgcgtgggcgctgccgcgcgctggacactggccgtgctggcctgcctgtggcttgcactgtgctcggcggtcggcccgctgtaccgggacgaggagaacggcaccctcgcccattggaactgggccaatatcgcaatattcgtcgtgtcgttcctgatatatctcggaatcatcacgctgatggcgcgattcgcagcaggccagcgcatactgccgaagaccatcggcgagcgcctacgccaccatcagcagaatagcgaaacatcacggcccgccgccgatcagcaggccagccaaccagccaagacccgtcgtaccgttcgcgctatcgtcacgtccaccgtcactgttctggaccgctggatcacacgcggcacgaaccggttctggaagcttatgctggtgttttttgtcggctggctctgggtgccgaccactctgctggccgcattcggcgcggacctccgctcacagatccgcgaattcagctgggcttggaaccagtggaccggcctgaaacagccctatatcggcttcttctccttcgtgccgatggacatctaccccaccgcgcactacatgtggccgtccgatcccacgtatctgaccgaccagcacaatgtggtactcactgtgttctatggcgcgatagtcacgtttgcgaggcatctgaccggctcaaacgatgccggcatcgtgacgttggctgccctgcagacgctgttcgccgtgttctgctgcgctgccgccgccaatcgattcctgaaccgaccttggataggaaaaacggcaacggattccgccgttcccccacaggccggaggattggccagattcctgattctgctgttcttcatggtctgcccgctggccgtgttttccactatctccatcaccaaatcgccgctgttcgcgttctcgttcgtctggtggttcagcgtctggtatgaactcgtccagacctggcaccccgccggcacccgcaaacatcctcagacccctgccatcgccacgcccgtccacttgccgtgccacagcttcatcgccttcatcctggccacgtcggtgatgctgatttccgcgaaatatgcgtggtacatcatcgctctgcaaatcgtgctggctctgatcgccgaccgcaaacgctgggcgacttacgtcgtggcgctgctcatccccaccgtactgattcacggcggcatctccttcgccatctcctctggtgcgatcatcggcggcgatccaatcgaaagccgcggcgtacagctgcaaatgatcgcccgcgtggctcagcgcaatccggacggtatttcagacgaagccaaaaagaacctcgcgcccgtcttcaatctcgatcagatggccgacgcttactcccagcaggatgccgacccggtgaaatcctccggtattcaggccaagaaggtcagctacaagtggcgcacggtgacgcccgaggatatgaccaatttcaacaaggcatggttcgaaatcgtcaaggacaatccgatcatcgcgctggatgcgttgctggccaaatgcttcggatacttcaatgtgaacgatcagccgtacgtatcgatggattattacgtggccagcgattacgtgcagaaaaactccacatggatcaaggattacaaccatgactggcgtgagcacatcgccggcttcactcgcgtatggggcagtattcccgtgctcggctggcctacgcacggcaatttctacgtggtgatgacattgctgatcggcgcggccgaggtgattcgccgacgttggctcaccctcatgacccatattccgctgctactgctgatgggcgtgatgattaccgcgccggccaataatttcgagcggcacatgttgccggttgcgtttgtattcggattcgtggtgctgacgtattggcgagagtctttggctgaaaggcaacgccaatcagcgacgctacactagtgactatgtcagattttctcgaacttcttgctgccgacgttgtcgattcgtccggtgcatccggtatgccgggtgcgcccgattcatccgattcggccgcacccggcatcaccgcgaccaaccgcgtacgcaccgtgctgttcgagtgcctgttcaatcatctggccgacgaacgagtggagtccctgttcaccatcctcggtttcgagcatgacttcgattgttacaccatcgccggataccctgcccggtccgccgcacgtacggccaaggaaatcgagaaaatcgtggccgatttcggcggtgtgtgtctgaccgccaagcgcccgatcggcaacagcaccgccgtagtggcgttgattcgtccggtcggtgcggccacgccggaaatcatctgcaataccatcgccccgtcgttcgccgccgatcggccaatcgccttgggtccacagcgcaccggtgccgatggcgcgatgcgttcgattcaggccacgctctactgtcttcaggccgcgccggccctggccgccaccgtgcagccattgccgcgcccgttacgcaccgacgacgccctgcccgaacgtgcgttgatcggcgacgcggacgcccgtgacgaactggtccgcgtggtctacggaagcctgacagcagcaggcccggatgatccgacgctgctcaccgtctccacattcctgaagttcggcggttcgctcgagaccacggccaaggagctcaacgtacatcccaatacgatccgctaccgtttgaagcgcgccgccgaatccaccggctgggatgccaccgacccgcgcgaggcgtacgtgctgatcaccgccatcgcgttgggtcgtgtggccgaagcgtaacggaccgcagcgtagtcgggcagaagcataaccagcagaaccgtagccggcaaaggccatagctgaccggacataaccgtccagcccgacagcctagcgggccgaatcaggctgcctgaatttcgcgtacgccatcgcgcagtaacgcggccaaggattcttgagtggctaacacttcgtccacgaatccaccggcggacaggctggcgatcacgcgaccggactcgttgtccacaatcggtacaccgacggcaccgacacccaacgtcacatcctcatccgacagtgcatatccacgttcgcgagtcaagcgaatatcctcgcgcaactgttccacactgaccagcgtgttctcgttatatgccggaaacggcactcctgcaagatagcgttcgacatcggcatcctcgaaatacgccaaggccacgcggccggccgcgccagcatgcagaggcagcacgcggcccgggcgcaggatcagcgaatcgatggcatgaccttgcgcacattccacgcataccaattcagtgccggagaccacactgaggaatgaggtcatgccggtttgcgcggtgatggcatgcatgaccgcaatcgcaggctgccattcggtacgagacgtgcgagcggcatcagccaatcgcagccagtccagtgataatgagtagttaccatccgtatccgttacggcccaccccacatcgaccagtccatccagcacgcggtatacggaggatcgcgggatatcacaggcgtcggcgatatctgccggcgacaggccattctccgccgccaatgcgtccatcacacgactcgccttgtctaaagcgcgggtcggttcacgtttgtcttccgccatcgtcgacgttccttcccctgacttatccctgactcatcatattcaactgttcaggccaagatgatcaccactgtatccaaggcctcgcgacacctcacggccggcagtccgcaccaatcgcaccatgtcttgaaccgatgccgttgccggttgcccatctaccagacaggccagctcaggttccaaggagcgggaaaggccactcagggcgattgccgcttgaatctctccggcgtgattgaataccggtacgctgatagtcacggagccggccatggtctggccgacgtcataggtgaagccgcattcgcgtatatgacgagcctgtcccattgctgtggcacgcatcgtggagaatgtgccgccgagctcgttggtataggcatagtgttccaacagctgctcgtagcgagccgggggaagccaggccgtcagtacatgagagggagcgctcatgctcagaggcaagctattgcccaccagctgtgcatagctttgcaatgtctcacgggtgcgtgtctcgatgcacaccgtgcgcaatcgcctccgaacgaacagaccccagatgccgaactggccgtgatgggcgcggaaggtacggcgagcgatctgctgaatgtccagtctgctttcgatttggccgccgatacgtacgcaatcgatgccaagccgatactcgccacgattgatgccccgttccacccaaccgactgcgacgagattatccagcaaacgatacgttgagcttacgggttcaccagtacgttcgcttatggtttttgcggtgcttggtcccagttccgccaatacatcaagtactgccttggatttcaccaatgcatctacgctacggtcatcacggcttggcgccaccatgcgcgtcacctcctgacctgtttgttgatacctcagacatcttaccgggtattcagcgggttgccgcccaaaacgcactgggccccgacgggatactcctgccggggcccaaggacgcgagataccccccccacgcgcaagtgtcctgatatgcgggaagccccggtacctttgaggggtatcggggcttcctgtacgtgtggtgcggcggcgtgctactctcccacaccctgtcgggtgcagtaccatcgccgtgccaggccttagcttccgggttcggaatgggaccgggcgtctctcctgggccatggccgccgcaaatct

SEQ ID NO: 711 - DNA, 5436 bp, Unknown
  R14_15m  MAG No. k141_34960
gtccgccacggaccgcatcttgcggttcaggcggacgggccttatgggagggatgggaacgggagatcagttcttaataactgcctgcgcctcatcaccggcggcctcgacggcctccacgacctgcgcctcatcgtcgacgatctcgccggaagcgagcttggcttcgagctcgtcaacgatctgcgcgtgcatcttctcggtgatcttgaccttggagacgaacaccaccaggctgagcacgatcaggatgagcggggcatagaacgcgcagatcttgaagacgtggatattcgtcggggtcatatcggcggcggttgcgtcacccgtcatgccggccgcaagggcgatgaagccgacgatgccgttcgacagagcgccgccgatcttatcgagcatcgggcggatggaaagcgtaacggcctcgttgcgcttgccgttcttcagctggccgtactcgatggagtcggtcagggagaggatgaccgtcatcatgatgagcgtgccgggaacgtagaagagcaccagcgcgatgaagaccaggacgatgttgctggagaacagggcgagcatcacataagccacgatcatggagaccatgccgccgatgtacaggtagcggcgcggaatgtacctgttcagaatcgggtacagcggggacatgaccaggcccgcgatcatggcgatgacaccggtcgcggagaaagcggcctgattgtcaaggacgaacttgaacaggaagagaagcacaccggtggtggtcacgttcgcgatggcgtacagcaggtaggacagggcgacccacagcagctggtcgttctggaacacggccttgaacgcctgcaacggaccaccgttgtcttcggcgttggcgcgaagggcgctttggttttccctggtgccgaaggcgacggtccaggcggtcatgatgccgagcaccgcgacgatgatgccgaaagcggtccaacccgactggtgctcggcgttctcgccggtgaacacccagctgaaataggtgacgaccggaatcacgaggatggtgatggcgttgccgccgatggagccggtgaaggagccgagggcggtgtaggtggaacgttcgtgggagtcggaggacaatgccgggatcatgccccagtaggagatgtcacgcagggagtagaacacgtcaagcacgatgaacgtgatgacgaacacgacgatgaacaatgtggagttaacgttcaccaggccaaacatgccgctgaaaaccacggcaagcagcacggaggagaccagtccgccgaagaactgccacgggcggaaacggccccacttggtggtggtgttgtccacgaggttgcccagcagcggatcgacgaagatctcggcgatgcggatgatcaccacgaggctggtgatgacgccgatcagcttggccgcaagcgccttgtcaacgcccgagaacaggcagctggtgacatacacgatgaagtacgtgctcatcgcgttgtagaaggcggcctgaccgaggttgccgaacgcgtaggcgatgcgctggcctaacccactcttcctgcggacgtcaccgtccgcggcattttcgttgctcattaatcttctccttaagaacccagagcatggaatcactcattgattttgtaaagtaagcatacaagttttatcaccaaaagtaaaaagcattagtaaacaaggagataaacagcgtgtcgcaaggatgggataacatgggctgaaccgagacattgcatggacgcggcgtagcgtcgacggcaagcagtgccagtgatttggaagcggtaaacaggatttgcgttttatataaaaactgtttattcttttcggtaaaggaggccccgacctcctccataatatcattcacaacgaggtaatgacagaaagcaggagagcatgacagacgtcacacatgtcgatcgcgcatcgcaggcttggctgaccgacccgacggtgttcgaggtgaaccggactccggcccattccagccacaagtggtacacccgcgacccccagagcggacaatggtccgatctcaagcagagccttgacggcgagtggcgggtcgaggtcgttcaggccgccgacatcaacctcgaagaggaacccgcgacggccgagtcgttcgacgactcctcgttcgagcgtatccaggttccgggccacctgcagacggccggtctgatgaaccacaagtacgtgaacgtccagtatccgtgggacggccacgagaacccgttggaaccgaacatcccggagaacaatcacgtcgcgctctaccgcaggaagttcaccgtctccgcccccgtagcaaacgccaagcaggccggcggatcggtgtcgatcgtgttccacggcatggccacggcgatctacgtgtgggtcaacggcgcgttcgtcggctatggcgaggacggcttcacgcccaatgagttcgacatcaccgggctgctgcacgacggggagaacgtcgtggccgtcgcctgctacgaatactccagcgcctcctggcttgaggatcaggacttctggcgtctgcacggcctgttccgctccgtcgaactcgccgcccgcccgcatgtgcacatcgagaacacgcagatcgaagccgattgggatcccgaggccggcaccgcttccctcgatgccgcgctgaccgtgctcaacgcggccgacgcggccacggtccgcgcgaccctgaaggacgccgacggcaacacggtgtggcagacgacgggcgacgcggaggcgcagaccgcgatctccagcgggccgctgcagggcatcgaaccctggagcgccgaaagcccgacgctgtacgaacttgacgtcgacgtcatcgaccagacgggagacgtcatcgaatgcacgtcccagaaggtcggtttccgccgcttccgcatcgaggacggcatcctgaccatcaacggcaagcgcatcgtgttcaagggcgccgaccgccacgagttcgacgccgaacgcggccgcgccatcaccgagcaggacatgatcgatgacgtggtcttctgcaagcgccacaacatcaactccatccgcacctcgcactacccgaaccaggaacgctggtacgaactgtgcgacgagtacggcatctacctgatcgacgaagccaacctcgaagcccacggcagctggtccctgcccggagacgtcctcaccgaggacaccatcgtgccgggcagcaagcgcgaatgggaaggcgcctgcgtcgaccgcgtcaacagcatgatgcgtcgcgactacaaccacccgagcgtgctgatctggtcactgggcaacgaatcctacgtgggtgacgtgttccgcgccatgtacaagcacgtgcacgacatcgacccgaaccgtccggtgcactacgagggcgtgacccacaaccgtgactacgatgacgtcaccgacatcgagacccgtatgtactcgcatgccgacgagatcgagaagtacctgaaggacgacccgaagaagccgtacctctcctgcgaatacatgcacgccatgggcaactccgtgggcaacatggacgaatacacggcgctcgaacgctacccgaagtatcagggcggcttcatctgggacttcatcgaccaggccatctacgccacccagcccgacggcaccaggagcctgcgctacggcggagacttcggcgaccgtccgtccgactacgagttctccggcgacggcctgctgttcgccgaccgcaagccgtcccccaaggcccaggaagtcaagcagctgtactcgaacgtccacatcgacgtgacgaaggattcggtgtccgtcaagaacgacaacctgttcaccgccaccggcgactacgtgttcgtcctgagcgttctcgccgacggcaagccggtctggcagtccacccgacgtttcgacgtgcccgccggtgagacccgcacgttcgatgtcgcatggccggtggcggcgtaccgcgccgacgcccgcgaactggtgctgcaggtttcgcagcgtctcgccaaggcgaccgattgggccgagagcggctacgagctcgccttcggacagaccgtggtgcccgcggacgccaccgcgacgcccgacacgaagccggccgatgggaccatcaccgtgggccgttggaacgccggcgtgcgaggcgccggacgcgaggtcctgctgtcgcgcacccagggcggcatggtctcctacaccttcgccggcaacgagttcgtgctgcgccgtcccgcaatcaccaccttccgtccgctgaccgacaacgatcgcggtgccggtcacggtttcgagcgcgtccagtggctgggcgccggccgctacgcccgctgcgtggacaacgtgctcgagcagatcgacgacagcacgctcaagggcacgtacacgtatgagctcgccaccgcgcagcgcaccaaggtgaccgtctcctacacggcccacaccgatggccgcgtgaacctgcacgtcgaataccccggagagcagggtgacctgcccaccatcccggcgttcggcatcgaatggacgctgcctgtgcagtacacgaacctgaggttcttcggcaccggcccggaggagacgtacctggaccgcaaacacgccaagctcggcgtgtggagcaccaacgctttcgcggatcatgcgccgtacctcatgccgcaggagacgggcaaccatgaggatgtgcgttgggccgagattaccgacgatcacggccacggcatgcgcgtcagccgcgccgatggtgccgcgccgttcgcggtaagcctgttgccgtactccagcttcatgcttgaggaggctcagcaccaggacgagctgccgaagccgaagcacatgttcctgcgcgtccttgccgcacagatgggcgttggcggcgatgattcctggatgtcgccggtgcacccccagtaccatatcccggcggacaagccgatcagcctcgatgtcgacctcgagctgatctgatcagaattgatccgatagtccaccgtgcaaacgatgtggcccccgacttcctcgcaggaagtcgggggccacatcgtttgcacggtccttgttagtccagcggatgcgccggatatcgatgcaaatccaaacctagtcgttgtagagcatcaatgaataaagatgtcactcataagctatcaagagaatccagaacttttttgaattcatatgctcgacacgcaatgtatccagcgtcgtttataatgattcctcgtgccttaatggcgcatcgggctatagcgcagtttggtagcgcgcctgctttgggagcaggatgtcgccggttcaaatccggctagcccgaccagaaaccccggaatctcaacgattccggggtttttccttttatccggttcaaaccgatttatccgattttatccgatgaccgcagaacctacgccgcctcgtcca

SEQ ID NO: 712 - DNA, 5764 bp, Unknown
  R14_15m  MAG No. k141_35783
aggatacgcgggtcggcgagcagcacgcgcgcgaaggcgatgagctggcgctggccggccgacagggtcgatccgcgctcctccaccaccgtgtcgtacccgtcgggcagttccatgatgaactcgtgcgcgtgcacggccttcgccgccgcctcgatttcctcgtcggtggcgtcgagcttgccgtagcggatgttctcgcgcacgttgccggagaagatgaaggtgtcctgtagcatcacgcccatctgccggcgcagcgatgcgagcgtcacgtcgcgcacgtcgtggccgtcgatcgtcaccgagccctcggacacgtcgtagaagcgcgacagcaggttgatgatcgtcgtcttgccggcgcccgtcgggccgaccagcgcgatcgtgcgccccggttcgacgtggaagtccacgaggttgaggatgttacggccgtccttctcgtagcggaacaccacgtcgttgaagtcgacgcgcccgcggatctgcggcaggtccgccgcgtcgggcttgttgcggatctccggcgtgacgtcgagcgtctcgaagatgcgctcgaggtacgccgagcaggtgatgagctggttgtagaagttgccgatgttgatcaccggattccagaagttgttcgcgtagccgacaaacgcgatgagcacgccggtggtcacgttcacgcccccgaagcccatcacgccgacgaagtagatgaacgagatggtcatcacggagatggtctgcacgcccggccacatgaggaactggatgtgcacggcgtgcatccacgcggaacgcacctcgccctgctgctcctggaaggtcctgaactgggcctgctcctgcgcgaaggtctgcgtggtcttcacgccggcgatcgactcgtggatgtaggcgttcaggttgctctgcttgttggagagcttctggaaggcgcgccgctggaagatctgcagcacgcgcacccagatgatgagcaccgggaacaggatcaagctccacagggccagctgccagtcgatcacgaacatcacgatcagcgtgatcacgaaggtgaacacgtcggagatcacgttgatcagaccggagctcagcgtgtccgaaagcgtgttcacatagttgaccacgcggatcaggatcttgccgtgcgggcgcgaatcgaagtagctgaagggcagcgtctggatatgcgtgaagatatcgcggcgcatgtccttgagcatgagctggccgacgcgcgtgatcgccaccgtgcggtagcgcagcccgaactcgtacagcacgatcagcgcggcgaggattacggcgaggatgccgagcttgccgaggtccttgttcgggatcgcctcgtcgatcatgatcttggtcaggtacggcacggcgacgacgatgcagctcatcgagatgacgacgacgagaatgcgcgccacctgtgccatatacggtttgagatatttgccgacgcgagcgatgtcgtggaggttgatggactcctccagctcctcatcctcgcggaatgtattgcgttgtgccataagtcctcttctaaaatccctgtgcggcgccggactggagtccgagctgcttgtggtagatgtcccagtagcggccgtgtgcggccacgagttcggcgtgggtgccgcgttcgacgatacgtccgtgctcgagcaccagaatcaggtcggaatccttgaccgacgagatgcggtgggcgatggcgacgatggtcttgccgccgtccatctccttgaggtgcttctggatctccgcctcggtctccatatcgacggccgaggtcgtatcgtccataatcaggatcgacggattgtccgcgagcgcgcgggccagcgacaggcgctgcttctgcccgccggacaggcccacgccgcgttcgcccacgacggtgtcataaccctgcggcatcgacctgatgaaattgtccgcgccggcgatctgggccattttctggatatatcggtcgtcgctatcatcgctggcaccaaaaccgatgttgccgccgatggtgtcggagaacaggaacgtatcctgcgccacgatgcacacctgcgagcgcaaggtggtcagcggccagtcgcgtgcgtcgatgccgtcgatgagcacatggcccacggtcgggtcgtagaagcgggagataaggctgacgagcgtggacttgcccgcgccggtttcgccgaggatgccgagcttggagccggcgggcacggtgaagtcgaggtccttgaggatcggggtctccgggtcgtccgggaaggcgaagctgacgtggtcgaagcggatgtcgcccttgatgtgcagcgggcaggacttgcgttcggcggactgctgggcaccggatgttccggaagccccgggcgctccggtagcctcatcatcgtgcttgacttgctcgacgatcgtgaccgcctgcttgacggcttcggccgcgtcgggcttctccacgatgcgcggctgttcggtgagcagcttacgaatcttgatgcagctggcgttgaatcgctgccagtcgttgatgagccagccggactggcgcaccgggccgtcgatcatccacaggaaggagttgaaactcaccagattgccgagggtcatgtagcccttgatgaccagaaagccgccgaggccgagcgtgatgagctgcagcgagaagccgaggccgtccagccaaggcatgtacttgcgcgagttgtaggccagggccatgttgcgctgcatgtaatcgtcgttgtgctcgtcgaacttttcggtctcgtacggttcgcgcacgaatgccttgaccacacggttgccctcgatgttctcttcgaccatggagttgagggaggccagcgagttgcggatggagaagaacagcgggtgagcgtgcgtggacaggccgcgcgtgagcacaaaaatgaacggcgtgacgcaggccaggacgagcgcgagtcgccaatcgatggcgaacatcacgcacagggcgcccacgaacatgaccacgcagtcggcgatctgatagctcacccaactcaggcagtggcggatcgcgtcggtgtcggaggtcaggcggctcatgatgtcgccggtgcgtgtgtggttgaagtacgtgaagtcgagctcgtgcagcttctcgtattcgtcggagacgaggcggtagaccgagttctggccgaaacgctccatccacatctggtagccgtatcgcgcgcccacgcggatgatggtcatgaggatcatcagtccgcacagacgtggcagttcgtcggtatgcccgccgacgatgacacggtccacaatgacgccggacagaatcggaatggtcagggccatcgtgttattggcgatgaacagtaggagcgcgcctgccacgcggggcaggtctggtttgcagtatggcagcacccatttaaggttgcttgcgctggtattgattcccggatcgacgtacatgtgaggagatcaccgtttcttggggattgtttgcttatggtatggtgcggtatgctcctgcgccgcacgcggcaatcgctgccgccacgattcacgatcagccgtgcttcgcactgcgcctgtcattggccgcacgaccggagctctccttcatcggtcgaagcacgttcgactttcgcaaacgcgtactagtctagacggcctgcgtccaatcgcaacagcccacaactctgcgtgttccccgccttagcaacgcggcacgacccgctaagcgcaacattccccggaatgtgtcgcgcgaaacgttgcgcatgcggcaatgcacgctcgagacctgttgcataccagtcgaccaaattatagaatcataattaagtaaattacgattctataatttgcgcgtgtgcgccagggcagacagcaaagcaaggagacaagggccatgttcgtcgggcgagataaggagctttcggcactggaacgccgctggagctcacagcagttcgagtgcgtcgtggtctacggccgtcgccgcgtgggcaagaccacactcatcaaccgcttcctcgaagatcgccccacgattttcttttcggcaatcgaatccagcgcttccaagaatctcgaatcgttaagccgcagcattgctctgtatgaaaagggctcagaggcgttcgagacagcgcccgtataccgcagctttgaatccgcactggaagcggtgttcgcgctggccgcaaagcaacgcatcgccttcgtcatcgacgagtacccatatctggctaaagcagaccggaccatcaattcggtcctgcagcatgccatcgaccgccataaggatgacagtcagctcatgatggtgttatgcggctcttccatgtcgttcatggagcgccaggtgcttgggtatgagagccccctgtacggcagacgcaccgctcaaatcaaagtggagccattcggctacgccgatgtccgcaagttcttgccaagatacagcaacgaggacgccgccattgcttacggacttaccgacggtatcccgcagtatcttcggcaactggacgacggcatcagcatccgagacaacatccgttggaacatcctcgacccaagctgctatctgtttgaggagccagacaacttgctgaagcaggagctgcgcagtccggccgagtacaacgccgtaatccaggccattgcctccggggcatctcggtcgaacaccatcgccaccgcatgccatatggaatcgtcctcatgcgccacctatttgcgcaatctcatcgatctgggaatcgttcgcaaggagacacctttcggcgaggacgctcctcgcaagacgatctaccgtatcgaggactcgttcttccgattctggtaccgatatgtgccgaacaacatgtccctcattcaatccggtcatgccgatctcgccgccgaccgtgttatgcgcactatctccgactttatggggcaggtgttcgaagacatctgcgttcagtggatatggtcccataacggtaccgaggcattgcctttcctcatgcttgatgccggacgttggtggggcgccaatccgaccacccgcagtcaggaggaaattgacatcgtggcttcaggagaaaaaccgaaaactctcctattctgcgaatgcaaatggcgcagcgtgccatccggtctgcagcagttggaagtgctgcgcaatcgcgccagactgctgcaccccgaaaccagccattacatgctgttctccaaatcaggcttcgacgagcatgtcgccgcccgcgcggcgcaagacggtacagtgacgcttgtcgattttgcggatatggattagtcggttcactccattgcggacggcaagggtgaagtaacaggctgggtcaatggaccgaaccgctaggccgggcaacagacccaatccgtgacacattcccgggaaagtggtgcgcgttacatcacgctcaaacaacccagcatgtatatgggcaggtattcggttcggccaacagtctccacgttgccatcatggaacacgtaggcatgggcaaaccgataattgtcggtatccagtaggttgttcatggcccgatgccgcgtatagtccttgcccgatttgatttcaaccagtgaaatatcatccagaccttgctgcactacaaaatcaacttcaccaatacggttctggttgaagtaatgcagttccaatccctgtgcaaacagttcctgagccgctgcattctcgaaaatcgacccgtaattcatactggatcggtgattcacaatctctaagtccacactgcgcatcaaacgg

SEQ ID NO: 713 - DNA, 2772 bp, Unknown
  R14_15m  MAG No. k141_36458
cagcgcggccaccactacgccatcgtcgatgaggtcgactccatcctcatcgatgaggcccgtaccccgttgattatctccggtccggccgaaggcgacgtgacccgctggtaccgtcagttcgccaagctcgtcctgaagctcacccgcgacgaggactacgacgtcgacgagaagaagaaggtcgtcggtatcctggatccgggcatcaccaaggtcgaggacttcctcggcatcgacaacctgtacgagccggccaacaccgccctgatcggctacctcaacaatgccatcaaggccaaggagctgttcctcaaggacaaggactacgtcgtcactcagggcgaggtgctcatcgtcgacgagcacaccggccgtatcctgccgggccgccgctacaacgagggcctgcaccaggccatcgaggccaaggaaggtgtggaggtcaaggccgagaaccagaccttcgccaccatcaccctgcagaactacttccgtatgtacgacaagctcgcgggcatgaccggtacagccgaaaccgaggccgccgagttcatgaacacctacaagctgggcgtgctgccgatcaagaccaacaagccgatgatccgcaaggaccaggacgacctcatctaccgcaccaagaaggagaagctggccgccatcgtcaaggatgtggccaagcgtcacgccaagggacagccggtgctgctcggtaccgcctccgtggaaagctccgaagtggtctccgccctgctcgacgtggcgaagatcccacaccaggtcctgaacgccaagcagcacgagaaggaagccgccgtggtcgccgtcgccggccgcaagggcgccgtcaccgtggccaccaacatggccggccgtggtaccgacatcatgctcggcggcaacgtcgagttccttgccgacgccaagctcaagtccgaaggttactctccggaagacaccccggaagagtacgagaagcgttggccgggcaccctgaacgagatcaaggcccaggtcaaggacgagcatgaggaggtcaaggagctgggcggcctgtatgtgctcggcaccgaacgccacgagtcccgtcgaatcgacaaccagttgcgcggtcgttccggccgtcagggcgatccgggcgagtcccgcttctatctgtcgctggaagatgacctgatgcgtctgttcaacacccagctggtggcccaggtcatggccaagggcatggaggaaggccagccgatagaggccaagtccgtcaccaagggcgtgcgcaccgcgcagaaggccgtcgaatcccgtaactatgagattcgcaagaacgtgttgaagtacgatgacgtgatgaacaagcagcgcaccgtcatctactccgagcgtcaggccgtgctcaagggcgaagacatccacaaggacatcctgcgtttcatttccgacaccgtcgagtcctacatcaagggtgccaacaagggatccgagaaaccgaaggactgggattgggagggcctgttcaaggcgctcaacaccgtgatccccaccaaggtcgacgaagacgaggtcaggaagatcgtcggcggcctcaagggtgcgaaggccgtcgaggccgtgcgcgacctgatcgtcgaggacgccaggcagcagtacggcgaaatggaggagaccatcggcgagaccggcttgcgcgatctcgaacgccgcgtggtgctcgccgtgctcgaccgcaagtggcgcgagcacctttacgagatggattacctcaaggacggcatcggcctgcgtggcatgggccagcgcgacccgctggtcgaataccagcgcgaaggctaccagatgtacaactccatgatcgaggccattaaggaggagaccgtccagctgctgttccacatcgacatcaagcaggtcgccaccaccgacgaggccgttgacgaggtcgaggagaccgccgaaagcgccgacaccatcgccgtggcctccggccccgacgagaacggcgaatccgtggtcgaggccgccgagggcgaagtcgaggaagaggacgaggatacggacgccaagcaggcgatcgccgaatccgcagccgcctccggggccggcgagtccacgctgcctgttgccggaccggctccgatcagccacgccgaaggcaaggtcccggtttccaagcgtccgaagagcgaagagctcaagacgccgtgggccgacggccgcaccttccctggcaccggcaagaacgccccgtgcccgtgcggttccggccgcaagtacaagatgtgccacggccagaacgagaagtgacgcatcgctagttagtaactagctcatggctccccacacggggagccattttctatgcggttcatcagcatgtattcgtgcggtgccgtacgcgcgggacggcacgcgattttcgcggattttgacgtcgtatcccacactgttgcgggatggcacgagtgtcaatcgattgactagcgtggcgtcccgcagtacgaattacggaatcgttgaaattccgccattctcggtgttatggtgtcacggtccgcaaagggtgatgtgggacggcacggctcaaacggcgaaaaagagctgccgtcccgcagttttacgggatagcacaaaaaagaggcttctgctgttttcgtgggttgggttcttggttgtggtgggcgtatgtcgagtccgccgcggcggagcatgacgagggcgatgggattgttcgcgtggtggaagccgtaggccatgcggatggtgaccttgatcctg

SEQ ID NO: 714 - DNA, 10511 bp, Unknown
  R14_15m  MAG No. k141_36494
cattatgagtccgacacggtcgtcggcgcctccccgtcgaggcggtgcatcgacacgcaggtcgaacgcaggagccgcaggctgttcgccaggttcgtccccgacaagagcgcgctggccacggcgcgcgccgaatacgactggcccggcgtcgccatcgcagcctagatgccgaggtcgtccttgtgcttgttcatgtcctcgacgaccttcttcaaggtgtcgtagtccttgatgtcggcgtcggactggatgactgcgtagtccttcttggcgtattcgttgacgatcttcttgttgtagatgataccgtaccactcgaccgcatacggcatggtgtaggcgtcgtcgccgaccttatgcgagttggtcttgccttcgtcgttgagcagcttgtacacgtcagtgtcctgcaacggttcgagatacctctggtacttggcgaactcgtcgtagccagcgatgatgaacatggtcggagcttcggacttggccagttcggaggtcagcgtggactcatagctgccggaggacgcgatctggatgtcgacctgcacgccggtctgattggtgtagtcctgcgcaagctgctgcagctgatcgaccacctcaggcttgccgttcaagaaataaacatgacccttattcggatcagccgcagtgcttccgcaggcggcgaggctgaacatggtgacggccgcaacgcccgcggcgaggattctcttcatgttcatggtgctcatcggcgttatgctccttccgcatataccgaacatctgtgtccggcgatctgttcttctcaaagggggccgctgaactatgctcagcgactcgttaccgtaagcgttgatgacaacgacatcacgcgatgcaattatgtacataatcggcgtgttgtcgggggattacttgatatttcaagcgttttctcacaccctctgattgcagctctggtgaatacgttgccaaggtactgtgcatgaatcggcaaacaggcgattccccgtgggccacgcccgttacaatgacgtgtatccatccgcccgcccctcaaggagatgaatcatgggctttatgtctccggattccgcattcatgcgcggactgagcaataccgtagatgccatctggatcaacctgctcatgatcatcaccagcattccactgatcaccatcggcgcggcgctcacggctggacacgatgccgcgcggcgcgtggcaatcgcggaaggtcacgtcaccgcgaactatttcaaggcattccgcgcgaatttcctcaaggctacgggactatggattattttcggcgccacgggagctggtctcgtgtattcatgggtggtgttgcagatcacgccgctgctcatccccaaaatcggtctgaccttggtgtggatcatcggattcgaatgggtgtgggcgttgcaggcgcgcttcgagaactcctttggcggagtactggcgaacgcgttcatcttcggcgtctcgcgcattggtgccacattggtattggtcacgatcgacgctatcttcctcggcctgctcgtcgcctcatgggtctacatgccgcagggcctgttcctgctgatagtcctgggctacggatcggtgctcatgctgcatgtgccaattctcgagcgcgtattcgccgcatgcgtcgccctgtccggcacgtccgacgcatccgccccgtccgacacgtccagcaccacgtccccgcaaaggcaatagcacatgggcaaagtcacactgcaggacgtcgccaaggcagctggagtctccaccgccaccgcatcatgggcgatcaacgacaacaagaacgtacgtattcccgaaaacacgcgccgcaaagtccgcaacgtcgccgaacgtctcggataccattccaacgcgtttgcccgaagtcttgcgcgcggcaaatccgatctaatcggtttcatcagcgacggtgtcgccacatctccattcgccggacgagtcattcaaggcgcgcaggacgaagcatggcgcaacggcaaaatcctgttggtggtcgacaccgacggcaatgcgaccattgagcgaaaggccttttcgttcatgcttgagcatcaggttgagggaatcatctattcaagctgggtgcatcgctccattacgccacctgacgagctggaacgcactatgtccgtattggtgaactgctttgacgaatcgggtcgattccccgctgtggtccccaatgaagtgcagggcggacagtccgctaccgagttgttgctgcaggcggggcatcgtcatgttgcattcgtgaacgagccaaccgcatcgcctgcgtcggtcggccgcctcgaagggtatcgtcaggcacttgccgcacacggattggcatacgaccccgcaatggtcgttgacgcaacagccgaccaggaaggcggttacggagcggccgacgcagtgctgaagaccggtgccacggcagtgttctgtcataacgaccgcactgccatgggtttgtacgacgcgcttcgcgagcgaggcttgcgtgtgcccgacgatttgtcgattgtcggattcgataaccaggaggtcatttccgcacacctgcatcctgcactcacgacggtcggactgccgcaatatgaccttggtgtattaggcgtacgctcgttgctgacgctgaataagacgcccgacgccgactacgacagcagcgaaaccgatcgcatcgaagatagcaaaacgcaccgcttcgagccattgctggtgggctgtccttcagtgatgcgcgattctatccgcgcctatcgcgggtagtcggcagcgcgagacacgcgccattcctagaggtgtgcgtcatggcttgacaggtatagtttgaatgtttatcatattgcttaatcgcttaaatgcttaagcgattaaatcaaatcaggacaatacaataaagcatgtttctaatgcgcggagctgcgcagtagaaacagccaggataccgttcgccgcgaaactgcacacaagtccggtagcccgaccacagagcaattggcgagcggtcgtcaaccgaccatataggagtgataatcatgccaaagctgtactaccaattccctggcacgtggttcggcgattgcatgccgttcggcaagggcaacgagttctttctgtatcaccagcgagacaatcgcaatccggaaccattcggcgaaccgttcggctgggatctggccacaacctctgatttcgtgcattacaaggattgcggtgtagccgtgccgcgcggcagggacgacgagcaggatcagttcatattcgcgggatcggtgtttgaaggggaagggcaataccatatcttctacaccgggtacaaccgcgattacccccagcgggacaagccggcgcaggtgctgatgcacgcagtcagcgatgatttgtaccactggacgaaaacccagaacgccatcaccttcactccgcaagaaggctacgatccagacgattggcgcgacccgtgggtcattcgcgacgacgaacatgaccagtatctgctaatccttggagcccgtaagatcggcccgaaaacgcagcagaccggccgcacggtgaagttcacgtctaaagacctcaagaactggacgttcgaaggtgacttctgggctccgaacctatacacgatgcatgagatgcctgatctgttcaagatgggcgagtggtggtatcacatcgttacggaatacagcgatcggcacaagatggtgtatcgcatggccaagagtctagaaggcccgtggatcgcacccgatgatgacgcgtttgacggcagcgcctattatgccggacggaccttcgaactaggtggacggcgaatcctcttcggctgggttgccaccaaggaagactgcgatgacgtaaagaacttcgaatgggctggcaccttcgtccctcacgaggtctaccagcgtaccgacggcacacttggcgtgcgcattcccgacacggtctgggatgcgttcaacgaacgcgagcaaatcgtgacgaatgcggtaatcgacggtactgacgctcgccgtaacgccgtgctggccgagggctgcggagacctgtattcgtttgaagcggacgtcatgttcagcgagggaacgcgatccttcggtctccgcgtctaccgcgatgaggcaagcgagcgtggctatcagttcatcttcccgattggtgagcatcgctacgtattcgaaggcagcccgaacttcccgtggttcaactgtatgaatatcgggctagagcggccaatcgaactggttgccgggcgtgaatatcacattcagctcatcgtggacgacaccatcgccactctgtacgtcaatggcgtcgcactcaacgcgcgtatgtaccagcacccaggcgacgcattaagcatgttcgtcaccgacggcacgctcaccgtcacgaatgcgaccatcagtcgtggactcaaggaggtgtgagccacagtcaccaccgtatgtttgcgaaccgatacgttcgcctgtgattcatccgtacaccatatgaacgccgccgggcgcaaccggcggcgggcctccaacctacgcgcggccagcgggcacgacttgtgcaatgacgatgtccgctcccccgccctgtattgcaacaacaacgaagttatggcattccataggagggaaaccatgaagaagattatcaaagcaacggccgcaatggcagcggcaggtctgtctctggggttgatcgccgggtgcggttccggcgactccaatgcagataagggtcatgtctacttcctgagcatgaaagtagagcaggctgatcagattcgtgagcttgcagataatttcaccgcagagaccggcatcgaagtagatgtcgccacagcatcgtctgacacatacgaacagacgctgaagagcgagctcgccaaatccgaagcgccaaccgtgttcgatgtggacaacaacgacttcctcaattggaccgattactacgcagacatgtccgatacgaacatgtacaaggacctcaccaagcaggactacgccatgaagaatggcgatgaaattggcgctgtgccttacgtgatggagcggtacggcatcatctacaacaaggccttgctgcagaagtattttgatgccaactggtcaagcgtgaaggacgttgagacgatcaacaacttcgatacgctgaggaccgtggctgacgagattcaggcgcataaagatgacctcggtatcaagggcgcgtttacgtcagcgggcttcgatacgagttcgatcaagcggttcggcgatcagctcgcccacgtgccggtgtattacgagtatcgcgatcaaggtgtgacgcaacttccggccacaatctccgacacatacattccgaatttcaagaagatcttcgacctgtatatcactgattcgaccacgccggccagccagctttcgagcgccaccatggatgacgccaattcggaattcgcgcttggcgaggccgtgttcctgcagaacggcacgtggggttactcgcagatcaaggatcagaacgtacctgacgaggacatgggcgtgctgccgatttatattggcactgaaggcgaggagaaggccggcctgacagtcagcttcctgtacgttgcgatgaacaaggacgcttccgaaaaggatcagcaggcgacccgtcagttcttggactacatcctgcaaaacgatgatgcgcgcaagttggtcaccgacgagatgggattcgagacaccgttcaagtcatatgcagaaaacggatacaagaccacgaatccaattcatcgcgccaacgacgcctacgcagtcaagggcaattacgatatcgtgatctatcctttgccgagcacacaatgggtgatgagtctcggcaatgcgatgctcgagtacgcacagggcaccggcgactgggatacggtcgcgtctgccttcgtggatggttgggcgtcggaatacaagaccacgcactgattcgaagcgaccggcattgaagtggtaatcgggatttagcgtcctgattaccactcgggaatacgccgcttagcatgctggtgtgctcgtgagcacgttgcttacgagcacaccagcatattccgtattggggtatgggttaccgccgctgcgcaccgtgacttgcaagtcctctcagtgacggaaattctagaggaaaatggctacgtcgagaatttacgtcactgagagcccgccagcgcacgaaattctcgcgcaatgggattattccgagaatttgcgtcgctaagaacccagagcatccgattattgcggttctttgcgctcagcagccaccagcgcaataggcagctagcgttctgcgtcagcagttcgttgacaaattcgctacccctcagccccgcttcgcgggccagctctcctgacaaggagagccggaaacgatatcaacgaactactggcgcaggacgcgccggtatccgaacagaacgtcagagcccgcgcagcagcggctcggcgatggcctggatcacggattcgggcatgtgggaatcgtcgaactcgtggccgggatagctgctcttggtgctttccagcgtatgcagcgcattgagcgcacgagcgccgtcagccttgatgagccggtaggcacgttccttggccagatagtcgatctgtgcgttgtacagcacagtgaacgcatcctcaatcgccggatcgtcggcgtaccgcagtccgttcgtcgcgtgaatcgacacggcctgcgtgaccggcgcatccgcaaccgtgacggacaggctcagcgcctcggtgtcgtacgacacatccggcacgacctcagcgccaccaaccgtcacaatcaactcgtcaacggcgaccggtgccacaccggtgaacgtcaccgtccacgtgcgctgctgcggcaccgccgccacattgccggccaccggggcaatctcgaacgcgttcaccgcaccatcggcctcccagcggaagtccatatgcgtcaccgcgagcgcggaatccgacggctgcgcctggttggtgccatcgtcctccttgaggtcgaacgcgccgttcgcgcccgggaacacggcaacctccagatagcgcggattatccacggagttgaggctgccgttgagctcctcatccagcggctgcaacggcacgatgccgccggccttcgcgaagaccggaatgccatcgagcccacgccacgcctcgaacttgcggccttcggcagagcccgcctcgtaccgccgtccggtgaagaagtcgaaccatgtaccctgcggcagccacacgtcggttttcgccagctgcgcgttgcggtcggacggcgtcacgatcggcgcgacgatcagctcggtgccgaagcggaactcatgctccaccccgtacgcggtgacattttccggcgactgccagtacatcggctcgaccagcggacggccctcggcggcggcacgccagttcatcgtatacagatacggcagcagttcgtggcgcagacgcagcgcgtcatccatcgagcattccgtctcgggacggaagttccacggttccttgccgttaaacggcgaatcggtcgaatgcagacggttgatcgggctgaacgcgccaagctgataccagcgggcctccagctcctcgtcgcggtagccgaacatgtggccgccgatatcatgactccaccagccgtagccgatgttcgacgcagtagccgtgaagtacggctggaacttcagcgacttccacgtcacgactgtgtcgccggagaacccgaccggataacggtgcgagcccgggccggcatatcgcgagaacgtgagcggccagcgcccgtcacgggcggagtcgagataatgcatgtggttcagcatccacagcgggtcaagacccttctggcgggtcacgccgccctgctgccagtccagccaccagaaatcggtgcccagggcttcgagcccatggtgcaggtcgaagtacgcttccatgaatcgcggactggtcagatcgaactcgaccggctcgccgcccgccgggtcaatgcccatgtgttcggcgactttggcatagccgtcttcaaatgctcgaacgccgtcgcgcgggtggacgttgagcgtcgtgcgcagtccatgctcgtgcagaatgcgctggaatcgctcggggtcggggaagaattcacggttccacgtgtagccggtccatccggatccatacttcgggtcgacattgtcgaccagatgccagtccatgtcgatgacggccgtggtgaacggcaggccttcctgctcgaagcgatcgacaagctccagatactcggcttccgtgtactggtggtagcggctccaccagttgccgagcgcgaagcgcggcagtagcggcgtcgggccggtgagcttgtagaagtcctgcacggcttcgatgtaccgatggccgtatccgaagacatacagatccttgccggggtgctcgcgcggaatgacccacatgccgaatgggttggcctcgcccttgacggtggcggcttcggcgccttcgacgatcacgtttgatgcggaatcgtcgagcacggcccagccgtcgcgggagatcacgccgagccccagttcgatctcaccgtcgaccgcgtccagcgtacgcgcggtgccgcgcaggttgccgtcctgggcttcgccgtagtgccacgtattcatctgggaattcgccacgcctttgacgacgatgctcagaccttccttactgaacggctgcatgtcgtaggtgaggcgcagcgccggcgtatcgatgatgagcagcccgtcgcgctcggtcttcgtgaacttcggcgggtttgaagtgccgtccgcacggttcgcgccatccgcaccgttcgcgtcatccgacaaccaatcgcgattgacgatcatttgggtggcgtggtcttcgaacttgccgttgtcctgccattcgaggcggacgagcgattcggtgatgatgccgatgcgccaacggtcgccttggatgaccgcggccgggttcatgcccggatgggtggccagctgtggaaaggtggacattggtgtgctcctttgctcgtgttattttccacgttgttgttagtgtatccatgaaccatcgccgccgtgcgggcctcagacatcgcgatacgctccgtcatggtccttttcatgcggatatactgttaccgacggcgacacgcatcgggggcattcatgcggcgatggccgtggtgtcgcgcagcatcagctgcggggccacggtttcaaatcgcggttcggacaggggtccttccatcgcggcaagcgctttgcgcgcggcaatggcgcctaggtcattcgggcgttgccgcaatgtggtcaggcccattttggcgctgaaggggatatcgtcgaagccaattactgacaggtcacgcggcacgcgcagcccatattgcggcaaccggtacagcaccggaatcgccatttcgtcggtctggaagcagactgcggtgggcgtgggcgacatggtggtcagctgggcgagcgccgcgccggtcgtatcctcatggccggagcagcgaatctgctcaagcgtgacgtcaggatgggccgcagcggcatcgataaggccttgcagtcggttttccgcactgaagcgcagttgactggtgtcatccggcgcgccgtacacgtaggcgatgttgcgatggccgagcgaaatcaggtgttcgaaagccgtatgcatgcccagcttgtcgtcaatgcacaccgcgccgtcaagtccgatggtggacggggtgttgatgccgatgagcggcacgttcacgtctttcagacgactgacctcatccgggtcgatgtcgaacgagcagacgatgaccgcgtccacattgcgacgaaccggcagttcagtgaagaaatcatgccgttcccgcgcgttcgacaggccgtatacggagatgtcgtatccggccgggccgaatacggaattgagcccgcggaagacattggcattgaaccagacggcaatggtatcggcatgcaggagtgcgatgcggaacgattgtccggatttcaacgcggccgccgaccgggagacctggaagtcgagtttgcgtgcggcggcgaggactcggtcacgtgtcttcggcagcacaagattcggcttggcgaaggttcgtgacaccgttgacacggatacgccagcctctttcgctaccgcttgaatgctcgcttttgccatggcaacctcgctcatcaacagtggataacaatcccgctcaaaagacaacgttatcatacctaagcgagcaacatgcacgccacgctgtctatttagaagtgcaacgcccctgttcgtcggctaattctagcagttcgtcggtgaatgccccgggccgaacccgggttctagatagaagcgcaacacccgctctatggttggaagtgttcaggttctaactggagaaggtgttgcgcccatgaggaaagtgtattcccacttgtcggcacaggaacgcatccggatcgacgaattgcg

SEQ ID NO: 715 - DNA, 19111 bp, Unknown
  R14_15m  MAG No. k141_36626
caccgcgttcgtcaatggtgtggccacgatcgaggccagcatgaccattgaggacttcgccgatctgaccggcatcgaattggaggacggcccgtacgagacggtcgccggctacttcctgtccaagaccggcaagatgggtgcggtgggcgacgtgctgcattccgacgacggctacaacatggtcgtcaccaaggtggatggccgccgcatcgaaaccatcgaagtccgcaaagccggcgccaccgatgcatcctcgcagccggatactgtgacgggttccgatgccgcctaggcttcttcccagtatcccgcgtcattaattcgttgattacggctctccaacaaaaggggccggccagcgaagtgttcccaacagaaatttcgttaacccttagaaacgtgcaattcacccaccgtgcgaaaccttagaaacgtgcaatcttgtactatacttaacccttagaaacgtgcaatcataagggaggagccatgtttcggcgcaaggcttacgacaagctagtcgaatggaagcggtcaagcggaggtcacaccgccatgttgatcgagggggcccgccgcgtgggcaaatccaccattgccgaggagttcgcgcgcaacgaatacaattcgtacgctctcgtggacttcaccaaggtgggagacgagtttcgtcgaacgctgctcgacacaaggggggaccttgactccttcttcctgtacctaagcgccatgttgggcgtgaccctgaccgaacgtaagtccctagtcatcttcgacgaagtgcagctgttcccgccagcccgcgagttcatcaagcacttggtcgccgacggccggtacgacttcatcgagacgggatccctaatctcccttaacgaaaacgtgaagggcatactgattccctccgaggaagagtccatgaaaatgggtcctctggatttcgaggagtttctgtgggccatgggcgaagaggcgctggctcagatgatcacgaactcgtttgcatcggggagccccttgccggactcgctgcaccgcaaggcgtcgcgcctatggcgcgaatacgtgctggtgggaggcatgccacagtcggtcacggcctacgccccgaatagggacatggcggccgccgacagggccaagcgcatggtcctcaagatctaccgcgaggatatcgagaaatacggcggcacggcggctaaacgaatccgagcagtgttcgacgcaattcccggtcagctgtcgaagcacgagaagcgcttggtgtacacgcaagtcgagaacggctcgagatcgcgtgatttcatgacggccttctcttggatgcgcgaagcggcgacggtcaacctatgcaccctcgccgaggacccgtcaattggtctggcgctcagcgccgacgacgcaacagtgaaatgctacatggctgacaccggactgttgtctaccatggcattctccgcctcgggctccgccttgccagaagtgtaccggcaagtgttgctgggagcggacggcgtgaacgagggcatgctcgcggaaaacgccgtcgctcagcagctcaccgcatccgggcacgacctgtatttctactcaaaatcctcgagcatccgcgaggagcgcatggagattgacttcctgatcatccgaccttacccggacgcagccatgaaacccagagtcagccctgtagaggtcaaatccggcaaacgctattccacggtgtccctagacaagttccacgcgaaattcacacaacgagccggcgaagaatacgtgctgcacccccgccagatgagtcaggatggcatacgccgcttcctgcccctgtacatgtcattctgcctgtgaatctcgttttccaacgattccacagaacatgaatgaactgcagaatcccctttcctttaccggtgggtgcagtttgcgcaacagctctcaaccgagcacaaatgccaataaggcgcgacatcattggcgacacgccaaacgcgccatcttcccgatcaaagacccgatgaccagttggcggccttccacagcgcggtcagccgtcggacaagggcgcgtagactgggagggacgttccttgaagatgaaaggaaggaacatcatgacacttgcatttgttgctgaatatttgacttgctgagcacgttggttattccagttcggcaccattgccgtttcacgggatcattgtggtttagcaccaaagttattgtggttcggcgccgtttgggttagtctcctttcaccatgtgatggacgcatggcgaaaggagtgccaacgatggtacgcagaatcaaggcgaagctcgtgctcaggcttcgtgagcaaggattgtcgcgcaacgcgatagccgtgggctacggtatgtcgaagcatagcgtgatcgacgtgttcgacgccgccgaccggcttaacgtctcctacgatggtgtggaggacaaaaccgatgacgaggtgtacgccctgctgtttcccggcaggggtgtgatcgagagcgcctacgagcagcccgactgggcgcgcgtgcacagcgaattggggcgcgtgggcgtcacgttgaagctgctgcacgcggagtacgcggactcgtgccgggtgaaggggttccgttcatgggctacgaccggttctgcaagctgtacgccgattacgtgctgcgtctgggcgtcacctcgagggtggagcgcaaggccgggcgtacggtcgaggtcgactgggccggggcgaccatgccgatccatgacacggtcaccggagagacgtcgaaggcgtacctgttcgtcgggtgcctgccgttcagccgttactcgttcgtgcgcgcgaccggcgacatgcgcgaatcctcgtggctggactgccatgtgtgcatgttcgactatttcggcgcggtgccggtcaggatcgtgtgcgacaacctcaagaccggtgtcgtgagccatccccgcgatggcgagatcgtgccggacgaccattaccgcaacctcgccgaacactattccacggcggtgctgccgggcagggtgaaacggccgaaggacaagcccagcggcgagaacctcgtcctgcacgccgaacgggccgtcgtcggcgcgatgcgcgaccgggaattccattcgctcgacgaactgaaccgggcgatccgcgactggctcgacgcgtacaacgccgcgcctttccagaaacgcgagggcagccgcctggcggtgttcgagtccgaggagcgacccatgatgatcccgctgcccgtcatgccgtacgagaccggcgattgggccggcacgaggaaagtcgccaacgactgccatatcgtttacaggcggaaccggtattccgtaccccaccggctgatcggcacccgggtcgagcttcgcgagaccgcccgcacgctcgagatctggcacgatggccagcgggtcgccgtgcatcggctgttcgatgccgttcagtcgaaccgttcctccacgcgcgacgtggacctgccgaaaaaggcgaactggcgggaatgggacgagccccgggtcagggcatgggcgtcgggcgtcggcccgaacgcggtcatcgtcatatcccgcatcttcgaatcatatgccaggccggaccaggccatcgaccccgctctggcggtgctgaggctgtcgcgccgctacgggcggcaacgactggagaacgcgtgcgacgtggcccgcagggtcgtgaacacgccccgccaccggcaattgaagacgatcctcgacaccggccaggaccacgaggtcatggaaggcgaggacccgaaagtcaagggtctcgacgtcgaaccgcccgcgggatacgtgcgcggcgccgactacaacgcgagggagacgaagcgatgaggctcgacgaacaaaaacccgccaccagctgcgcgacatgggatgccaggagcttctcgacgcgctcctgcatcaggacgacgacgcatgcgcgcccctgaacgcggaacaacgtataaaactcgcggtcgacgaggcgcacgccgcgttcacggacaaacgcatcggcggactggccagaagggcgaggctgcgctacccgcaggccgacctgcgcaccctcgacctgctcgacgaacgcggcatcagccgcgaactgatcgcctcgctctcagactgctcatgggtcacgcgacaccgcaacatcgtcgcccagggctactgcgggtccggcaagagctggatcgtctgcgccctggcgcgtcaggcgtgccgcaaccggtaccgttcccgctacatccgcgtccccgacctcgaggaggaatggcgtcaggccgccgacaagccccaaggacggtccagactgctcaaacgctacagcgcgtacacggtcctcgcgcccggtcgaatggctgttcgacccgcccgaggaacgcttccgcggcttcctgttcgagctcatggaacgccgacacgacaccggcagcaccctgttcgccacccaatacccccaaaaggactggcaccaacgactcggaggcggcacccacgccgacgccatcatggaccggatcgtgcacaacaccacctggatagaaaccggcgactacaacatgagggaacacgcacccggccggtagccgccaaccagtctcgcaaacaggaacggcaccggcagtgcccaataccaagcacgccggtgccatcccacaataaccccagtgccgaatcggaataacatccggtgctcaaacctcccaataatcagttgcgccgggactcgatgaggcgaccagcgagaaggccatcgcgattctgcagaaccgactgagctaggagcaggaggccgcgctggtcctgaagcatacacactggaatgtgaccggaccgaacttcatcgccgtgcacaagatgctcgatcctgaggtcgaatccgtgctggctcaggcggatgagaccgccgagcgtatcgccacgctgggcggcacgccggacggccgtaccgacgcaatcatgcgcaaccgcacgcggaagccgttcgacgtcgaaggccgcgccggcaccgaggcgtatctcaaggcgctgatcgagtactacgacgccttcatcgccgacgaccgcaaggccatcgccgagctggacgagctggatgtgatcagctccaacgtcatccaggatcacgtccagcagctcgagaaattccagtggttcatgcgtagccaccttgcatgacgcctcgcagccggccaataccggctgcatgaccgctgacttgcagtagcgtctctatgaggggagtcttccgtatggaggctcccctcagctgtctctgcgccaaccgtctcagccgtctccgcacgtgcacggttggaaaagtgcatgaaataccgtcttccatggttggaaaacgtaattgccgcacatgcgacgcgggcaggccagtgtatggtcattcggcttcgctgggacgttgcgtgcgaagtcggaaggccacatgctgtccagcgggccgcgctgagccagttcgcaacaacacaacaacgcgtgagggacgtccagcactatggcaacggacgcccctcacgctgcgacccctcggatcgcctgtcgattacttcgcttacttggcgaaggcgagcttgtattccttggcccagtcatcggtgaagaccttcttcaccgcatcccagtccccctgcccctgggcgtagttgagctccgcggagccgagatccttttcccactggtgggacacggtggagacgctgatgacgtcgtagtagccgttctcctggtactcgcggttggcttcgaccagcgggttcttgacggtgtatgcctcctcgtcgaaggtcttgaacggcgtgaccagacccatgtcctgcgagatggattcacgtgcggcatcagaagtgacgagccactccaggaactgctgggtcgcttcctgatccttctgggaagacttggaattgacgcaccagtagttggagatcacctggttgaggccctgcttctcctcgccgtcgacgcccatgtagatcggcagcacgccgaggtcctcatccgggaatccctgatcctgcaatgcggagtaaatccatacgccgtcctggaagaacaccgcctcgccgagcgcgaactccgaagtggcatcatccatggtcttgcctgaaagcgaactggccggcaccgttgcatcggtgatgtacagatcgtagatattctgcatgtagtcgacatacgtgcccttgacggattccggcacggagttcatatcgacgccgtcatcacggtactcgtagaacagcgggagagaaggcagatggaagttgtatcggaacgccgaggaatccatgccggccgaagtgaacgcgcccttgacgcccatgtcgtccttgtgttcctggatctcatcggcgacggtcttgagcgccttgaagttgttgagaccgtcgatggacttgaccgatgaccacgatgcatcgaaatacttcttgagcagcgacttgttgtagatgatgccgtagctttccaccgcgtacgggatgccgaccggcttgccgtcggcgttcttgagcgtgcggtccttgtagctgtcagtcagctcgccgtagatcttggagtcgctcatatcggcggcataatcgagccagctgtacatgaagctcgggccgtcggcctggaacatggtcggcgcctcgtccttggccatttcggaacgcagcgtctggtcgtagtcggtggccgaaagctgaatctgggtctcgataccggtctcgtcctggaacgcctgcgccagggcctcccatttctcctgctcttccgccttcttgttcaggtagtacacacgccctttgctgctgtcgaccgcggtcgtgttcccgcatgcagccagcgccccgaagctgagcgccgccactgataccaagccgattgccttggcgatggtgttccacgttcttcctgtcatcattacctccctgtaatggctctccttgctcatgtgatacgtgcctccatgcacatatccgtgtacgaccttgcggtcgccctgccggatcggatgccggctgcatcaaccatgcattgattgacacaacaaaatgatagcgcttacattacacaccgtcaaccgccgcctgcagattgcgcgtcacatcacatgcgcacaatacagaacattggtaaaccattgcaaacacaatcaaaccgtgaccgctaacaacgcgcacatcgtggtacaaaagaatgtaagcgcatacatatatgctattaatatgcatgggcgtacgtcgcagcgattgcggcggcgccagcacggctacagtatctgacaccgcccaccacacagcgaaaggagacatcatggcgacaatccacgacgtggccatagccacaggagtctccgacgccacggtatcgcgcgcattgcgcggcatgaatagcgtccggccgtccacccggcaactcgtgctggacgccgcccgtcgcctcgatttcacgctgtcccgcagcgcatcatcgctggcatccggcaaaaccatgcgcgtcgtcatgctgttcggctgcacgattgcgtcatggttcaacgcgagctgcatcgaaggcgcactcgaaacgctggaaccccacggctacgatcttgtgcccgtacgggtctgcgacctggagcaactgcatggattcttcgccgacctgcccagcaacggacgcaatatggatgggttcatcctcccgtcattctcgctggacgacagcgaatcggcgttgctttccagcatgcatatccccgcggtcgccctcgacgcacggagcgcttcccgcctgcccgcatccgtgatgctcgacaacaagcgtgccatgaacgacgccgtacgattcctgcgccaactcggccatcgccgcatcggatacgtcgcacatccgaaaccggcaccgttccccgccagctcgtatctgcgcaaggatttcttcctcgacgcgatgcgcgaatgcattcccgacgccgaaccggtcgcgttcgcatcatccagcgacatggacgccatgagcgaagatgaggccatggctgccatagccggccggatcgccagcagcgagcatcggccgaccgcgatctgcgtcgaaaccgacgaagcggcggtcgccatcatgcggcatctgcggcagcttggcatacgcatccccgaagacctgtcgatcatcggattcgacgaccatccgaccgccgcagtcgccggactgaccacgttgcatcaggacccgcagcacatggcgcgactggccgcgcaacaactgctcgccctcatgcgaggcgagcagttgagcgaaacggtcaccacggtgagagccacgctgattccgcgcgccaccactgccgccgcaccatcccttccgtgactcacccccggctacgtagcgacacgctggaacacgcccgattgacgatagcgaaccggttcgatatcctataaatcaaaccggttcgactgtatgcttacgcaacgaggcaacacctgagccagaccaataatccactccaacgcataacgaaatgcgctacagcaaaaccggctgcaccaacggcgacgtatgcagtccggcaccccgtacaacaacaagtgcgaggcggctccgtggccgcagatgaagaaaggaaatccatgaataagctgtccaaaggaattgtcctgatcagcgccgcagcgttgacgctgggactggccgcatgcggctcaagcacgaacagcgacgcaggccatgtctacttcctgaacaacaagccggaagtcgtcgaccagtggaacgaactcgccgacatgtacaccaaggaaaccggcgtgcaggtcgacatccagtccgccacttccggcagctacgaatccacgctgtcgtccgagctggccaagaacaacgccccgaccatgttcggcatcggcggcttcgaccagtacgccaagtacaagaattacctcgagccgctgcaggactccgaagcctacaagctgctcaacgagcagggcaagcagatggcccacaaggacggcgacgacgtgtacggcctgccgtacgccgccgaatggttcggcatcatcgccaacaagaagatcatcaacgagtacgccaagaagagctactcggtcatcaagaccttcgatgacatcaaggatttcgccacgctcaagaaggtcgccgacagcatccagcagcacaaggacgacctcggcctcgacggcgctttctccacccccggcctcgacgcctccaactactaccgttacgcgtcgcacatgacccaggtcccggtcgcctacgagtacatcgatgagggcgtggacttcgagaaggagctcaagggcacctacctcgacaactacaaggccctgtgggatctcgagatgaaggacaacccgaccgagaacaccatgctcggctcggtcaactacgaggattccaccgccgagttctccaccggtcgcgtggcgttctacccgaacggcgtgtgggcctactcgcagatcaaggacaacgacgtggccgacgaggacctcgccatgctgccgtactacatgggcttcccgaacgaaagcaagtatgcggcgaactccatctacgacatctcctggtccgtgaacaagaacgcatccgagaaggacaagaaggcgacgctcgacttcatcaagtggatggtcaccaacgacgacgccaagaagatcctcgccaaggacatgggcttcgccgtgccgttcaccacgttcgacagcgaagacttccagccggacaacccgctcaccaagtccgcactcaagctggaatccgacggtctgacgccgatccacggcgcctacattcccggtcaggcatgggccgacggcgtggccaacgcactgctcgagtacgcgcagggcactggcgactggaacggcgtcaagaaggcgtatctcgacgattggaccagcgcctggaacgactacgagtccaacttcggcatgctgccgccggtgcacaagtgatgcgcgcatgattcgagcacttaggcagcaggtgcggcgaccgccattgtcattgtcatagacgaagcagtggcatcgcggcgactgccgcaacataggacggttccggcgtcgtgcgtcatgtgcggcaccggaaccgttcgcgtaatggttcgtgtaatggaaggaatagattgatgatgattgccgaccttggttcattgatgaccctacgacgtgagtccagccgtgcgatcaacgcggagaatccgaccggggagcccggccgcggcggcatcgccgccagcgaactgggcccgtcgcgcaagggcagcccctgcctgcgcaacattcccagtggcgaaacggtcacattggccgacatcgacggccccggctgcatccgtcatatctggatcaccgtcgacgaaaagaccacggacgccgactgtttcgtgctgcgtgatctggtgctgcggttctactgggatgacgaaagcgagccgagcgtggagtgcccgctcggcgatttcttctgctgcggattcggccgcgcatgcctcgtcaactccgaaccggtggccgtggtgcccaaccgcgggttcaacatgttcttcccgatgccgttcgctaggcacgcgcggataacgctcgagaatcagcatgtgaacacaatcggcgcgttcttctatcagatcgactacagcctgtacgacgatccactgccacccgataccgcctacttccatgcgcagtggcgtcgccagcggctgaccgagctgggcaatgattatgtggtgctcgatggcgtacgcggctcggggcagtatgtgggtacctatctggcgctgaccacgctcgaacggtactggtggggcgaaggcgagttcaagttctatatcgacggcaaccgcgaatacccgacgatctgcggcaccggtaccgaggactacttcggcggctcgtggagcttcgccaagcaggtgaacgggaagaccgtggagcagaactactgcacgccttacatggggtatccgtattactccgcgcacgatgaactggtgcacaacgattatcacaacgacgactgcccgccgatgcgcggcttctatcgctggcacatccccgatccgatccgtttccgctccgatctgcgcgtgaccgtgcagcagatcggcgtgggccatcgcggcttcttcgagcggcaggacgacgtggcatcgatcgcgtactggtatcagcgtgagccgcatgccgcattccccacgctgccggatcgtgtgtaccgctggccgcggtgacgagcgcaatgagacgaggcgggcgaggagcagattccatgctcttcgcccgcctcattgcgttggtgcgaaggacgccgaagcagcgcagaggattcacgaagcgaactagtggtctgtcttgtattcgtctgagcggcattgcctcctttgacggaccgttgccgtgaagcagacagtggcggtacgttgccccctctgatgggacgttgccgtgaagagctgtctgtagacaacatgcgagccgacaagcgagctagcaggctgccgcgcggagcgcgtccatacttgcgggacgggctggcagcgtagctgactgggggagagacacaaaaccgaaatcctcaatcattagcgaaacaaaccactgggccgcctcggagcggaataatgcccgcgacacgcagggagtgacgtaatcgcgcgcgaagaatgacacagttgcaaacgtttattgcaatcgattgcagtctgtaaaacggcgacaacagtggtaaaaatgtgcggttttgattactttgtctatccgaggttagccgttctgccgagagatggattgcactcgtttgcattcttctgggaaacagtgcacaatagattctgtcgccggaagcaacggtgccggtggcgccgactcaacgaagatgggaccggtagcatttagggtaagggtcgaagatgaatcgtacaatcaaatccgcagcagcgatattcgccgtggcagccatgtccatcagcatggccgcgtgcggcagcgacaccaactccaacgccgaggtcggagacaacggcaaggtctactacctgaacttcaagccgaaagccgccgatcagtggaaggacctggcacaggcctacaccgacgaaaccggcgtagaagtcacggtggagaccgcggcatccaacacctacgagcagcagctcaagtcggagatggccaagtccaacgcccccaccctgttccaggtcaacggcccggtcggctacgccaactggaaggactacacggcggacatgtccgacaccgaggtctacaagcagctgcagaacccggatgtcgcactcaaggacggcgacaaggtcgtcggcgtgccgtacgccatggagacctacggcctgatctacaacaaggacatcctcaacaagtacttcggcctgtccggcgcgaaggccaagtctatcgacgatatcgactccttcaagacgctcaaggccgtcgccgacgacatgcaggcccgcaaggatgagctcggcatcaagggcgcgttcacctccgccggcttcgactccagctccgactggcgcttcaagacccacctggccaacctgccgctctactacgagttcaaggaagacaacatcacgagcagccggccaccatcaagggcacctgcctggagaactacaagaacatcttcgacctgtacatcacggactccaccaccgagccgtctcagctgagctccaagaccggcgatgacgcgaactccgagttcgcactcggcgaggccgccttctaccagaatggcacctgggcctggaccaatctgcagaaggccggcatgaccgccgagcaggtgggcatgatgccgatctacatcggcgacccggacgagcaggacgaaggactcgccaccggctccgagaactactggtgcatcaactccaaggcctccgaggccgaccagaaggccaccgccgagttcctcaagtgggtcatcacttctgacaccggcaaggaggcgctgagcaccgagatgggcttcaccaccccgttcaagaccttcgatgacatcaagaccgacaatccgctggttgcggccgccgtcgccgatcagaagtccggcaagacgcaggtcagctggaacttcaccatgatgccgtccgagcagtggaagaatgatctcggcaacgcgctcctcgagtacgcacagggcacccagagctgggatgcggtcaagaccgcgttcgtggacggctgggccaaggagtactcggccgcgcacgcgtcctgagtccgactccggcgtgaaagcgttgccccagtcggctgttagcccatgatcacgcaacgtcagcgaacggggtttcgataccatatcggaaccccgtttttacggcgaggtctggtcagcggctgacgggattcgtcagcccctcagcccttcgcctcggtcgtgctggaccgcaccagcatctgcgcgggaaagacctcaaacggcttggccgtcttccctgtctcgatgagatcaagggctttaagcgccgcgcatgtcgccatcgcgatcggatcctgccgcacggtcgtcaatccgatctcattggcatagaagctgtcgtcgtatccgaccatagacacgtcgaacggtacgcgaaggccagtgcgcgccagctggaacatgagcggaatcgcgataccgtcttcttggcatgcgatggcggtcggcatgcgatccatcgaaagcagttcggtggtcgcccggctgatgcggtcatcgccgtccgcgatgacgatggcggtcaggtcgataccggattgttcgcagacctgtacgaacgattcgtatcgctgctgcacgctgaagtgcagcgtcacggcacgatcacggcgtcggcgttgcgccgtatcggcagcatgtcgaagaactcgcggcgctcctcaatgctgaagatctggaagatcgacaggtcatagccgttcgcgtggaacacctggttcagcccttcgatgatcgaagcgctgaaccatagacgaatgtgatcgctcatcagcaaagccacgcgcagcgcgcggccggacttgagcaccatggccgagcgggggatcaagaagttcagctcctcggcgatggccagcaccttggcccgcgtcgctttcgacacgagctccggtcgggcgaacgcgcgggagaccgtggagacggagacaccggccttgttggccacatctttgatgttgattcccatgccggtctcctttgcagtgagatgcgtctatgacacaacaataaacgcggacggcgtcgaccatgtgttgagcagtcgataagacaacgttatcatatgtgttattctgcatcggaaatgccaaaaatcagtatttccagcattttgccctgtgcttaggcagcgaggaaggagtgatggacacgctttctgtgacaacgtttgaccatcggccatacgcgtggtatggtaaccttaaaccggttcgatttggtgctattcagcactgaggagactgaacaatcccaaattcggaccactcgcacgcagtagtgcgggtgtgctcaaggaggagaaagtaggctggcatgatttctatgactggcaaagcgattcgcaggtggtgggcactgttcgccctgcctacgttcgcagcattcatgattggtttcgtggtgcccttcatcatgggcctgtacctgagcttctgcaagttcagcacggtgacggacgcccagttcatcggcattgacaactacgtcaatgccgtgcaggacaaggagttctggaacgcactggtgtacacggtgctgttcacgatcgtgacgaccatcgtgatcaacgtggccgcattcgcgatcgcatacatgctcaccaagcggttcgcaggcaccaatatcttccgttcggtgttcttcatgccgaacctgatcggcggcatcatcctgggctacatctggctgctgttgctcaacggcgtgctggcccactggggtcgttcaatcacctactcgggtgtgtacggcttctggggcatggtcatgctgtactgctggcagcagatcggctacatgatgatcatctacatcgccggcctgcaggcgcttccgggcgatgtgctcgaagccgccgcggttgatggcgcaaccaacacccagacgctgttccagatcacgatcccgttgatgatgccgtccatcaccgtgtgctcgttcctgaccgtcaccggtggcttcaagatgttcgatcagaacctcgcccttaccaacggcgccccgtccaacagctccgagctgctggctctgaacatctaccgcacgttctacggccgcgccggcttcgagggcgtcggccaggcgaaggccgtcgtgttcttcatcatcgtggcgctaatcgccatcatccagaaccgtctcaccactagcaaggaggtgtccgcatgagcgagaaagtcaagcatccagtactgtgggccacgctgttcaccatcatctcgctggcttgggtgtttccgatcgtcctcgtggtgatcaactcgttcaagcagaaggcatacatcagccgcaacgcgttctccatcccgaccggcaaggcgttcgtcggcctgcagaactacacacgcggcatcaagcgcaccaatctaatcgagtccttcggctggaccgttgtggtcacggtcggcgcagtgctgctcatcctgctgtgcacttccatgtgcgcatggtggatcgtgcgtgtgaacaaccgcacggcgaagtccctgtacctgctgttcctgttcaacatgatcgtgccgttccagatggtcatgttcaccctctccaagatcgccgatatgctcggcctgaacactccgtggggcctgtggatcgtgtatctgggcttcggcgccggtctggccgtgttcatattcacaggcgtgatcaagggcatcccgcaggaacttgaggaatctgcaatgatcgacggcgcctccgtgccgcgcattttcttccaaatcacgctgccgatcatgcgcccgtccgtgatctcggtcgccatcctgcaggccatgtggatctggaacgatttcctcctgccgtacctgacgttggacatgcgccggttcaagaccatgtcaatcgccatccagtacctcaagggtggttatggctcggtggatatgggtgccatgatgggctgcctcgtgctggccatcatcccgattatcatcttctacctcgtgtgccagaagtacatcatcaagggtgtgatggctggcgccgtcaagggctgacgattacaagccgaaggggggcttcccggattgttccgggaagccccccttcgtatgcgcactggagcgcgaccctaactctctagtgtcctccgtcggaagttcgttaaatgactacccctcagtcccgcttccgcgggacgccccccctgacaaggggagccatgcaagccggcatcggcttctaatgggacgttgccttgaagcagacagcggcggtatgtgccccctctgacgagggggctatcagcgaagctgactggggggagagaaaaagctggtccttcagttatttataaggcagaccactagcatctctaggcatgcagaatcatgccaaaccgcaattcgactgacgagccacatatctcgcttacgaggggctgatttggggcttatacaacccctcacgcccacgtcaccaccgcgtatgcccgcccgcgcgcagtcctctacaacgcggctacacccctctctgtacatccacacgtccaacaaggcatacaaaaagcggcttcccgggaagacccgggaagccgcggaggggaaagaggagaaggaagaattagtcgagcaggatccacaccgtggtgtcctgcggcagagcgccgtcagcggtcagatcgccggaggcgagcacgacctcaccggcaggcagcgtcaccgccgccacaccgaaattggtgtagctggcgaaacggcgtccgtccgtgccggggcgggagtacgcgatcacgtcgtgtccggcatcgatggccgcgcagtccgaggtatcggcggttgcggtgagtagcaaagcgcgcagctccagcgtggtccgatacaggttcagcatagacgcgtcatcagcagcctcggcatcggcggcataatccttgtaccgcagtggctgcggcagatgcgggtccgcactggccgagccgtcggccttcgtcgccggggagaatccgaacgatgctccggtgccgaatcccgcgttccattcagcgggtgcaggcacgtcggcggcgacccacggcagaggcacgcggcaaccgtcgcgacccttttcgatgaaccgttcgcgggtgaagaacgggggtcggatcctcgagacgatcccacaggatgtccgccacttcaggcaagccgagctcctcgccttggtagatgtacaccgaaccgggcaggctgagctccatcagaatcgccgcgcgcgcacgcttggtgccgagctcgcgatcttcgaagtagctggtgccgtcgcgcagcagccagtccttggcgagctggtgatgcgacgaggccggcactcgcggcaggccgtaacgcgaaacgtgacgcggcacgtcatggttgctcatcacccacgtcgtcgtcgaatcgtgcgccttctcggcggagcgcagaccgacgaagattgccgcacgcatcgcgtccacatcccagttcgcttcggcgaactcgaagttgaacacctgaccgagctcgtcggtgctcgcatacagatgctggcgctccggcacgacccatgcctcgccgacggcgaatcaaggcgggttgtactcgttgaacacctcgcgccattcacggtagatgtcgtgcacttcgcggcggtcccagagcgggctcgtgaagtcgtggcagaggccatgctgcacggccagcgggtccatctgatcaagcggcgtggattccaggtccttggccaggccatgcgccacatcgatgcggaagccgtcggtgccgtgatcggaccagaagcgcagggtcttcttgaactcttcgtggatgtccggattgttccaattgacgtccggcggctgcttggcgaagatatgcaggtaccgctgaccgtcgggcacctgttcccacgccgggccgccgaacagggaaatccagtcgttcggcggcagctcgccatgctcgccgcggccgtctcggaagatgtagcggtcgcgttcgggcgaaccgggtcctgcagccagcgcctcctggaagaagacgtgcttatcggcggtatggttcggcacgatatcgacgatgactttgatgccagcttcgtgtgcggctgcaaccatggcgtcgaagtcgtccatggttcccagacgcggatcgacattgcgatagtcgatgacgtcgtagccgccgtccgccaggtcggaggggtagaacgggctcagccagatggcgtccacgccgagcgtcttgagataggggattttctcggtgacgcctgcgatgtcgctaagtccatcaccgttggcgtctttgaagctacgcggatagacctgaagacgacagcttgcttccaccagtcatcgcgcttgttattcgcggtcatgggttccctcctcccgaattcaatttgtaagtgcaacgctcgtcttcgggtggcttgtctttgacattggcttgccgagctcgcggtaccaaacctcgttgggcgtttcccagcccaggaccttcatgggggtgtcgttgatctcatcgacgatggcctgcaggtccgcgtccgtcaggtcgtcgaaaccggtcctcttgggaaggtggcggcggatgcgcccgttgcggttctcgttcgaccctcgctggtaggaggagtacgggtccgcgaaataggcgagcatgcccagcgcctcgtccacgagcatgtggcaggaggattcggtgccgttgtcccaggtgcggtcgatgcgcgccggcgcggggatgtccttgtagatgtcgtattcggcgcgcgccgtggccagcgcgctcttgtcggggacgaacctggcgaacagcctgcggctcctgcgttcgacctgcgtgtcgatgcaccgcctcgacggggaggcgccgacgaccgtgtcggactcataatg

SEQ ID NO: 716 - DNA, 2825 bp, Unknown
  R14_15m  MAG No. k141_37102
ccgacgtggacaacaagcatgcatacatcatcggtaccggactggcggcattgtctgcagcctgttatctggtgcgtgatggtcagatgcctggcgagaacatccacatccttgagaaggacccggtacccggcggcgcctgtgacggtcttgatattcccggcctcggctatgtgatgcgtggcggccgcgagatggacaatcatttcgaggtcatgtgggatctgttccgctcgatcccctccatcgaaaccgagggcgtcagcgtactcgacgagtactactggctcaacaaggaggacccgaactactcgctgtgccgcgccaccaaggacctcggcaaggacgcggggctcaagggcaagttcggcctgtccgacaaggcttcgatggaaatcatgaagctgttcttcaccccggacgaagacctgtatgacaagccgatcaccgatttcttcgatgatgaggtgctgaactccaacttctggctgtactggcgcaccatgttcgccttcgagaactggcactccgcgctggaaatgaagctgtacatcaaacgctacattcatcacatcggcggactgccggacttttccgcgctgcgtttcacccgctacaaccagtacgagtcgatgattctgccgatggtcaagtatctggaatcgcatggcgtcgaattccgctacaacaccaaggttgagaacgtggaattcgcgattggcgggggagccggccccaagcgcgagcacaccggcgtaggccaggacaccatccaaaagattcaggccacctccggtttcttcaagcgcaaccctgccagcacgcccaccaagaagcttgccgtgcgcatcgacgtggatcacgagggtgataaatcctccatcgacctgaccgagaacgatctggtgttcatcaccaacggcggttgcgtggagaactccaccatgggttcccagaactcgcccgccgcatggaacccagacctgaagcccggcggcggctgggatatgtggaagcgtatcgccgaccaggacccgagctttggccatccggagaagttctgctccgatccgaatgccaccaagtggatgagcgccaccatcaccaccctggacggcgagattccgccgtacatccagaagatttgcaagcgcgacccgttctccggcaaggtcgtcaccggcggcatcgtcactgtgcaggactccaactggctcatgagttggaccctgaaccgccagcagcagttccgcgaccagcccaaggaccagctgtgcgtatgggtctacggcctgttcccggacaagcccggcaactatgtgaagaagccgatgaccgaatgcaccggtgaagagatttgcgaggagtggctttaccacatgggcgtgccgaccgacaagatcgaggcgctcgccaagcatcacgccaacaccgtgccggtcatgatgccgtacatcaccgcgttcttcatgccgcgcgcggccggcgaccgcccggacgtggtgcccgatggtgccgtgaacttcgcattccttggccagttcgccgagaccccgcgtgacacgatcttcaccaccgagtactcgatgcgcaccggtatggaagctgtctacacgttgctcggcgtggaccgcggcgtgcctgaagtgtggggcagtgtctatgacgtgcgcaacctgctcaacgccaccgtcaaattgcgtgacggtgcaccggtcaccgatatgaagctcaacttcattgaaaaggccgtggtcaagaaggtgctcaagaaactcgacggcaccgatattgccaccctgctacgcgaataccacgtaatctgacatccatccggctcccctcaaggtgaggggagccagcacgcgaagcgtgactgggggagttgctcacaacggagtgttaagagaaagacaaaacatgactgattctgatccccagttaatccgccacgccaccatcgacgatctggacgcgctggccgccatggaattcgaatgcttcccggccgccgaggccgccgaccgctcgtccctgcgcgcccgaatcgagacctatccggaatgtttctggctattgattgatggcgagatcgtcatggcgttcatcaacggttttgtgaccgatcggcgcgacttgaccgatgacatgtacgaggatgccgcgcagcacaaccctcaaggtgactggcaaatgattttcggcgtggatactgcgccgaagtatcagcatcgcggttgcgccagtacactcatgaggaaagtcattgaagacactcgtgcagccggccgtaaaggcctggtgctcacctgcaaagatcggttggtcggattctatgcgcgattcggatatgaggacgagggcatttccgattccactcacggtgacgtggtctggcaccaaatgcgcctgaccttctaatccccttttggcttccctctttgatgctgggtcgtttaaaaaacagtccggtggactgttttttagacgaaagcgagacgatagtcgagccataagggcgcgagctttgctcgtccgtaattgcgggtgagctgtccgcgtgatcggactgaggggagttgaacgtggaatgaattgttgcgacacgccggtgaacatctgatttcgttacgtgagcccataaaaagccggcgtatcctgatggtaacggcgtgattcaagctgatttcgacacgccgagcgaagcctgtcgtttcaacgatttgggcttatcttcgtgcgcccgatttgcgcgagtccgtgaatgcgtgtaagttatttccttgctgccgctcagcgagtggttctcctccggggagctgcga

SEQ ID NO: 717 - DNA, 27024 bp, Unknown
  R14_15m  MAG No. k141_38314
aaaacgaaaaaactgcgcggagaacatgaagggactcgaatcggcccactgacgggacacatggggcggggtcgggcttcgatggcggacacgcggcgggcgggggccagaaggcgttttcggaatcgtcggttccgatatgtgacacgcgcggcaggtcggggccaaaggtgtcgaaacggagggaacctggagggaaccgacaatcggaaggaaccaaagcaaaaccccggaaaccgaatgttttcaacggtttccggggttccaatccgggcggaggatacgagattcgaactcgtgaggctgttacaccaacacgctttccaagcgtgcgccatagaccactaggcgaatcctccatgctttgcagcgcgcagttgaactgtgttccgcaggcaactcgaataagttaccacaggtttcggataagtgcacgcttcggcgtggcgcgtgtcgcgacgcggatgtgaagaatgatcactgcgagtgaaagactcactggaaagtcccgcgcaacacccgcacaaggaccgcatacttgtgcagggcccacacacccgcgcgcacctacacaaccccccggtaaagaaatcaccgtatccgggtgaattttcgatgttcgcccggcgcgcgcccgcaatcgcgcctaggctgtggagtcatgaacgaggggacggcggccgacgtaaccgcagcacatggcggccggtcgcgccaatcgaagaaacactcaaagacgtaccgcagcatatccgcgatccttagttggctcacggcccgccgcccgaccacgttatccacatcgctgcgcgcgcgattcctctcttacctgctcacgatcgctatcgcctggctgccgtggctcatactcactcggccgggttcgatgcgcgacgatacgcttgcccaatatctgcaatcgtccggtctgcaccactactacacccagcatccgctgtttgatacgctcacgttcggcctgttctggcatatcggcagcgcactcggctcccccctgatcgggcaggccctgtacaccgtgacccaagcggttctactcgccgccgggtgcgcgcttctgctgtgctacatccgcaaaatcggctcgccgcgctggctcatcggtctcggcctcgtctatcttgccgccaactatgtggtggtcggcgcaatcaccacgatgggcaaggactcgttgcacgccgtgttctatctgccgttggccgtgctgttcgtggaggcttgtctgacgcgcggctcggtactggctcgccgcccggtggcattcgcgttcgtcatcctgttgttcgccaccatcgtctccaagcggacggcgctcataatcgtgctatgcgccggctgctgtttgctcgccgtctgcacgcccaaaggcgcgcggcgtcgtgcgttcgcgtgtcttgcggttgccatcgttgtgacgcagggcgtgtggacgccattaagcgcggccgccacgcatgcgaatcgatcgcccggacgtgaggtgtggggcctggtcacccagcccgtggcccggctcgcgcacgatgatcccagtgcgatagacaagattcagcggcggcgactgaacgcgatcatggatctcgactgggccgccgccggcatcaacccgcaccgcaccgatgagaccttccgcactctgcgcgagcaccctaggccaaccgcggcgcaacaactcgcggccctgcaggtctgggcgcagctcggcctcgcgcatccggttgaatatgccacggcctatgccggggtgactcgcggatggtgggacccgcgcgtcaatttcgcgtaccccactgattccgactacctgttcacgcctagctatctcaggcaatgggcgtctttcctgactgaaggtgcttggaagcatacttccgacggagatgccgataccgtggcggccggacggcttgccgccatcgaacatgaccttgcgccgctgaggggtacctccgacaagccgcaatggcagaaaaacatattgcgggcgattcatcggtgggtgcattcggatggtcatgtcggtgttcgcaaaggcaatccgctgacttcgatggccctgtacgtcacgtggattccgctggctgctggtcttgcgctggcggtgcggcctgcgcgacgacgctacggccccgcactggccgcttacggcttgctggcattcacggtgctgtcgctgtatgcctcacccgtggcactattttggtatccgattccggtattcctcacgttgccgctttttgtggtgttgccgttcacattccgggaaagccatcctctctgagcatagttatctcagatagtgaaataattgcggggttgaaaagcactaaaacgccttctattacctcgcacccgtcaaaaaatcaagactgttgttcaagaatttttttctataaagttcatagttgtttttggaccattcgagtacttgaagtgagaggaattcagcatggttcgtcgcgcctgcgcgcagtccgctgaaatgaacacgatgcgggaacgtgatacgcgcgttgccgtttctcgcgtgcgcgcgaagtcgggcagcaccggtcgtctgcagtcggccacggtctcggctcgtgcatttgcggtcatcgtttttctgtttgcgatgatcgccgcgaccttcctcccctccgccatcattccgcagtccgcgttcgccgtgacgccggcaaccactgccactgctgccaccgtcaagagcgacgacatcaccagcgtcgattacgcgacctgggccgacgttgccaaggccgtcgaagcgcagttgcaggaaggccttaaggaatacaaggacggcaacccaatgggtgccaagtccgatttcggggctgcatacaccaccgtctacgtgacgtccaacttcaacaaagtggtgagcgacaccatcggcgcagacaagcagaccgcgcagcagcaggccttccaggacctgcaaagccaggtgttcacgtcagaccaggccgatcagcttacccagaaggtcaacgacctgaccgccgacctcgacgccacggcccagcagctcgacgccaacaccagcctcgccaacccgaagcagtactccgaagacctccagaagcagatcgccaaggagcgcaaggagctcgacgccaagaagaagcgcaccgaggaaacggccaagacctggaaggaagtcgcggatgcgatgcttccgatcctggacaacgcctacaaggcctatgagggtggcgacgccgccaagggcgccacgctcgtgaacgacgcctactaccagcactacgagaagctcggcttcgagaagaccgtgctgagcgccatcagcggcaaccgcgtctcccaggtggaataccagttcaagctgtgccgctcctcgatgaacaccggcaagcctgcttccgaagtcaagaagtacatcgacgacctgaagaacatgctggccaccgatgccgccaagctcgacggcggcgcggccgatgaggagggtggcttcctcaagttcatcaccagctcggtcggccaggcgttcctgattctgatccgcgagggtctcgaggccctgctcgtggtcgccgctgtggtggcctacctcgtcaagtccggcaacaagcgcttcaccaagtggatctacgtgggcgtgctcgccggtctggccggcgcaggcatcgtggcggtcatcttcatgctcgcgttcggcggctccggcccgctgcaggagatcatggaaggcgtgtgcgcgctcgtcgccatgtgcatgctgctgtggaccagcaactggatgctcaacaagtcctcggtggaagcgtggaaccgctacatcagggaaaagaccgaagccgcggtggcctctgtctcctcgcaggtcgaatccggcgagaaggtggcttcccgcacggtgatttcgctcgccatgctgagcttcctcgccgtgttccgtgagggcgccgaaaccgtgatcttctaccagtccatctacacgatgagccaggatacgcatggcatggtggtcggcgcactcgccgccgccgtggtgctcgtgatcatcttcctggtgattcgcttcacctccgtaaagattccgattggcccgttcttcctggtcacctcgatcctcatgtccgtgctggtggttgtcttcgccggcggcggcgtgcacgcgctcatcgagggcgacctgctgcccgccaactacctgccgggcgttcccaccaacgactggctcggattctacccgtacgccgaatgcatcatcgcccaggtactggcagccatcgccgtcatcgcgctgttcgtggtcggctttgccaaacagcgtaaggccaaggcccggcttgcggccggtgcgagcaagtcggacgcgaaggctgacgaggagagcgcgcaggcgtagcacaacgcccggtgcgaccatctcgcgcaacacaacttgcgacatggcaacggaagcgattccagcccacgccgccacaactaaaaacagataagtcgtgaataatccattcaccacaacagaaggaataagagaaatgatgaagaacaagaagcttgccgctctgctcggcgtgctgctcgccggctccatggctgtttcgatggctgcttgcggttccaccaacaacgcttccgataccaagtcctcgaccagctcctccgacaccgccaagaaggacgactccaagaaggccgacgccccgactgagacctccggcttcgaagaggtcccggtcggcccctccggcaccgccaaggagcaagacaaggccgctggcccgctgaccgtgggtgccgtctacttccagcccatcgacatgtaccctgcttccatgggtctgaaggctgctgacgcttccttccacctggaagccgacatccacgcctcccaggaaggcaccgactacggctacggcaagggcgacttcgtccctgaccttactgtgaactacaccatcatcgacaagtccaccggcaaggaagtcgagggcggccaggccacctccggtaccttcatgcagatgaacgcctccgacggcccgcactacggcgccaacgtcaagctcgacaaggccggcacctaccaactcaagctctccatcgagtcccctgagaagaacggctggatgctccacgttgacccggagaccggtgtcaagaaccacaagttctggaccgagcccatcgaggtcaccttcgacaactgggactacaccccgcgtcagtggtgattgactaagcagacagccccctcgtcagagggggctttacgccgctttagggagataattcttaggacggtctaaaaactcccctcagtccgctttgcggacagctcccctcagggaggggagcctaagatgaacagagaaaggacgcgaatgcttgaacaattcgtggcagtgatgccgggcaccttggcccccgcattgctggtgatgagcctgagcgtgatgctcacggtcggcgaggggcgagataagccgataagctcgcattggcgtctcatcggcctgaccgtcggcctgatcgccgctatcacattcgccggcctgcgcgcctcggccgtgatcaaccagcgcacgttcgtcaactatccggtgctgtggtgcgcgatcattgccgacatcctgaccatcgtcgtggtggtgttcgcacgccgcatcaccaccaattggcagcagcacaaggtgttcatgcacattgcgaacgccgtggccgccatcgacatcgcgctcaccctgttctacgcgctgccggacgtgatcctgcagctgaccatctgggtggagcccggcgacccgatcttcacgtccgacatgctgctgcgcgcgctcggcttcgcgctgggcctggccatgtcgatcatcgtggccgtgatcttccgcacgatgcgttcgaccgcggtgcgtgcctcgttcaccgccgccgttctcgcggtgctggtgattctgttcgtccggcacctgaccggtgtcatgcagatcctgcaggcacgcggtttcccgataggccacacgggattcgtggccctcgcctggtcgatcaaccacaacgactggatgatcatggcccaggcgttcgtgttcctgattccggccgtcgcctccgtggtggccggcttccgtataccgctgaccggcgcgaacgaagccatcggccgcaagcacaaggcgttccgccgccgcgccgtggcctccgccatctggagcctcgtggccatgatcggcgtcacgctgaccctcaccgtcggcgtcgccgcgacccatcagaccatcactctttcgccgccggaagcctactcgctcaaggacggcgtggccaccattcccttcagccaggtcgaggacggccacctgcaccgtttcgaatacaaggccaaggacggcaccgtcatgcgcttcatcatcatccgaaagaacggtggcgcgtacggcatcggcctggacgcctgcgagaactgcggcgacgccggctactacgagaaggacggcaagatcatctgcaagaagtgcgaggtggccatcaacctggcgaccatcggcttcaagggtggctgcaacccgataccattcccgtacaagaccggccacggcaagatcaccattcagactacggatctggacgcgctgagcgcccacttccagtgagtcaggcaggagacaagaatcatgttctttctgcgtatgattactcgctcgttcacccgacagctgcgccggcgcctgcttatcgcgctgaccgtatgcctgtcggcgaccgtgtccgtatcgatgctgggcgtcgtgttcgacgtgggcgacaagctcaacgccgagctgtccacctacggttcgaacatcaccgtgcagcccaaggcggacgcggtcgtttccgacctgtacaacaccgagtcgggcggcgcggcgtccaccagcgacccgaccgcctttctgaaggagtcggacgcggccaagatcaagacgatcttctggtcgttcaacatcaccaacttcgcgccgcagctcaacatccacgccacggtgaacggtgccaacgtgccggtcgtcggcacgtggttcaacaaggacctcaagatctccaccggcgagaccaccgtcgtgggcgtggaaggcatgcgctcgtggtggcagctggacggcaagtggcccaaggacgattccgaccagggcgtgatcggcaagacgctggcctccgaactcggtgtgaccaccggcgacaccatcaccctcaacaagaccaccgcctcgggcaagaagaacgagcagaaaatcaagctcaccggcgtctacgattccggcgacgaggacaacggctcgctctacatcgcctcctccacggcccaggtgctcgccgacctgcccgattcggtcgacaagatcgaggtcaaggccctgaccacgccggagaacgacctggcccgtaaggccgccgcgaacccggccgcgctgagccaggaggaatgggagacctggtactgcaccgcctacccgagctcgatcgcctaccagatcgaagaggtgattccgggcgcggtggccaagcaggtgcgtcaggtcgccgcgttgcagggcaatgtgctgcagaagacgcaggccgtgatgattctgatgaccgtgctgagcctgatcgccgcagccgtggccgtggccaacctgatggtcgcctcgatcggcgaacggtctggcgagctggcactgctcaaggcgctcggtgccaccgatgccgcggtatcccgcctgatgctggccgaaacggcggcaatctcgctgctgggcgcgattgtgggcgcgttgcttggttccggcgtggcccagctgataggccgggtggtattcggttccggcatcacgatgcggccgatggtgttcgtgctggtgttcgtgctgctggctgtcaccgtgctgctggcgtccgcctcctcgattcgttcgattctgaatctcaagcccgcggaggtgctccatggccgctgagtttatctacgtaggtgtggaaggaggaaaccgatgaccaacaccggtatgttcttcagaatgctgttcagcgccgtgttccgccggcgttcgcgcgcggtgatggccgtggtggcgtcgctggtcggcgcggccacactgttctgcctggcgatgatctgcctcgccgtgccgcagcagatgaacgaggagatgcgtgcgtacggcgcgaacctgattgtcacacctaccgaatcgaccaatgccgacggcaaggccggcatcgacaaggcgatggtgcagcacaccactgaaatggtcaaggccaagggttccgcgaaatacgccacttaccgctacgagaacgtgcgcgtcaacgcctcgccgtacgtgatggccggcgtgaatgcggcgcaggtcaagaacctcaaccatcactgggtggtcgacggctcgtggccgaccgacggcaaggtgctggtcggacgtgacatcgccgacgccatcggtctgagaatcggctccgccatcaccatcggctaccgtgcatccgataacgccagcaccaacggcacttcgtcgaactcctcgatcgaccagcaaaccaaagacggccgtgtctccagtgacattatggacacctccggcaccgaattccgcgtggccggcatcgtggacaccggcggcagcgaagactcgatcatctacgccaccaacgccgacgtcaacaagctcaccggcatcacgcgcggcgtggacgtcatcgagtattcggccggctccagcgacctcgcaggcctggtgtccagcatcaacgacatgacctccatgcacgtcaaggcgcagcaggtcaccaagatcaccgcctccgacacccgcatcatcaccatgctgcagacgctgttctggatcgtctcgttggtggtgctggtgctgacgctcgtcggcgtcggcaccacaatcagctcgatcgtctcgcagcgacgcaacgaaatcggcctgcgcaaggccctcggtgccagctcgcgtgccatcggcaccgagttctacatcgaatcatcgctctacggcctgatcggcggtcttatcggcaccgcaatcggctacggactcgccagttggctgtgcgtggcggtgttcgaacgctccatcggattcaactggtgggtggcgctgatctccgtgctgttcagcgcgctggtcgccatcgtcgcctccatcccgcccgtccaccgcgccacccgcatcgaccccgccgtcgtgcttcgcgaagaataaagaaagagaaacgtcatgctacttgaactcgaccacatctcgaagatctacggcgacctgcatgccgtggacgacctcaatttgaccgtgccggaaggcgaatggctcgccatcgtcggctcctccggctcaggcaagaccacgctgatgaacatgatcggctgcatggacacgccctccaagggctccgtgaagctggaaggccgcaagctggaggacctgaacgccacgcagctggccgacgtgcgcaagaacctcatcggactggtgttccagaagttctatctggtgccgcacctgaccgccgtggaaaacgtgatggtggcccagtactaccattcggtggtcgatgagaagcaggccatggaggcgctggaaaaggtcggcctgaaggaccgcgcccaccacctgcccggccagctctccggcggcgagcagcagcgcgtgtgcgtggcccgcgcgctgatcaacgacccgaagctgattctggccgatgagcccaccggcaacctcgacgagaagaacgagaaaatcgtgctcgacctgttccgcaagctgcacgagcagggcaccacgattatcgtggtcacccacgatgcgcttgtcgccagctgcgcgcagcgcgagatcatgctcaaccatggcgtgctcgtcggtgagaagtggaatgacgaggatgcgcgcaaggcctacgaggcggccggcggcaagcccgcctccacgggtgcacaggtcgagggcgcgcagaacggcgagaccgccattggtttcgctgaccccaccaaggccgcgaaaaccggcggcgaggagtagggccgtcaggggcatcgagcagtatgtgaggaatacatggcaagctgatggtctctcccccagtcagcttcgctgacagccccctcgtcagagggggcttaaggagcgtgaatatgaccgaaaagaatacgttgaagaaatccgcgacattggcggcggccggactggtcgtggctggcgcgctgctggccgggtgcggcgaatccaaggccacgccgatggacgatgcgtacgccggcaactcgggcgagaccgagaagtcgcaggaagagcagtcgcaatcccagtcgaacggctccgatagctccgacggctccgattccggctcatcgcacaacgacccgtccaccaccacgtccgacaagaaggacaccggcaactacaaggacggcaactactcgatcaacggccagtacggcccggtcggcgaggattccatcgacgtccatctgaccatcaaggacggcaacgtcgagaccgtcaaaatcattgggcacccgttcaccacgatttccaagaaccatcaggacgacttcgccaaagccatcaacggcgtagtggacggcaagcccctgaagggactcaaagtggacaaggtcgccggtgccagctggacctccgacgccttcaacaaagccctcgaagtcgcccgccaggaggcttcgattcaggagtaagaccgctacttcagcaatgctggccacagcagatcggccatgcgcgaggcccaggcggtgtcgtcgtccatcgctttgccctcgatggcctcatacgccaccaaagatccgataatcgtggacaacagcaacttctcgtcaacgtcctcgcgaaacacgccctgcgcgactccctgcttgaggaacgcccccacatgctccagccacggggtcaccacctggtcgacgatgtgctggaagaactcggcctcgctggacaatacaatgcccacgcgcttgacgtcgatgtcgttgtcgcgcacccaatcgaccaatcgctgcaatagttgcgtgaaatgctcacgcgtggggctgggcactgggtcggaatccgggatggccagatacatcgcgctgatctcgcgcagcagctcgtcggcattatggtatcgacggtaaatcgtggttttggccacgccggagcgccgggccacctcctcgatggtcacgccgctgatgccgcggtccaccgcaatctgcagcgtggctcgcatgagcttgcgatccgtcgcctcgcgcgtgcgctcaccgcgcggtgtcgccgtcgtacctgtcatctccgtcatctcttctctccgaaatatgctcccgtacgctcccgttggcgggagctggctggcaaagccagactgagggtggtaagtctatgccgtttgtaggcaacccccggataatacctactagcccagcactttagtgctctcgactttggccacataccactggttgaaccgcaccagtggcttcctgagcaacagtccaagcaacagtagcggcggcacgaacgccagcagcattccggcggcccgccagtaatccatgtcgtagatgccggcgatggccgcacgcatcatcgtcaccgcatgggtgagcggcaagaacggactgactttggcgatgaagtcgggcaacatctgcaccgggtaggcagcgttcgcacccgaaatctgcacgatgagcataagcacgccgattgccttacccacattgccgaaactcaccaccatcgtataggtgaagaacgagaacaccagcgaggccagccatccggacaacataaacagcagcggatgcacggcctgcacgcgcaggaacagcagatcgccgccgagcgacaccgtggattgcagcagcgcaatcagcgcgaacaccccgtaatgcccaaggaagagccgatgcggccgcggatcgcccaaggctttgcgcgtccggcgagacacggtggttttcagcgtcaccaccatcagcagcgcgcccacccacagcggcagcagcgtgtagaacggcgccatcgacgaaccgaaattcgccaccgggaatacggccttgcgcctgagctgcaccggcgcggccaacgtactggccagcgtttcgggatcattgcccagcacctctttgaccatgctcatatcgccactgtttagtgcgtcgctcagtgtgctgttgaacgaagccagttcggcaccggcggaacgcagtttgccggacaccttgcccaaggtggtgcgagcgtcgctgagcatatcgctggcgtcgtcggaagtccttttcaggtcgccgagcgtggagcccaactgggtggcgccggaactcagtatgccggaggcgtcagagacggtggacgacagggagtcgatttgcggtttcaccgtggccgtgaaatccgacttgatattggcgatactgttctgcgcttgatcggccagatccttgacctgcgcatgctgatcctgcgcgtcctgattaccttggcgaatatcggtcgccgccttattcagcgcttgccgcagcctgttctgccgtgcgattgaacggtcaatcgccgtgatgatggatgagtcgttgcccagtatgccggccaacgtgttgcgaatttcagtgtatttctccgtctgcttgccaatggccgtggcttgacggtccaattcgtcggcggccgtggtggcaccatcattcgcgtcggaatacagcttgtctatggaatcggacaccgcgccgaaactggaggcgctcgcgtccagtgagctgctcatcgcgtcagcggtggtgcccagggctccgaccacgtcggtgactccctgcttggcgctggcgagatccttgcctccttgtttggcggcagaggaaacctgcgtgatcagcgagttcgaggtgtcaagcaaggcgccggccgtatcggtcaatgcgctgtatgtgccaagcaaatccgccgtatcgtcaagccgtgtggcgaaatcggcgatattggcgttgaaggtattcagttgctctttggcttcgggcttggacagctgatcggccagcgaagacgcgatttccagccctgccgaagtgatggtcttggcgaacgtggtgttgatttccgccgccacctcgtccgtgccctcgttgagcagattcggtgccagcgcgttcttcttctcgttgcggtaataggtcagttcggcatgctgcacatcgtcggagaagaaggtcatcatgtctttgctgaacgacttcggaattacgatggccgcgtagtatttgccggatcgtgcgccctcgacggcatcggctttggacgtaatcgtccaatcgatctgactgttggcgcgcagcgcgttcaccacctgatcgccgaccgtgactttcaccgggatcaggtcggaacgatacccctcatccacattcgccaccgcgaatttcaggttcttcatattcgagaacgggtcccagcatgcggccacgttgaaccaggtgaacaggccgggaatcatcaccaagccgatcacgatgatgatggagaccacgttgctggtcaggcgtttgatgtcgccggtaaatagtttccacatggtgttcatcgtgcgtgcctgccttccttggtcggcggaatagtggggatgattgcggtaacggcggcgctcgggtccgcttcttcgtggcgttcggcggaggtgtcgcgacgcttggccttatgcccgtacagcatggcgcggatcgactcgtcggagaggttgccgagctcggtttggcggcggatggaatcgcgcatgaattccacgaccatcaggaagcccatgatgatgagcacccatgccagccatgtgcccatgaccacgattttctcgctggtggtcagcacaaacacgataatgagcgcggccggcaccatgaatccggcgataagcgcacccagcagcagccggggatactggtaggcgaatttggcggcccgacgttcgatggcatgacggtattcgtcgcggtcggccagtgccgcaatggcctgagtgacacggtattcgctgccaggcaggtgcaccggctcgccgataatcatgtcgctttccttgatttcccgcgcgaacaggcggttgagattggccagtttcggccgggcgccgaggccaagcgcaaaggccagaaccgcgaaaatcagcaatttgccgatataggcgaaccagaggccgtcgtagaagccgccgatggtttcacgcattgcgtcaatcgaataggtgaacggcagcagcggatagatggcacggaagaacgcgggcatcatttcaatcgggtacaggccggaggcgcccggcacctgcagaatgaccagcgccacgcacacgcctttgcccacgtgcatgaacgtggtggagagggcgaaaatcaccgacatatacaccagtgaggtgatgacgcaggtgagcagaaacaccggggcgctcgcgcattgaatgccgatgacaagatcgccgatggccgtgaccaggccttggacggcggccagcgtggccagcagcaggaaacggccgagatagccttgggttggcgtgagatcgtcgatgccctcgtcgtcggtttcgagtttgggaatgaccacgagcacgaacgcgcccacccacaaagacagggtggtgaacagcggtgccatgccggaaccataggaggcgaccgggtagacggcccgttcgctgataacagtgggggagagcatgaagtcggcgattgtggcggcatccagtttgccgtcggtgccgatcagggaactgagtgaactggagatgctcagggctttgatgtcggtggtcagcgtttcgagcttggtttgcatgccggccagcgccttatcggtgtcgtgcagggcggtcaccgtggtggaggcggctttgtcgagttgatcgagggtgctcttcgactgatcgatgagtgagccttgcgacgtgatgccggtcgacagagtgttggcggtcgagctgagggtgttgaggccggtgttgagctgaggaatggcgccggagatgatggtgccgcgagcggtattggcctcgcgtaccgtggtttgggtggcggtattgagatgctgcgccaatccggcggtgtctgtggaggcgttgccgatagtggtgttcaggctatcgaggttgcccagtgcgccggcaagctcgctattgcggctttccagtgtggcaatggcggattgcagcggttctcgatcggcgttcggcagccctttgagttggtcgatgatgtcggcgttcgcttggttgatgtcttccgccgtattgatcagtccgcctacctgctgattggcggcgctgatggttccggctaccgtgcccacgctttggttggcctgtgctgcggcctggctcagcaggcttgagccttggtcaagcgcttcggacgtggaggtgacgaagccgttcagactggcttgggtagtgccgatcagggtggagacgccggccagaccttccgcggtgtcgatgccaagtgcgcgcgcgtcgtccagcgcctgacgtgcggtgcgtgtctgctccggggtatcggtgagtttggtggtgagcttggcgatggtgctgcgtgtgtgctgcacgtcgccggaggcctcggcaagggccgtgagggccttggctttggtggtgtcttcggtgctgatggctttgccgccaaccgtattgatgacttcggtaagtacttcggatacggtggagacgaatgtggaattgaccgtgcggtccacagtggacgcgcctacgtcggtgactttgggggcgatggcgctggctttttcgttgacgtaatactccagagtgggccgactcttgccgccggtcactacgccggcgagatcgtcggaaaagtctttggggatgatgatggctgcgtatgccttgccggattccacctggtccatggcctcggcttcggtgacgaaggtccagccgagctggtcgttgcttttcagctgcttgacgatttgatcgccgaggttttgcttgccgatgagcgcgttgtcggtgccgtcgtcattgttggcgatggcgacggtgatgcctttggtattgccgtacgggtcccagaagccgacgatgttgtaccacgaatacagtggcgggataaacaccatgccgaacaggatcacccatgcggccggcaccttgaacaggcgcaggaagtcgcgtttgaggaccttgaagatattgcccactgatacctccggagcttggtgttgcttgattgctacgttttccgtagcgatacgttaatcgtagcgctacggttgtagtagcgtaatacggctgccggagattattggggtgattgatgatggttttggcggaataacgccgctgcccagcggcttatcgtgtgtcgctgggcagtgtgcctaattttttgtggctggggtgctgtgtggccgggtgtgctgtgtgtgttggtgtgaggctgccctccatggggcggtaaaaccttcattgggtggtaagtggcccatggggcggtaaaattcccatggggcggtggcttaaaatggctttattccgcggaatgcggttttgggctaaccgccccatggggtaattaccgcctcatgagagagctaccgccccatgggtaaaccgttgtatcagctttcgatggtgccggattgaccatcaatggccgactgctcgttctggctggatgactggtcggagttggagttaccggaagtatcagaacctgtgccggagctgctgccggtgccggactggccatcagtgccttggctggagcgaaaggcgttctggaacttattgacaagatttctggatggtttttggatgtttcctgaaagcgagcgggctcggtgtccggcaatgtagacagacatgtaccggctgtccatcaagttcggcaaaactgcaatcgggtgatagtgtaaggggacgctatgtggggaggaaaccatggttgaattcaaggacgatggcacggccactacccctggcaagccgcgggagaaccgtgacgccgagtccgcagtcgtggctgatctggtggccgtcgaactggacgacgccggcttgaacccgaacgccaagcgattaccgattctggcgcgcatctatggcgcggtcgtgctgctggacggactcgccacattgccgattatggtgatttccatcctctatgccgtgcgcgagattctggatggtcatgtgcacgtcgatgcgatgagcctgactttcatcctgtccgcgattcatgcggttgtgctggtagtcagtgccgcatgcctgattgtgttcggcgtgatgctgctgcgcaatcatcgccggtatgccgcgcgctggacctacgtgctgatgccgttgacgttggccgacggcatgctgtcgctggccctgaccggccttggcttcaacctgctgctgccgctgattcagatgattattctcgtcgtgatttcggtgaccgccgatccctccctgagcgaggaacgccgtttgcagcgcgcgctcaaacgcatggacgatcgcgatgattatgaatcggcggtggcggccggcatgctgggccgcgaccaatccggcaagggctatattgcactggacttcttcaatatcttctggctgtttaccatcgcttcggtgggtggcctgattatggagacgatctaccatatggcgctgtataacggtgaacttcaggaccgcgcgggtttgctgtggggcccgttctcgccgatttacggctgtggtgcggtattggtaaccgtgtgcctgaatcgcctgtggaaggcgaatccgttcttgatcttctgcgcttcggcggtgatcggcggcgcgttcgaatactgcaccagctggttcatggaagtggcgttcggtattaccgcgtgggattacaccggccgttggctgtccatcgacggacgtacttcgggccaattcatgttcttctggggactgattggtgtggtgtgggtcaagtggctgttgccgcgactgctggctctgattaatcgcattccatggaaagtacggtattcgctgactgcggtatgcacggtgctgatggtgatcgacattgccttcacgctgatggccttggattgctggtatgggcgcatggccggccagccgcaggattcaccggtcgcgatgtggttcagcgaacgctacagcgacgcttacatggccaatcgcttccagaccatgcatatcgacccttccaaggccgggcgtatgtgaatggctggcaagtaattacgcttcgcgggcagaaggtgcgtagaacctaagacagccttcgcgtgtgggtggtaagtgggatacactttcaagcgttgaaggaatgattccctccgctgatgtgctgttttgtgacgcgcgtgatgacgatgggacaatcaaacgaaaggcaaggcgcatggccgaagctacagcaaacattggtgtgattggactggccacgatgggctccaatctggcgcgtaatctggcgcaccatggcaacacggtggcgttgttcaaccgtcactactcgcgtaccgagaagctcatgaacgagcatggcgccgaaggcaacttcgtgccggccgaaacgctcgaggaattcgccgcgtccctgaagcgtccgcgtaccgccatcatcatggtcaaggccggtgctccgaccgacgcaactatcgcgcagctggaagaggtgttcgaaccgggcgacatcatcgtcgacggtggcaactccttcttcaaggacaccatcaagcgtgagaaggaagtacgtgccaagggcttccacttcgtgggttgcggcgtgtccggtggtgaggaaggcgcgctcaacggcccgtctctgatgcctggtggcactgcggaatcctggaagaccttgggcccgattcttcagtccatcgccgccaaggtgaacggcgaaccgtgcgtgacccacatcggcaccgatggtgccggtcactttgtcaagatggtgcacaacggcatcgagtatgccgatatgcaggtgattggtgaggcgtatgacattctgcgccgtggactcggcatggataccgaggagattggcgacgtgttcgctgaatggaacaagggcgaccttgactcctacctgatcgagatcaccgctgagattctgcaccacaaggatgccgagaccggcaagccgttcgtggacgtggtcgtggatcatgccggcatgaagggtactggtacttggaccgtgcaggctggtctggaatttggttctcctgtggctgctatcggtgaagccgtgttcactcgtgcactgtcttcgcacggtgagctgcgtgaagacgctcagaaagaaggtctggctggcccgaacaagaccatcgatctggccggagaagacaaggccgcgttcgtcgaggacgtgcgcaaggccctgttcgcttccaaggtcgtggcctatgctcagggcctgaacgagattcaggacggtgctaaggaatacggctgggatatcaacctgtccgaagtggcccgcatttggcgtggcggctgcattattcgcgcccagttcctgctcgaccgcatcaccgaggccttcaagggcgataatttgccggcttccctgttgttcgatccgtacttcgagaagatcatcggcgaatcgcaggatgcatggcgtcgtgtaatcgtgcgtgccgtggaggccggtatcccgaccccggtgttctccagctccctggcgtactacgatggtctgcgctccaagcgtctgcccaccgccctgacccagtcccagcgtgacttcttcggtgcccacacctacggccgcgtcgacaagcccggcgtgttccacaccctctgggcgcaggaaggccagcccgaggaacagcaggcttgagcgtctgcgacaatctgtgggccgggcccctcattcagggtccggcccacaggaggcgccatcacaactcggtgacggtttcttcggtggagaaccaggtgaactcgtccactccgttggcgtaggaggacgggtaatccgggttgttgggccgctcgaagacatgggccagcgattcggctttgccggcaccggcggcgaagaaccatgtacggcgcgagcgggcaatcagcggcgcggtcaacgagacgcgcaacggcggcatcttgggggagtggttcacacccacggtgagcctatcggtaaccttgacctcatcatgacccgggaacagcgacgcatagtgaccgtccggtcccatgccgagaatcatcagatcgatgaccggttccggccccaattcattcaccaactcgcgctcatagtcgctcgcggcatcgtccagcagcgcatcattcgcggcatcggcggcggcgcgaacggaagcgtcatcactatcggcctgatccatcacatcggcgatgtcatcggctgaacgggtatcggccgccatctcatgaatattcgattcaggcagcttgccatccgccaccagctggtcaagcagcaggcgacgggcctccagagcattgcgatcggtgtcgtaagccggcacaaaacgttcgtcgctccaccagaaatgcacgcgcgaccaatcaaccgcatcagccagtggatcgttcagcgccaaacccaacggctgtgcggccgaaccgccagacagcgccacatccacacgtgtgcgatgcgtgccatcaggcaatcgttcggcgagcaaatcgagtagcgccaagacaaaacgttgcgcgccagcctgaatcatcagatctttattcggatacacaatgagttttcgagttgccatgtatggtccttatatggggtatgtgtcgtactttgcaatgtggattgtgttgtcagttgacaacgcataatacgggtggcatgccgggaatccagccatttgcagcaatgaaatgtgttgtcagttgacaacacaatgtacattgtgcgacatcgcatatgtcactttattactccgcggtcatgagcttcggcatcgcatgaggtaggaaacgatgagcaacggcgttggcatggctcgaccacaattgccgaactcatgccaacgccgctgtggcaacggttctaccgacttcagtgacgaatcagatcccagccttcgttgatgacctcggcgtagatctcatcgggatcgatgcggcgcagttcctcggtcagacagtcctcgatggtgcgcatcggcacggacacttcctgcggagtctggccgggcagcgagatcagcgcttggtcctcatacgggcgttccagtgagatcacaccgtcctcacgggtcaggtacacgccggtcacggcctgcgcgtcgggcacgaactcagtttcgactggtacgccgagtttcagacgcagccatgcgcacagcatttccagaggcaggaagtcggccttgccggtcaccttcacggcggtgatgggcaggtgcggcggctgatcgagcatcgaggcgagcattgcgcgccagacggtcagtcgtgtccaggacaagtcgatgtcttccggtgtccaattgcggcgcaaacgctcgatcgtggcctccggattattggagtgcagcgcgtcggtgatgcgactgcgggccatcgcacccatcagatccttggccgggttcgacggcggtgtggtcggccaccacgccactacaggcgcatccggcacaagcagcgggataaccagcgtatccgggtggttgataaggccaccgcgcggacgcaagatgataatctcaccggcaccggcgtccgcgccgaatcgcacttgggcgttcaggttggaatcgttcggatcgttcgggccgtcggtcaaatcgacggccggattatcgcgattcgcgctcacctcggcggccacttcggtctcgttcggttcgccttcgccggactgatcggcaggattggtatccggtactacggcaatcacgcggcacgggtgctcacggctggccgagttcgcgatttccagcgcatgctctaggtccgcgtcctcggtggcgatgagtagcgtcagcacgcggccggtcgccgattcgccgcgctcctcgtgcagctgttcgattttgtgcgcaatctcgcgggtgcgggtgttcggcatatcgatgatcatggcatcctccagtggcggccgtcgcgcgccagcatttcgtcggcctgtgccggaccccacgtaccggcgcggtaggcctgcggctggccaagcgtggaccagaattgttcaatcggatcgaggatctcccagctgaggttcacctcttcggtggtcgggaacaacggcggatcaccgagcagcacgtccagaatcagtcgctcataggcttccggcgagttctcggtgaaggagcggccgtagctgaagtccatgttcacgtcacggacctccatggtagagccgcccggcaccttggctccgaagcgcatggtaacgccctcgtcgggctgcacgcgaatcacgatggcgttcttgccgagttcgcgcacggcggtctgctcgaacggcagatgcggggcgcgcttgaacgccacggcgatttcggttacacgcttgccgaggcgcttgccgcaacgcaggtagaacggcacgccagcccagcggcgggtgtcgatatcgaggcggatggcggcgtacgtttcagtggtgctcttggggtcgatgcctttttcttccaagtagccgaccacttcgtgcgagccctgccagcccttggcgtactgaccgcgcgcggtgttggcggcgaggtccttgggcaggcgcacggcggaaagcaccttggtcttttcggcggtcaggtccttggcggtgaagctcaccggctcctccatggcggtcagagccatgagctgaagcaggtggttctggatgacgtcgcgtgcggcgccgatgccgtcgtaatagccggcgcggccgccgatgccgatgtcctcggccatcgtgatctgcacgtggtccacatagttggcgttccagatcggctcgtacatggcgttggcgaaacgcagggccagcaggttctgcacggtttccttgccgaggtagtggtcgatgcggaacacggagctcgggtcgaacacttcggataccacgctgtcgagttccttggcgctggccagatcatggccgaacggcttctcgatgatcacgcggcgccatgcgccctcggacgagcgcgacaggccggaggcggccaactgcttggcaacctgcgggaaggcgcgcggcggcaccgacatgtagaaggcatggttaccctgcgtgccgcggtcgcggtcaagctcctgcacggtggcgctcagacgctcgaaggcctccggatcgtcgaacgtaccctgcacgaagcggatgccggcggccagattgcgccaagtcgactccttgaacggcgtacggcaatgcgcccggacggcggccttgacgaattcgatgaaccgctcctgtgtccagtctcggcgggcgaagccggtcaggccgaagctcggcggcagtaggccacggttcgccaggtcgtagacggccggcagcagtttcttttgtgccagatcgcccgtgacaccgaaaatgacgaggctgcacgggccggcgatacggggcagtctgaggtcgcgcgaatcgcgcaggggattgctccaattgggggattcactcataatgtacaagggtagccgccggcggctatctatcgctagaggcgatatgcgatttgggctgcgatttgggccacattgcgtgtgctgtgccgtgcgttgggccaatcgcgtacgcaaacgtgtacgcaacgccgtagttgaaatatcccaaaacggtgtgtattttagaagagttgcccctttagctcaacggttagagcagcgtccttttaagtcgtgggttgtgggttcgaatcccacagggggcacaacaaatccttggaatcgcaatggttccaaggattttttgtttcgaccagcctggctcctagagtggtgccccatgtcatgcaccacgattcttgtcggcaaaaatgccagttacgacggttccaccatcatcgcccgcgatgacgattcgggctcgggccgttacgatcccaagcgcttcgtcgccgtcgcccccgacgaccagccgcgccactaccgcagcgtgctgagccatgtcgaaatcgaactaccggacaatccttgccggtacaccatcgcaccgaacgtgctgaataatcgtggcattctggccgaagccggtgccaacgaacacaacgtggcgatgagcgccaccgaaaccatcgctgtcaacgagcgcgtgctcggtgcagacccgatggtcgagttgcggccggctgtcggcgggccggacagcaccgattatcaggccgagcagcccggcggtatcggtgaggaagacatcatcacccttgtgctgccgtacgtcaccaccgcgcgcgagggcgtcgcgcggttgggcgaactgctcgaaacctacggcacctacgaatcgaacggcgtgattatttcggatgcggacgagatctggtacgtcgagaccatcggcggccatcattggatcgcccgccgagtgcccgacgactgctatgccacgatccccaaccagctcggcatcgacgacttcgacctcgccgatgcgttcggcgagcagcgcgaatacctatgcagcgccgacctgcgcgagttcatggccacgcatcaccttgaccgcacaatgggaacgtcggtctcttccaacggccgtcacgtgcatagcgccggattcggaacaaccgttgcccttcccacccgcttcaacccgcgcaaggccttcggcaccgcgacgccgaaggaccatatctacaacacgccgcgtgcctggtacatgcaacgccgcctcaaccccagcgaggactgggattcgccggccgcccgctgcacgcccgaatccgacgacatcccgtggtgccgcgtgccggaagacaaggtgagcctcgaagacgttgatttcctgctgtcctcgcacttcgaaggcacgccgtacgacccgtacggcacgaccggcacggcggaatcgcgccaccgttaccgtccgatcggcgtgaaccgcaccggccatatggtggcgattcaggtccgcccgtatgtgccggcggccaatcgcacggtgatgtgggtatcgttcggctccggtccgttcaccgccgccgcgccgttctacgcgaacgtcaacgacacgcctgcctacctgcgcgacaccacgcccgaagtctccaccggcaacctgtattggacgaaccgcctgatcgccgtcgtggccgacgcgcattggtatgagacgaaccggttcatcgagggctatgcggaaggcgtgcgcgcgttcgggcaccggctcatcgagcgcacggatgagcagttgcttgctcgaagcgatgccgaatcgacgggtacgaatgcatggccgctcgatggcggccacggcgatgagaaggatgtgcagggcgtggcggatgtgctcgaagcggccaacgacgagatggccgactacctgcgcgagcatacaaccaagctgctgaacgacgtgctatacacctccagcaacctgatgcacaacagcttcgcaatgtccgaccgttgggccgagtagcaagacctcggctggggaggtaatagggatgccctgctgataacgcgtcagcagggcaaagccgcaatccgaatcagttgaagccgacgatgtgttcggcgatgagatagccgttgcgcacgatccagcggccggttttaccaggcagattgagcgcgcgggacatcagcttcgagcgcacatccttgccgatggccggagaataggcgtcaatcgcatcccacagctcggttttcttaacgtagttggccggatcgcgcgagagaatcaggaacgccgaggtaacgcatgattcgatcgtcaggaagtgaatcatgtaccggtacagcccctccggcaccgtaccacgttcgggcgtggcctcggtcatcagccgattgacgagccgcagctgatccacacgcttaatcatcacgtcggtctgcacgctctgaccctcgcgcccgatgaagtagtggtagaacggcacgtcgagatactggatgcgcttcacccacgggaacggctggtacgagtaatagaaatcgacgtagaacgtatgctccggcagcttcagcccggaatcgcgcaccacctgcgtgcggaaagtgagcgcatgcatgatgatgtactgcgccagaccgaacttgcccaggtcatcccagccgagcacgcggccggcctccatcacatgacggaagttcaccacgatcttgtggcgcttggtcactttgtcatacacatagttggtcaccagcatgtcgatcggctcgctggcctcacgttgcgcgcgcaacgtggccagaaccgtgtcgatggcctgcgggtcgacccaatcatccgcatccaccaccttgacatacatgccggtcgccgccgtgataccggtgttcaccgcgccgccgtggcctttgttctcctggtgaatcgcgcgcacgacacctggattggtgcgttccagtttgcgcgcgtactccagcgtgccgtctttcgaaccgtcgtccacaatcagcacctcgaggtcgctggtgtcgttcgccgaaagcagcgagttcacgcaacggtcgagataggactccatattgtatgcggggatcacaaaggtgagcgtctttgccgtgctggccatgaaagtcttacgtcctcacatatttagtcgttatgttcagtttcctgttcaaaccgtagcacttcgtctcccgactcggcagagtgttgcgcaacctgtgcccctgaactcacattctgcaaccctgaatcttccctgagcgtgtggtcgaggtccgtctgctctaagggcgatgatgccttgccgtccggggccggtgtttcggcatcgatcccgcgcttggcccggcgctcggcctccttccgggccttgacgccttcaaacaacagctgcggcttggaatcgagccggctcaggccat

SEQ ID NO: 718 - DNA, 12044 bp, Unknown
  R14_15m  MAG No. k141_39223
ctcgatcgtggccacaccattgacgaacgcggtgcgggtggtgcgttcgccgcccttctcgctgggcagatcgtactcatcgcgaatatcgcccacaagctcctcggtcatatcctcaagcgtcacgatgccgtccgtgcctccgtactcgtcgatgaccacggccagatggatgccgcgcttacgcagcagttccaggctcggcagcagcttggaggtgccgggcagggagatgccttcgcgcaccacatcgcgcacgatcttggcgttcggatcgcgcacgtccagtagatcgcgcacatgcacgaagccgatcacgtcgtcgaaatccttgccggtcaccgggtaacgggagtacggctggtcgcgtacgaacgcggcggcctcggccaagggctggtcgccctcgatgaagaccacgtcggcacgcgggcgcatcacctcggcgacgatggtttcggacgcgtcgaacacatcgtccagaatcgtgcgttcgtccttggaaaggttggtgttggagctgaccagcacgcgcagctcgtcgtcggacacctcggactcggtctgctgcgggtcgaagccgagcaggcggacgatgccgttcgtgttcttgccgatgagccagatgatcgggcggcagacggcggcgaaggcgtcgatggcgggcaccacggcgcgcgcgatctgctcggtgcgctgcatggcgatgcgcttgggcaccatctcggagatcacgatggagcagtaggagatgatgagggtcaggatgatgttcaccaggccgccggcgatgccggggtgcacgccccagctttcgaccaccggaatcaggtagggggcgatggaggaggcaccgaacgaggcggacaggaagccggagagcgtcacgccgatttgcacggtggagaggaaggtgttcgggtcacgtgcgattttggcgactttggcgccgcgagcgtcctcctgctccatttgctcgatctgcgagccgcgcagagagaccaatgccaactcggtgccggagaacacggaaccgataacgagaaatacaaaaatcaggaggatattcaaaccaagtgacatggcttcaactctaggggagcggcacgtcaaattggggtgtgctggctgggcagtaagaaactcggcaaagggaagggcattctcatcaccatcgatgagacgcaagcggcctcgcatgatgatttggttgccattgctacagccgtgcagcacgtcattacggatgccgatgaaagtgatacgcctgatgaggataagaagggcgttgtcatcgtatttgccggcttgccgtatatggtcaacgatttgctggataacgaggtaaccacattcctgcgccgtgcgctacgccgcgaattggataacgtgccgcttccagacgtcaagaatgcgttcccggaaacagttgcggattccggcaagaccatcagtggggaagatgcgcttgaagccgctcgccagtctgaaggatacccgtacatggtgcagcttgttggctactacatgtggcaatccgcacaacgtcgaggttcaaatgtcattaccgcggacgacgtgtcgaccggtgtttccgatgcgctgctcgccttcgacgattcaaggacaaactcatccgcccggcaggtcatgggcagctggaatttgcggtgccgcatttggggcagtatttgcagtcgttgtagcaccaaatatagggctgggttcattcatttggtaggttgcgcgttcatttggtgggttgtcggcatggtgaggcgttggaatggcggcatttcaatggtcagtgttggagtgcagtgaccaaatgaacgcataattgacctaatgaatgaagtaagccggttgcgggctagtttcgatccagttctatgagcgccgacgcatcttggccacggcattgctgacgcaaatacgcagcacaatggtgaagacgactaccataatccccagaatgccaatgttgaaccagaactgatccgtggtgtgctcccacagatcatcctttttgaacatcggcaccttggtggggccatacagcagatcgttgagcccgatatccgaggcggcggcggagaagccccaacgtccggggaagatcatgctgaccagctcgaggctgtcgcggccggtgaccggaatcatgccgccggagaacaccaactgggccatgaccagcaccaccagcaatggcatcgtctgttctcccgacttcaccaacgccgagccgacttcgcccaacaatgcggaagtccacgcagtcagccaaatcgccaacaccagttcgggtatgccggaatcagtgaccacaccatggtccgggccgggcttgccgaggctgaccgcagtggtcagaatcgccgcctgcaacaaggtctgcaaacccatcacgatgagtttcgaggcggtgtatgacgtgggcgacaaacccaccgcgcgctcgcggccgtaaatcgctcgctcggagacgatgtctcgcacggacaaagccgatcccataaaacaggcacccagtatgacgagcacaagcagctggttcggctcggtggcggcgtctttgaaatcgggctcacccaagccatgagaaccgggcacaaccagcgacagcagtcctaggagcaatggcagcaacagcaggaagatcagcaatccggggtcggcgatgatcaaatgcagctgacgaatcaccagagtgatggtctgtttgatgcggaatggctttgccggtttctcatgctcggtgtgccgcgtgatggtggactcggcctgcatggtgcgctggcgtgaatcagtaatcgaatacacccgttccggagattcggcgacatcgttgaagatgtcggcccattccttgccgttgaacgcctggctcatctcctgcacggtgccgaagaatgccggatggccgccgggagcgagcatgagcacgttatcgcacaacttgttgatatacgacagtgaatgggtgaccacgataaccacgcggccggcatccgccagttggcgcaacatggtcatcaccgtaagatccagcgccgggtcgaggcccgaggtcggttcgtcgagaatcagcagttcgggttcggtgagtagctcgatagcggtggacacgcgcttgcgttggccgccggacagtctgtcaatgcgattcttacggcgagacgtgagttccagctcattgagcacgttgtcgatgatttcggcgcgctcggccttggttgagccgggcaggcgcagcttggcggcgtattcgagcgccgcgtccacagagagcttgcggtgcaccacgtcgtcctgcggcacgaatccgatacggctgcgcaacagttcgatgttctgatgcacgtcgtatccatcaaacagcacgcgcccgtccgtggggctgttgagcccggcgacgatggaggtgaatgttgatttgccggcgccggaaggtccgattacggcggtgagcgtgcccttggcgaatacggcgttgatgccgtcaagcagccgggtgcctttgcccacggtcagtccgatgttttcggcgataaccgcgtcgttgctgacaaacggcgtgcggtcgcacagcacgccttcatgcacgatcaggtcggtgttgccgacggtgacgacgtcgtcttcccgcagccagatcttcgcgacgcggcggccgttgacgtaagtgccgttggcggagttcaggtcagtgagcaggatgccgctgctggtggtttccagcgagcagtgtttgcgggagaccagataatcgttgatgcgaatcaggcaggcggtatcgcggccgatgacgcctgtggtgtcgtgctcggggctgaaggacccgtgcacgcggttggtggtgagttgggattcgagccttaccgcttgcgtgctgcctgccagaacggtgccggcggcattcgatggggaaggggatgcgcagggagacggagatggtgatgcgggtgataccggcactggcgatactgccgtcggtgccactgctgttgggcggggttgctgttgcaggtgcgcgagggccggggatacgcggtgcggggccagcggggctggcgttggttgcggttgtaccggttgtgccggttgcggtgctggtggtgtgggttgcactactgggcgtgcctgttgcggcgcgagttgcgtgggttgtgccggttgcgctgatggtgccggcggtagcgcaggctgggccacgtttgccgcagggcgtcgcgggggctgtgccggcgtggacggcccgctggttccgacgatgcagacgatggtggcaccttgtgccagcgtcactttggtgctgttcagcagcagtacggaagtggtgtgaatgccgttgatggacagtccgtttgcactacccgtgtcttccaagagccaaccatcgtcggtaaaggtgacgcgagcatgatggtgagatacgtacgggttgtgaatcaccagatcgcaatccggcgcacgcccgatggtcgtggcacgtgcaggattgggggtataggtggcggatccgtagtgaatagtaagggcaggtggcattggttcagacttccgtgttcttcgatctctctgcacacagatgtaccacgaccgcattacccccggtgaacggggtctgactgatggtcagaaactcagcacctcgaccttgccggtgtcgagctggtaacgggcgccgacgatcatcagctggtcggcagccaatgcctgctgaatgatgggggattgttccaccagcgtctcgatggtgtgggccacgtgtacgcgctcgatgtcttcatgcgcgtcgagctcggcttcgcgcgcctgccagacggacatgccggcctggcgcagaataatcgattcggcggcggcgatgtgctcgtcgaggtcgtccatcgcatccgcggcctccagtgagccgtcggcttcggaagtgatggtgtgcatcaggtcgtccagctcctgctcggcggcctcgattgcgccgcagtgctcgtgaccgagcacacagatcaggctgacgtgcagtttcttgaccgcgtactccagcgaggcgataaccgcgctatcgatgagttgcccggcggtgcgcacggtgaacaggtcgcccaggccctgatcaaaaatgatttccggaggtacgcgcgagtccgagcaggagagcaccgcggcatccgggttctggccatcaagcagcgtctggcgggtctccttgtcctgccatgggtggtcgggcttgccctcggcaaagcgccggttgccttgcagcatgcggctccacgttgcgttcgcggttgattcctgttcaaagtctgactgagccatgaaacctccattatcagcggactgctggtacccatagtagcgattggaagtgcggattcgcgactgcgtgcataatctggctttgcccaaagcataatgagaacgctcacgatctcaatcctgtttaagggtgggccgtgatgatagtcaacacaagggctgtggctggtgtgataaggctcatatgttctgtccgtgcgagccctgtgccgccacactacgatgggttctggtaatcgcctgaagaatcctgaaaggaccgaaaatgactcttctgcagcatgaactgaccgatttcaaggtgaacgcattccagaacaacgagttccacgaagtgaccaaggacgatgtgctcggccactggtccctgttcttcttctacccggccgacttcaccttcgtgtgccccaccgagcttgaagacctggccaagaactacgccaagttcaaggaaatcggctgcgagatctactccgtctcctgcgacacccacttcgtgcacaaggcttggcacgacgccaacgagaagatcgccaagatcgagtacccgatgcttgccgacccgaccgccctgctggccaaggatctcgacacctacaacgaggccgatggcgtggccgagcgcggcgacttcatcgtgagccccgagggcaaggtcgtggcctacgaggtcatctcctccaacgtgggccgcaacgccgaggagctgctgcgccgcgtgcaggcctcccagttcgtccacgagcacggcgaccaggtctgccccgccaactggacccctggcgaggaaaccatcgagcccagcctcgacctcgtcggccagctgtgatcgacactgaataggcggtaaccttggctcccctctctgaggggagctgtcgctgaaagcgactagggggagtgctcgcgagagctagcctgatccgatatgcttccctcagtctcactacgacagctcccctcagagaggggagccagtgtatgtaagggagttttcatgactcagaccaacaatctctatgacgtcgtcgtcattggtggcgggccggctggcctgacggccggcctgtacctggcccgcgctcgctaccgcgtgctgattctcgaaaaggacgatttcggcggccagatcactatcaccaacgaagtcgtcaactatccgggcgtgggccgcaccacgggccgcgcactcacccagaccatgcgccagcaggctcaggacttcggtgccgaattcctctccgccgaagccaccggtctcgacgtggatggtgacatcaaaaccgtgcacacctcacgcggcgacctcaagaccttcggcatcctcatcgccaccggcgccagcccgcgcaagctgggcttcgagggcgaggccgagtacgccggccgcggcgtggcctactgcgccacctgcgacggcgagttcttcaccggcaaggaagtactggtggtcggcggcggattcgccgcagccgaggaatccgtgttcctgaccaaatacgcctccaaagtcaccgtgctcgtgcgcgaaccggacttcacctgcgatgccgcagtggccgccgaagccaagaacaacccgaagatcgacgtgcgttatcaggtcgagctgaagggcgtcaccgccggccaaggaggcctgcgagaagcctcgatcctgaaccttgccaccggccagaccgaaacgtggaagcccgccgacgccggcaccttcggcgtcttcgtgttcgccggctatgtgcccgccaccgatttggtgcgcggcgtggtggagctcgacgaccacggttacgtggtcacgcacgactacctcagaacctcggtgccgggcgtgtacgcggccggcgatctgcgcgtcaagaacctgcgccaagtggtcaccgccaccgccgacggtgcgattgccgccgtggaactggagcgttacgccaagcagatgagcgagaaaaccggcttggtgccgccgcgtcccactgcttccgcttatgaggagtccgaggccaaggccgcctccgccgcctcggccgctggcacgacgcccgccccggctcccgccaaacgcagcgccgatgccgcagtcgcagccagcgccgccaagaagcccggcgaactgttctccgccgccatcaagcagcagcttggcgtggtcttcggacgcatgacccgcccggtcacgctcgctctcgaactggacggcactccgctttcggcggaattgcagggtttcatcggcgagatggttgcgctgtccggcggcaagctgaactcggttgccgttgatgccgcagggctgatcacggcggtggatggtgcttctgtgcctacttctttggtggtcggcgaaccgctgtccgtcaccttgccggacggtgccgaactgcccacttatggttcgttggacgattccggccgtgccacgttcgacgtcgccggcgtcctgccgctcgcccgtccgaccgtgcgcatctgcgtgccggctgagggcgacggcaaggccggcaaggacggcaatggttcactggtcttcaccggtctggccttccacggcgtaccttccggccacgagttcaactcgttcgtgcttggcctgtacaatgcggccggtcccggccagccgctgggcgacgacctgatcgaacgcgcgaagtccatcacggacccgctgaacatcatgatcctcgtctcgctcacctgcacgatgtgtccggaaaccgtgcttgcttcccagcgcattgcctccctgagcccggccgtgcgcgccgaagcctacgacgtctcgcacttccccgaactcaaggaccagtacggcgcgatgagcgtgccctgcatcgtcatcacccacgccgacggcacccagcaagtcgaattcggcaaaaagagcatcccccaaatgctcgaactggtcggcgcgtaagccgcacgacctcaggtactcaacagcaacaacaacgattctgctaaaatcgtgacgtacatcgattgatgcgatcgatgcgcccgactccggcagaatcgttgttttgcggcagctcagcctcggtcttcgacggccttcgtggcgtttctgtcgccgaggtacttgaccaggctgatgctgatcagggccacaacgaacaggccggtgattaccgggatgagtgcggcgtagcggtgggcctgatcaggcgcgtgggcaactacgaacgaggccaactggttgccggacagaccggcgaacgcccaggcgctcagcgtcagaccgtgcgtggtggagacggttttggtgccgaagtgctgatcaagcagcacgggcagcgtcgagaaaccgccaccatagcccgcgttgacgaggaacagcatggccagcacggcccacagcagagcgttgtcgatgctgttggtgaagatctgcagcaagcacacggcaatcgacatgatgaagattacctgatagacggtctcgcggcgcttcaggtggtcggagagtgtggagaagcccacgcggccagccgtgttgaacacggagtccacggcgagcaccagtccgatgatgccggagatggcggcggcaaacttggcggggctcaggttggcatactgcgggaaggccctgagcacatcgtgcaggatgtccttctcttggctgatgagggccaggccgcaggtgatgttgatatagaaggctatccagatgccccagaacacgggcttcttgaggattgtcttgcggctgacgtgtgaggtcgcgggatcgtacacccagccggccggacgcttgatgagcaggaagccgacgaacatcatcaccgcgtagaccgcggcgaggatgaagaacatgctgaccaggccaaccgtgccgatgagatattccatcagtgggctggcaatggccttggccaggccgaagccggcgacggcgatgccggtggcgaggcccttgttgtcggcgaaccaaagcatcaggttcttgaccggagtcagataaccgacgcccaggccgatgcccatgatcgcgccatagcagatgaacacgcccggcaggaagttcagggcgatgctcacgcccgtgccggcgaagccgaccacgaagcagaccatggagacgagtgcggatttcttgatgtttttctccaccattggcccggcaaacgcggcggacatgccgaggaagaagatggcgagtgagaagccccattccacggaggcggggctggcgtggagacggtcagcgataagctgcttgaacacgctccagcaatagacggtaccgattgggatatgaatcagcagtgcgggaataatcgcgctggtccaacgattctcggtaaaccttgccatatatggacggatcctttcgtaactggtgtacgatgacctgccgacccgaacgagagtcgtatcgcccatatccacgcacatcacgacggcatgcccccgtgaaccatccgggctgcacgaatcgaatcaaatcgaatcgtgcgaactgcgaacaattcgctaaacatccttggtgtgcatttcatcggcgctgctggctcttgtcgacgccgacaaacagaactataacgctgttatggggttgctgtggctgatttctgtggtcggaagctatgagctttctcacatcgaaaacagttatatgacggtatcggcgtgattgatacgtgacgtctgcccgtggacgcggcatatccctctcggaaaacaatgactccgtcatgtccatttcttggtttgacatgttttcgtttgcagcgtcggtgctcaccacggtgaccgcggcgttcgagtcgccgggcagggcctcgaccgagggtctcatcctcggctgagatgtgggcggtactatggattcttatcgataaggttcgtgatatgcggagatggtaacgatggtgaccttaaaggatgtcggcgaactggccggagtgaccgccaccaccgcctccgcggccctgcgaggcaaggattacgtcaagcccgaaaccacgcaacgcgtgtgtgacgccgcccgcaaactcggctacaaaatcaacctgtctggccggtccctgcgttctgggcggtccgataccatcaccttccttacctcgggcctcgagggcgactatttctcccatctggccatgtgtgtggctgaggaagtgcacaagcgcgactcgcacatgctcatcgaactgtcccggtatcttaccgacgataacgatctgtcgtacacgttttcggacggcatcatcgccatcaatgcgccacgtgcggtcgatatcctgaagcggcacccggccgtcatgctggaaaactacgacaccagcctgcccatcgacaccgtgaacgcgccgagcgacgccggctcacgggcggcaatcgaacaccttatcgcgcgtggctgtgcgcgcatcggcatcgtcggcgacaatcacgatcccaacaatcccaacatcattcccggctcgcgtgatattcgtatgcgggccgccaaggagacgattctcgcggccggactgccgtttgacgagcgccgtgatttcatcaaatcctcgtggtcgattgacggcggtatcgaggccgggcgcggcttggccaagaaaggcaagtgcaagtacgacggtctgtactgcctgaacgacggtattgcgctcggtattctgcgtggtctggcggacgatggcgtaagtgtgccgggcgatgtgcgcgttatcggcttcgacggcctgagccagagcatgtacagcgtgccgactttgaccaccgtggccaccgatttcaagggcatggcggataccgcgctgaccttgcttatgcggcgtatcgagaacctggacgacgagttcttcccgcagaccgtgaatgtgggctataagctcattgagcgcgaatccactgcggcgtagagtctttggccgtgttgagcttcaattgggtgattggactggcaccagcggctgatatcagatatgccgaaagcagcgatgatcggatttaagttgctggagatgacaggatggattgctctttacccctttcaccatcttgcaataattcttacatgtaagaactctctgttaacatgtaagaattattgcaagatggtgaaaggggatgctcatgttgccggccaaagaaagtttgacggttgagttcaagagtgagcagaagcgccctcaatcgcatgatgaaattgttgacaacgtagtggctctagccaataccgaaggcggcacactgtatctcggtattgaagacgatggcactgtgaccggcgtatgtgacgagcatcgcaatatcaatggacttgcggtactaattttcaataagactgttccgcagcttcccgctcgcgtggcgctcttgtatgagaacgaggtgccgatagtcagtattgaggtggataacagtcagcaaatcgtatctaccagtcaggggaagacattgcagcgccggctgaaagcagacggctcgcctgaggtcgttccgctgtttgtttcccaattcattagccgtttatctcagcaacggttctacgatttcagcgcgcaacctgcaccagaggctcggttggatgatttgaatccagactcaaggaacaagttgagaagccgtattcgcagtgccaatgcgcaaaactcgttgttgtcttttactgatgaggatttcgatcgggcacttgagctggttgttgatggcccgtatggattgcagccatctgttgctggtctgctcaccattggttcggttgatgc

SEQ ID NO: 719 - DNA, 55977 bp, Unknown
  R14_15m  MAG No. k141_39776
gccaccggtccagtcataggccacgaaatcaggacgagacagccagtcgaacgccagtaagccggcggcccattcagccgcaccattcttgctcagcttcgccggccagctcagctgaccgcggcacacctcagggtgatgctccttgtaccaattcaccgcgcccggatggaaggattcgatcacgtacgggccgtcatacgcctcaagcaaggcgtggcccttttccatgagctcttcgctacgctcatcccaagccttgttgtcgctgaacttgtattccacaatcagcggagcctggccggccaccacgtccagcacatcggagaacagcggcacatgctggtagtaccccttcggcgcggcggacggcgtgaccaccagcggcgggttcgcgtcggcacccggcaacggttcggccttcaagtcaccggacttgccgttcgggaacagcggaatacgggtcagttcgtcgtacgtcaggtcttcgacgcgacgagggtcgccggccacgcgcagcaaatcggcgtcatggaccacgaccacttgaccgtcgagcgtaagctgcacgtcgagttcgatgccatagccagcctcgcaggcggcggcgaatgcggccagcgagttttcaggagcgatcggaccggtcatatccgcactgccgtagccggccttgacagccatgcgacgggcaagcgacacataatcatcgttttcggcgatggatcgctcagtggtatcggcttgggcgctgaccgaattatccccaccataatcagcgatatcggtatagccgaccaaaccagaacccgcatcgtgcaagccacgatgggcataccataccttcggaatggagggcacgaaattacgacgcttgtcattgaacgtgcgcggggccacggcccacacggcagcaccggcggcggccacgcctgccagcgccacgtttctccagagcttcgacgacattggaatccttcctgttgggctgcctctagcctaacgcttctgccagccattgtggagtggttggatcgtccggtttcagcgcgcggtccaggtggttggcacgcagcggctcccagctgaaatctgccagcagatcggcgggtttgcaagggattggagtgggttgcagacgcagcaaccaggcgcagtatccgatgatttgctcgggggttacgttgcgggcgcgcaaggctcccatatccagcgaacgttcgcgcttggctaaacgccgaccggccgcattgtcgatgagcggcaggtgcgcatactcggggtgctcggcgagaggcttttccgtgttgccgcattccggctcaaagccgccagccaacagacactggcgaatccacatttgcagcgcggtggagcgcagcagatcacggccgcgcacgatatcatcaacatccatatcgaggtcatccacgaccacgaccagttgatagccgaacagtccatcggctcggcgaatcacggaatcgcctacctcgcgggccaaatcgtagtgctgtggactatagacacggtcgttaaagcatgcgacaccatcaacgattccggcatcgccctgctgttccggcggcacggctcccgacagcgcagcggaatcgtcaggcactgtacgttgcttttctcccgctgccggtttcggcatggcgatacggatggaatgctggtcgccgcgagacagacgggcacggacctcgtcgggatggtcgtgcagcaggcggcggcacgtgccagggtacaccatgaagccgtcgccctcgttgggggccgaggcggcgcgaatgtcggcacgcgagcagaaacaggggtacagcacgccctgcgagcgcaggcattcgagagcgtattcatatcgttcagtgtgctgggattggaacatcggttcgccatcccagtcgaggccgagccaatgcaggtcgtccatcatgagctggtccgcaccggcaaccacgcgcggcttgtccacgtcttcgatacgcatcagcatgcgatcgccacgcgaacgggccgagagccatgccgcgagcatggcatacacgttgccgatgtgcatacgccctgatggcgtcggcgcaaatcgtccggtcaccagcgtctctccttctgcgaaaactcagcaccatggtaacgaaaaggctcttctcctcagaggagagccgatacagtgaagctcgccggcccgaactcccctcagtcagcttcgctcagagaggggagccagtgattgtcacttatcttcggtgacgttgtccacgctcacatccggatcgtcggagacgatttggtcgctcgcccaggcggagagctccagatgttcgccgccggtctggtcgacgagcacggtgtcgccatcgtggaccttgccggccagcagcatacgggccagctggtcgcccacttcggtctgtaccaggcggcgcagcggacgagcgccataagccgggtcgtaaccggtgttggccagccattcgcgagccgagtcggtgacgtccagcgtgatgcggcgatcggtcagacgctgggccacgccagccacctggatatccacgatgccgccaagctcctcacgcgtgagcgggtggaacatgacgatgtcgtccagacggttcaggaactccggcttgaagttcatgtggacggcgtccatcacggccttcttcttggcgtcggcgtccatgtcctcgttcacgaggaactgcgagccgaggttggaggtcatgatcaggatcgtgttcttgaagtccacggtcctgccctggccatcggtcaggcggccatcgtcgagcacctgcagcagcacgtcgaagatctccggattggccttctcgacctcgtcgaacagcaccacggaatacgggcggcggcgcacggcctcggtcagctggccgccctgctcgtagcccacgtagcccggagccgcaccgatcaggcgcgagactgaagccttctccatgtattcggacatgtcgatgcggaccatggccttctcgtcgtcgaacaggaagtcggcgagcgccttggccagttcggtcttgcccacaccggtgggaccgaggaacaggaacgatccggtcggacggttcgggtcggagatgccggcacgcgaacggcgcaccgcgtcggacacggcggcgatggcttccttctggccgatcacacgcttgcccaggtagtcctccatatgcagcagcttctcgttctcgccctgcatcaggcggccaacgggaatgccggtccagtcggagacgatctcggccaccgagtcggcgtccacacggtccgggaccatcggctcatcggccgggttggccgcgccggcatcggcagattcggcatccgcgctttccgcggcggcgagttccttctgaatagccggaatctctccgtacagaatcttcgaggcctcagccagatttccctcacgggtgaacttgtccgcctgcacacgcaggtcatcgagcttggcacgcaggtcaccgaccttgttgtggccggcctgctccgcatcccaacgcgccttgaggccgctgagcttctcacgggtgtccgcgagttcggcttgcagcttgcccagacgctccttggatgcaggatcctcagccttcttgagctgcatttcctccatttcaagacgggtcaccttgcgctgcagttcatcgatctcctcaggcgaggagtcgagctccatacgcaggtgggcagccgcctcatcgaccaggtcgatggccttgtccggcagctgacggcccggaatataacggttcgagagggtcgcggcggcaaccagcgcgtcatcgccgattgtcaccttgtggtgcgcctcgtaacgctgcttcaggccacgcaggatggcgatggtgtcttccacgctcggctcgcccacgaacacctgttggaaacggcgttccaatgccggatccttttcgatgttctcgcggtactcgtccagcgtggtcgcgccgatcaggcgcagctcgccacgggccagcataggcttcagcatattaccggcgtccatcgagccttcggccgcacccgcgccgacgatggtgtgaatctcgtcgatgaaggtgatgatctggccgtccgcgttcttgatttcgttgaggacgctcttcaggcgctcctcgaactcgccacggtacttcgagccggccaccatggagcctaggtcaagggagatgagcttcttgccttgcagggtggtgggcacgtcgcccgccacgatacgctgggccaggccttccacgacggcggtcttgccgacgccgggctcgccgatcagcaccgggttgttcttggtacgacgggagaggatctgaatcacgcggcggatttcctgatcacggccgatcaccggatcgagcttgccttccttggcggcggccgtcaggtcggtggagtacttctccagggccttgtacgagccttccgcgtccgggctggtgaccttcgcgccgccacgcacgccgggtacggccttgcgcagggaggctgcggtgacgccgttcttctccaggatttcggccgactggttcggcttgctggccgcgatgccgataagcaggtgctcggtggagacgtattcgtcgcccatctgctgcatttccttctcagcctgggcgatggcggcggtcagctggcggctggcttgcggctgcgaagtgctggagccggatgcgctcggcagtgcgaccaaagcgttacgcacggcggcgccgatggcctgtgggtttccgcccgcggcctcgatgagggagcgcaccacgccgttttcctgacgcagcaacgcatccatgacgtgcagggtctcaacctgcgcgtttcctgcggcggacgcactctgaatcgcgtcgccgacggcctcctgggccatggtggtgaacttctgttccatatcgtattcctccatatcatgcggcccgcgcggagcggctcgcgggcttcgaaagccccgcaagcgccaccgcagaccgcaacttgtcgttgtctgatatggtcaaccgacctggaacccattctattcccaaaacttgagtgcaagtgactcaagttttggattttggtggggagggtgaacagtagccccctctgatgagggagctcacatctatttcaggaggccgacggcagcttcggcggcggataggatttcgccggagaggatggcgttggctacgccttcgatttgcggggtggtccaggtatcgcgtacgtcggggccgatttcgttggcgtactggcgcaccacgcggtatacggcggcgcccgccgcacccggacggtacggcttgcggaagtcgaaggagcggcaggagcacagcagttccacggccagcacgcgcgcaaaggccggaatcgaccggcgcagcttgcgggcggcggcccagcccatcgacacgtgatcttcctgcatggcggagctcggaatcgaatcgaccgaggcgggcacggcgttgcgcttcatttcggagacgatgccggcggcggtgtactgggcgatcatgaaaccggagtccacgcccgggtcaccagccaggaacgccggcaggccgcggttgcgcgccacgtcaaggaagcggtcggtacgacgctcggagatagaggctacgtcggcagtcggaatcgccaggaaatcgagcacataggccagcggcgcgccatggaagttgccgttggactccacacggccgtccagcgtgacgcacgggttgtcgatggcggaggcgagttccacgcccgccacggaggccgcgtattccacggtgtcgcgggcggcgccgtgcacctgcggggtgcagcgcagcgagtaggcgtcctgcacacgcacggtggagcccgggcggccggcctcgatcagaccggagcccttgagcatgcggacgatgttcgcggcggaatcgccttggccgcgatgcggacgcagcgcctgcaagtcggcggcgaacacgcggtcgttgccgagcatgccttccacgctcatcgcggcggcgatgtccgccgtcttgagtagcaggcgcagatcggtgatggccatacacaacatgccgagcatgccgtcggtgccgttgaccagcgccaagccttccttctctttcaaatcgacgggcgtgatgccggccgcacgcagcgcttcgccgccgccgatcttgcggccgtcagcgttgcgggcctcgccttcgcccatcgccaccaaagcgcaggcggcgagcggcgccaaatcaccggagcatccgagcgaaccgtattcgtagaccaccggggtgatgccggcgttcagcatatcggcgtagacctgcgcggtttccgggcgcacaccggtgcgtccggtgcacagggtgctcaggcgcagcaccagcaggccgcgcaccacctcacgctccacttccggtccggcaccggcggcatgtgagcggatcagacttttctgcagctgcgcgcgctgttccttggggatggaagtggaggcgagcgcgccgaatccggtggagataccgtaatgcggcacggtgtcgtcggccaaatgatcgataaccgcgcgacttagcgccatctcatgcttcgattcgtccgaaatcgccactttggcaccgccgcgcgctacggcgataacgtcctcgatgctcaatgccccaacgcctacggtgaccgtctgctctgccatgttttcctacctctctatcgtgccgagctccacttggtattggatatattcatctcgccagcatggcatatcaacgttacgggactgtccacaatatgcaccgccccgcgccagcgccgcgcgaacgctcctatactcacggctggtttgttatgcgcctgaccgccgccggtgctgcggcgggtgcttgtgggataagagaagaacatgatttttcaggccggttcgctgctgctcgttatcatcggtgtctacatactcaaacatgtccacattttcggcgagcgtgattacaaaatcgtgcagggtctggtattcaatctgacgcttccttgtgcgattatcctgtcgttcgccacgaacaagcacgacatgcgcatgctgtggatcgtgttgttcggcttcttcgcctgcgcgattccgctgttcatcgtgtatttcggttctcgcggcgacgagaagaactaccgcgccttccagatgctcaacgcctcgggcctgaacctgggcgcgttctgcctgcctgtggttcagacgttcatgggcccgtccgccggtctgccgatcatcatgctcgatatcggcaacgccaccgtggccacggccgggtcactgaccatcacacgcacgctgctgcatatggatgacaatttcaagtcgctaccgctcatcctgcgtctgcgcaatattgccagggacttcctaagctcgatttccttcgacatctacatgctgatgctggtgttcatgttcctgcacatcacgatcccacagcccatcgttacgctcatcaccccgttcgccaatgcgaacgccttctgcgcgatggccatgatcggactgatgatggagattccgaacaatcgcaaggacaaggtggagttgggcaaggtgattgtctggcgcatggtattcggcgcgattatcgccgtggccgcctggttcctactgccattcgacatgaggattcgcgagatcatcgtgttgggctcgttcgcccctatcacgatcttctcaaccaagttcaccgattcgctaaccggcaacgccaagctcgccggcttctcgctgacagtgacggccatcatcagcttggtggtgatgaccgccctgcacgcacttctgccgggagcgtaaggcgcgttcttggttcccctcagtcagcttctccgcctggacggctcccctcagagaggggatccagaacgagtcacgcccgaacgattacgttgcgcagatcgccgatgccctcgacgtgcacgatggtctcgtctcctgggtcgaggtggccggaggcgttcggggtgccggtcatgatgacgtcaccaggcagcagcgtggagaacgacgaaatcgcggcaatctgctcggggatgccgtgaatcaggttcgcggtggtgccagacgccatcggcacatcctcgccgttcagcgtgaaggaaatcttggcgtccttccagtcgaggtcgtcacgcatcacaatccacgggccaagcgggcaggaggtatcgaaacccttggcgcgcgtccacgtggggtcgatgccctgcaggtcgcgcaacgtcacgtcgttcacgcaggtgaagccgagcacgtaatccatcgcgttttcaacggacacgttcttggcgatacggcccatcaccacggccacttccggctcgaagttcatgtccttggagcaggccgggtacacgatcggatcgtcggggccaatcaccgaggtggacggcttggtgaagatcaccatgtcttccggcgcgtgggcgatttcggagtggccggcctcgtgcatgaactgggcgtgggcctcgtagttcttggccagaccgtagaccttggaggggatgaccggggagagcaggcggatgccgtcgccgtcgaccgggtaccggttgccggtaggcttgacctggtcgccggccagcggatgaccgtcaagttcgatgaggtagtccttgccgtccgtttcgtccttctgcacgaaggcgtagcgcggcgaatcattcaaagaaaaacgtgcgagtctcatgcctgtaagcctactccttggcggttccttccgcagaagcatccgtccaaggagcaagcataccggccttcaatcgaccaaaacgcacgttcactgggattgctacttttcggtccaggttttgtcgtacagcgactggccgctttgcgtgtgcatgatgacgcgcaatgatgccttgccgctggaggtcttgcacatcgagcccagcagattcgcggtggattgataggtgctgtccatagcatccagtgaggaagcgacggtatcgcctagcgaggcgtagctgtcgtcgagcacgtactcgtacaccaaggtgtcaccgtcgacacggtagttgaaggtgatgccggtatctgcaaacgtatccgcttcggattcaatggagtccttgaattccgaatagtcgacgaaatcctgaatcgaatcgtacagcccataatcgccgtcggttagatcgtcatgggtttcgcccaacgtgtcgtccagcgcatcgtcaagattatcttgagctttgctcttatcgctgctatcaccgttgcccgaagaggactgactatagaaggaatcggttttcgcctcatctacagccttgctggtgtacgagacaccgccgacgatcagcgcgatgaccagtattacctgtatcaccatgcccgccgcactgatgatgatgccggcgatggccaagcccttgcccttgccgccctgtttcttaatctggttgaggcccacgatgctcaggatcagaccggggagtgagacaaggaacgagcagataaaaccggcaatagccaggccgttgtacttctggttcgcttcaggcggcacactgccgtaagaaccagaccatcccggctggccgttcggttggccgccttgcatatacgggttatagggcgtttgcggaggcacggccccgccgcccggataccggagcactgacgctgccggagccgtccccggatagggcgaattgggtgctgctggtgcgggcgcaggcgcgggcgctgtcggtgcgggcgcgggcgcagcggcaggagtcactggtggcaaagcctgcgtaggcggtaccggctgattgaccggcgcaagaggctgggtggactgctcggcaggtgtaaacgcctgcgtaggctgctcaacaggagtgaacgcctgagtgggctgttcgcccgctgcgagtgcttgggttggagcattgttggcggcggttcctgcttcccccgtcatcgcatttaacggctcagtcggattggcgtcagctcgctgccccggcacctggccgttcggattggcattcggatcagtcatgacatgcactccttcaactgcatcgcaccccacttgcgagatacgcccctcgtcttacgcgccacattgtgcgttacagacaactgtactcctcgtggcgagccttaagtaccccaggaaatttggcttcccaaaaaacacagaagcctgaaaccggctattgcctcagcaatattcagtcggtttcaagctaaatcgttaatcctctggtgaaacgacggtctacttcttcagcagcggcgcgacctgttcctcgtaggcggtcagggcggtgtcgatcacctggtgcatgtcatagtacttgtaggtgcccaagcggccgccgaacacggtgttcggctcggccgcggccttggcctcgtaccgcgcgtacagggccttgtccgcgtccgtgttcaccgggtagtacggttcgtcgccgcgctcggcgaaacggctgtactcctcccacaccacggtcttgtccgggttctgggcatcgcggcgctccgggttgaagttcttgaactcgatcgcgcgcgtgtacggcacgtccgcgtccgagaagttcatcaccgggcaaccgaaatggtcgccctcatcgtaacggacctccttgaagtccaccgtgcgccacttcaggtcgccaagctcgtaaccgaagtaacggtcgaccggacccgtgtagaccaccggcacgcccgcggcccgcagggccttcttgttgtacggctgggattcgtcgaagaagtccacgcccagcgaaaccgtgatgcgcggatcgtcgatcatgcgttccatccacttggtgtagccgtccgcgggcagaccctcccacgtgtccttgaaatagcggttgtcgtagttgaagcgcaccggcagacgcttgacgatcgacgcgggcagctcggcaggatcggtctgccactgcttgcccgtgtagttcttgatgaacgcctcgtacaggggacggccgatgagctggatgcccttgtcgttgaggttctgcggatcggtgccggccagctcgcccgcctgctcggcgataagcttctgtgcctcggccggcgtgtaacgcgcgtggaagaactgattgatggtgcccaggttgatcggcagcggatagacctcgccgtcatgcgtggcatacacgcgatgcacgtagtcggtgaacgaggtgaaacgattcacgtaatcccacacccgcctgttggacgtgtggaacaggtgcgcgccatacttgtggatctccgcgccggtctcctcatccatatacgagtaggcgttgccgccgatgtggtcacggatatcgataatgcgcacgcgcgcgccggtgtgctccaccgcctgctgcgccaccgtcagaccgaacaggcccgcgccgacaatgactaggtctgggtattgagtagtttccggcatgcgcgcattccctttcataaagtcaatatatcaattattatgttcgatttccgagaaaatatactatgattattcgccatcgcggcgaaacccgccactctcccaatagccagtccaggatgttaacttgcttgatgccggcgtggtctgatgtgacttgatttttgttccgcatttcctctcacttgataggagatgatggaatcatggcaaggggcatccgttacacgagggaattccaggagaaggcgctgcggcttctgggcgagtcacgcgcgaaccattcgtcggagacgaaggccttggcctcggtctcgcagagcctgggcatagccccggagaccctgcgccgttggcgcaacagggccgataggacggtcacggcgcaatccgcgcgcgatgcgcaggcggcggccgagctgaagaggctcagggcggaggtcgcggaactgcgcaaggcgaatgagatactgacgacggcgtcggcttttttcgcggccaggctcgacccgacacggcgttgaaggccgcgtgcatcgacgcgtaccgcggccgtttcgggggtcgggccgatctgccgggtgctgtcggccgggccggactgcggtttcctgaccgcccgcggctaccgcgccttcaagacggggcctctcagccgcatggcggcgcgccgcgaggcattggcgcgtgacatcacgtcgatccacggggacgagttcatgcgcgtgtacgggtaccgcaaggtgtggcgtcagctgctcgaccaaggctgggatcccttggaggccggccgagaccaggtcgcccgcatcatgcgcgaactcggtctgcggggcgttcggggcggccgcaggccggtcaccaccatccccgccagggggacgggcggcaggctcgacctggcggggcgcaagttcgccgcccgcgcgccgaaccggctgcacgtcgccgacatcacctacgtgcggctggcggacggctcgttcgcgtacgcggcgttcgtcaccgacgcatacgccagaagaattgtcggctgggccgtcgcctccacgatgcgcaccggggagctgccgctgcaggcgccggaacaggccatcgcgtgggcgcgcgcccacggcgggacggaggggtgcgtgcaccattccggccacggctcgcagtatataagcctggtgtattccacgcgcgtggaggaatacgggatgctgccgtcgaccggcacggtcggcgactcctacgacaacgcgctggccgaacgcacgaacaacacgtacaagcgcgagctgatttggatcaacaggccgtaccggacggtcggcgagctggaatacgcgaccatgaggttcgtctcgtggtacaactcgaaacgactgcacgcctccctgggctacaggacaccggaacaggccgagaacgagtattatcagaaacaggcggcacaaaccgtctcacaatagaggcggaacaaaaatcaggccacttcagccgccccgctttgttatactgagcaccatccacaacacaaataaaggaaacagacttgactctgcaggctacgcctcttgtatcgattatcataccggtctataacgccgaaaaatatctccgatactgtgttgattccattcttcagcagtcatacaccaatcttgaagttattcttgtggacgatggagctaaagattcatccccatccatttgtgacgactatgcacaatccgattccagagtaacagtaattcaccaacccaatgggggcatcgcgaaagcgcaaaacaccgggctcgacgcagctcacggtgattacatcgcgttcgccgacaacgacgatatcctcgacagccgtaacatcgagctactgttgcacgcattgaaatcaacagacgctgacatgagtaaaggacgctggcgtcaattcggcgtctcgcaattaccgaccatctgtaatgaagccgctcagggcgctgacgaaccacaccacattaccgtatttcgtaacccgctacgggcttatcaatccatattctgcaaaagtctgagaattatcggagaacgtttcggtcgtcatactgaggcgcggtatttcaacgaagcaaactggtgcaggctctacaaacgcgagctgtgggacggactgcgattccccgtcggccattatgcacaagacatccgcatggctggccccttatactctcgtatgtataaagtcgccgatgttgatgcgactttgtactactggcttcaggaacccgactcagtcacgcactcaaaacgcaccccgacattttggcacgataatgtactttccgcagcggagaacttccagttcacccttaatcagggaatagtgccataccgcaattacttcggattgactgcgagtgtccgtgatgaaggacgcgggctgcatcatgcgaacagcagcacaggctctgctcaggcccagttcactatctcagccgaagatataaagaactaccaggacgacgttcaaaacatgaaatctcttattcgacggctggccccgtcacaaaggttcctctgcaagatactgtacttcatccgatcaggagaaaatcttatttacaaccgtcgaatccattccatgaaatgacccaaacgcgcgctcactctggttatggatacacctcttttgtgaagaaaaacatgctggtattcgcaaaatgtcatacttacatgccccgctggtacactctgtaggtatggttgaaagaatactggtcactggagccggcggttatatcggtaggcatgtcgtcaaggcgctgcttgatgatggacaagacgtcatcgcctcggatctccgcttgaacgatgttgatgatcgtgcggaacacatagagaccaatctgtttgaatctggtagcgatatctattccaagcttggaaagccggatgtctgcctgcatatggcttggcgcgacggcttcaagcacaactccgacaatcacatgggtgatttatccgcccattatcgattcatcaagaacatgttggacggaggtcttcctcaaatcgcggttatgggaactatgcacgaagtcggatactgggagggtgccattgacgagcacaccccttgtcatccggcttccatgtacggcatcgcaaaaaatgccctacgtgaggccacgcttatgctcgcacaagaacacaatgcagccgtgcaatggctccgcgcatattacatcgtcggagacgatctacgcggtagttccatcttctccaaactgctgcgagccgcacatgatggcaagccgtccttccccttcacgacgggtaaaaataagtacgactttatcaatgtcgacgaacttgcacggcaaataagcgcagcggtttcccaacgagaggtgaccggtatcatcaactgttgcactggaaagcctatatccttggctgagcgcgttgagcaatacatcaaagacaatgatctcaacatcacactggattatggggcgttccccgatcgtccctatgattcccccggcgtatggggtgacgcgaccaagattcacgagattctagcgacacgatagatcaacaaaacatatgggttggggcgtattccatcgcgttgtaatccgccccaacccatatctgctattagcagcaactcattgagtactacttctcaaccttttggaacatccgcgatacatacgccactactgcatccgtcacgcgcaaaagcatccaagacaagaccgcaataatcaacatatccgccacgaatagtaggtaggcgttggatacgccgaggctgtcaggattgacaatggtgtacacctgcatgatgacttgatgatggactaagaaaatcgcataggaatatttcgatagtgaacctatagccactcgaacgggttgacggtcgaaccactgcgagatccacactaggaacaggaagaaggccacacccaccagtgtgaccgccacgttgcctttcaggatatcggtagactgctgtactgcgagaagcactaccgcagctgcacccaccacatggggcacttttttgataaagcggacaaaatacatcccgaaggcaagttccggcaaccgggtggtcagtaacaaatcagatggcataccttgcgagtccggatacagcacaatcgtcagcacatacaatatcgcgatgataacgccggtaatccaaggatgacgcttcaccccataccgcagcaaagggaatatgacatagaacagcagaataaatcccaggaaccattcgccaagtgtatagaacgtcggtattccggcattagccagataaccatccattccaatcacggagagcagcacactatatttcggtgcctgtgccgcgacgataccgccctggcgcaagaacaggtacacatttgccgcaatgaaagcaatccagaacatggggaagattgatttgcatcgcttccaatagaacctctttagatccagcttctccgcatcctcatgcgaatacatcaatgcagcgccggaaataatgaggaactgagagacaccaagcgaaccgatgtaaataccgaacggagaattcgcaaaaattgggtgttccactaaatatggattattgaaatgcgtgataacaatcaatatcgcagacagtccacgtacccaatctaggtagaatagtctcggcttacgcttcgtgacattaccagtcatgttactcatcctcgtttatgcccaattgcttacgatgcaacttcaccaacgccggtcccagcaccggaacatgtttagtgacgttcttcatcactcgcagtaatgtgttacggaatcgctttccttcagcgatggcaatgcaagtttgctgcaagtcctcacgaatccatggcacagtgatgacctttaccacttctcgcaactcatatgagagattcgtaatctcgatacgtgcataacgatccgagaaaatatacgctgggtaatatccattggcctgtggcacatatccataggcccgctcaatgaagtgtaataacgtaccatctaccttattgggctccggcggaaagtccgtgtattcccatccatggtccagtaagccacgaaatgcttccggacggaaccagaacatagtgcccatcggtgccaccggttctttgtcggcattcaacggaatgtgcatattcagtgtctgttccaagaagtccttggtaccggggaaattcggtccccatgggaacgtgtaccccgggaaatagctggcatggttcggaggagtcggcatagcgatgccgaggcgcggattcctctcgaacaagtcgataacgttggaaacatactccttgctggcaagaatgttctcaaagcacttatacgcgaacccatcaccgatactctgaggagacagctgcgtaaccttcttgtcgtgggcaaaacaaacgtaatcgtactggaacaggtcttccccgcaaccaaccagcagggcactgacatcacgtcctctgttctcaatcaccctgacatcgaagttatatgggaactgcttgcagtattcacgcacagtttccgcgttggcttcggagccaaccgtaatgatgatgtcacagccttcgggcatcgactggatgtagtggaatgtggactccagcaaatccatgtaataaacatgaattgcaagtgctattttcttgccttccggcagaggaacgctcagcgattgcggcaatacataatcaagatgcaggttcttcatcaaatcagcgacgttcatcgtgcgaagcgcgttctgccagatcaagtccacgtcatagtcggtgtggtcccgcaaatattcatataagtccagagcagcgttgcctacggcctgggtcatcacatcacgatacccgtggaagaacgagcgacgtttgaaaatcgggcaacgcttttctgcgaccagtcgtttcgccgcataggtaatggggccgtacgtgaacccttccaagtcggacgtatcgacatatacatcccacttgaaacccttatcggcaaaacgcttggtaaacagggattcatgcaggcccacagaatcgtaatagtcattgatgggaggaatgttatcccagtaatccctgaacgcctggctcgtgtgcaaacttttgcgatatgcatggaaatgcgactgaatgtgttccggaaggtaggggtatgggctacggccaaacggatcatgctcgacacgatggaatttggtgatgccccagaaatccaaatcccgcttgttcattgcttcgaacatttcagagaacggatacaccggtcccatgatggtggcgttgaataatacaatctcatcgaattgttccagcttttgccagccgtaactgtccaaagcggttttgtatgcccatacatcaaaacccttgttctctcgcacaatcagcttactggtgtaccgcagcagtttctcgcgcccggcatcattcaactttccattgcatacaatggtcagggcagagaagtgcggcatgaaaccgtcaagcagcttcagcacatagtcgtccacaaccccctgagcgtcgtaaaagaagaaaattcccagacgattgataggcgtatcagacgtaagaatcatggattgctctattcctcttccaaatgaagtaaacagacacgaggatatcatatgggcccgttatcattactggcatccgtccctcagccagtatgatgaatactgattagctgtaccgtatctggatactggaggaatgatgggtagaatagcgctatgcggggtcttcgatattcccaactacggggaccatctcttccccctagtattgcgcgaagagctctcgcgccgaggatacgccggtaacgtggtgttgttctcaccgttccaagctgaggaaagcttcgtggagaactctaacgtccactcgcttgacgatctcgaacgtatgcatatggaagaaccattttccgcaatcgttgtgggcggaggggagattatccactggcatcgctttgggcaaaaacgcaccttcaacagtaccgattttgaggcttatcctatggataaggtctggctcgtcccttgcttcatgaagatgaagtataatgttccactactgtggaatgcgcccggcattccttttgacttcgatgcggacaaggccctcgcccactacctgttcagtaatatagactatctgagcgtccgcaatgatttctccaagcaggtgctgattgactgcggtataccggatgcagccattcaacgcgtgccggatactggtttctctttgaagaatgtcgccaccgaccaagaactccacgatgcgcgcaaccacgtgttccccggattagcgcattatgcggtgttccactgcaaccgctttatcccggaatccgaaatcaacaatgtcgtggccacgctcaaggaattgcatgacgatggacatgaaatcgtgctgctgccgctggcctatacccatggcgatgaggatatcctccacaccatccacgatgcctgcccattcccctgcctcataccccaacacccgctctctttactggagatcatcggcatcctgtcagactgcgaaatctatgtgggtacaagcctgcatggatccgtaactgcgtccgtattcggccgtaagacggtgagcttcgattaccagcagactaagaagacacgagacctgtaccaccaacttggacgtgacgctttctatgtcactgatggcaatcagcttgcagaaaccgtatcggatgctctgcaaacgcaacaaccggttgatttcttcgatacccaacaacaactcaatcagcatttcgacaaactattcgcactgattacacaggggaacatcgtcactcctaatccttcctcgcaggccacacaattctcggacctggtgcagaaatgctttgatgcagaatatcgatccatcggattgtcacaacgaatcgacgaactggacacggcattggagaaaaacgaaggattcgtgaattacttcaaaccgcgagccgagtatttcgagagcgagttgaacaaacagctgaatcgagtacacgaacttgaggagctccaacagcacccggtgaaaataatattgcagaacatcaagcataagtgaggaacgccaagtgacagcatcaatcaacatggatacaactacaacgactcagagtatcagccaaaatgataatttctcattgactagttactcattacaaggatttttgcaatttcttatgcataattctaagcaaataattatctccatgttgttccttctgcttgcatttggacagaagctttttagcaacactttttccattgatacacagggcatcatccaaaacaatgatgcactctataaatcatggtttgaacttgaacgtttcggcctagtgctgtttaaaaagctgaccggcacctatctctataacaatgcgttagcttcattcaccatggtggtgttctttggcatttccgctatggtatgggcatatctcctatgctcagcttctcatgccacaaagctgcaaccggcatttttcatgattccttatgtcgcttcgcctattttcgccgagatgttgggatttttgctactcggtccggaaatttccatcgctgccacactaactgcgatatctctcatgatgtgggccaatgcagcagccagcaacagtgcaaaacggcgtattttgctagtcatagtctccgttgtgtgcgccacaatcgcgttcacgatgtatcttgccatggtcacgatttttattaccggcactgccatgctctatatattgcagtttggcaatcgtgctcagtgggatgaacggaaaaagtcctcttggatttttttggtgggaagcatactcatcttcggcgcatcgtaccttgcatacaagatactcaatgaaatcgcaatgcatcttgctggcgtgacgaccagcgcctacatatccgatcaatctcgctggggaaaagattcgttcggcacgataatccgcaacatcggtcaccatgcacaagagttgtattccggctccggcatcttttatagtgcactgttttccattgccgcaatagtctttgcagttgtggcagtcgcatgctccattcgcaagcgtatttcggttctcgcagttttggtttctatactgctgcttctcgctccgatgattatgtctgtggtactgggtaccgccccatcagtacgcacagaaatgacctatcctctggcgtttgccttcatgctcatgatgttactctccagattatcgcgcaacacagttcaacaagcaatagcgtggatcctcatcactattgttggatggaaccaagccctcattaccagcagaattttctacaccgaaaatatcgtattcaatcaagatgtgctcaccgtgcaagccattaagaacgacatcgataagctgggactgggtgaatcccccaagcaaccggttgtctttatcggcaatcacacggcaaaatgcaatgatgattgtttcacgccagaacaactcgctctgacgggccgttccatgttggaaatcggattttccactgagcacggtactggcgtgaagcaacaattcataattgatgtactcggggtccactataacggtgcaacgccccagcaaatgaaacaaagcgaaacattggctgaatcaatgcctcactggcccgatccaggaagcgtggcagaaaaagacggcatcattatcgtcaatttctgatcaaccctgaatttcagattttggtttatcgacgcactcaccgcgttcaccgtgctcatcatcgtctgacggcctcgatgcacgcagctccttaatcacgtaaacggtgaatattacggataagaccacatctaggaacgatagtgtcttgaatagcgtattgaaccaaaactgagaaacttcagatatgagtccggcatggtatgccatcacctcattgaggaaggtcaatgcggtgaacgcgagaagatagagcctatccggcaatttattgccgacacaaacggcgataagcagaaacgcgataacaggaatctgatagcgctcatgctgctgagtcgagatgatgaatactgtgttataaaataggcaaaccaataacgtcagaatccgaacgtccagacaacctactgttctcttaatgtaggcaatcagaatggcagtgataagggcacagataagaataatggcgatgttgattttcccggcatcgaggccaaacgggaaatcaacctcttgaagattgacaccaaagcgaacgaagattccccaagtattaaaggcactgagattcaggaaagggtacttccccgatcctccgaggtaaatgcgcagaggaaggctgggaccgcttacaaccataaaaggcaaccatcctaaaagcccgattgccagtccttcaagcgttgcgatcacaatcttccgtaatgggtagaacagtatcacgattgccgcaaagggaaatatgaaataacagaattgaagtttcgtcagacaaccgattgcatagaaggcagaagcccaatagatacgtttcgtcgataccgaataaaagcagaggaaaagcagcagtacgagcaatccgtcgaattggccccaaatggctgcattaaatagcagtgtaggactaaaggtggcgacaacgacagccaaggctttatccatatcggacagtggctgtttcttatcgacaattacatagaccgcaatccccagtatcagattgaatgcaatggggaaaagtttcataaggagaaatgtggaagcgcttgccgagaaatattggagcaccggagtaatcagtctaaaaagtaccggaaccagtggagggtaatccaaggaagggattgaatataaatggaatatattgtcgatcggtgtggttgcccatacatagttgaatgtcattacatcggcaacaccctgatttgagaatgccaacacgacttggaacagccctgaaaagaccaaggaaaaaatcagaatcatgagcagtccgtctactggctgtcttttctttgaaatatgtttcatgcgcttccccttaacggtatctcaatcacagtaatgatttagaagttgactatgacgacgccatctttttccgcaacacttcctggatcaggccagtgaggcattacggaagcatcttgttcgctctgacgtatttgtttattggttggctggttataatgcacgcccagcaccgcaatcatgaactgtttcttgactcccgtgccatgcttagtggaaaaacccacttcgagcagagaacgacctgtgagaccgagttgatcagccggataacaatccggattgcccttggcaacgtgattcccgacgaaaacaactggctctttaggtcgctctccaagacccaattcatctatacgggactttattgcttgtacggtaagcacatcttggttgaagacaacattttctgtgtagaagattctgctcgttatcaatgcctgattccatccaatagcgataatcagaatccaagcaacaattgtgacggcttcgacacgtatggactgcacgtttcttcgtatattgaaaacgataccggagaataaaaccattgtgatgaacgagaaggccagcggatatgtcatttccgtacgaactgagggaatccctcccagtacgaatgacatgatcgtgggagacagcacaatgaggagtactacgaggcaggagaagagcgatattttcttagttatgacatgatatatcgccgtgacaaacacacatagtgcgcaaatggagaatataacgctatagaagataccttctcctgagtataacgccagcacatgcgagcctatgttatgcaatataacgctggacgaatccttaccccaacgcgattggtcgctgatgtatgcattggtcgtcactcctttgaccttcatcgccaaagcgttgagcagcttatacaatgcatatgaaataacgaagataatcacactaccaataagaaatacacgggattcgttcttgtcgtgattctgatatttgctgtcactgtatctcaggacatagagtatggccgttccggtgatgaaaaacgtgaccatagctagatacatggtaaatgaaagcgtggcacatacgattgaggttacaatcaacaacgctgatagttttttgggtctatttgcgttactccacaacattaaggacaacgcaactaagaaactcgccacagatatttcagggccgagcaacagaaaaccgagcatttccgcaaaaataggagaagccacataaggtatcataaagaatgccggttgaagctttgccttggtggtggatccacaaagcaaatacgaccatattaccgctgagatcccaaagaagaccaccatggtgaatgatgccagtgcattattgaactggtaggttccactcagtttcttgaaaactactagcccaaatcgttccagctcgaaccacgatttatacagcgaatcttcattttggatgattccctgtgtatcaatcgagaaggtattgctaaaaagtttttgtccgaatgcgagtaacaagaatagcacggaaacgatgagctgccctgcatagtgcttactgaattgcaacaatccgcacacggaatatacagtcttttcctctgcggtagaggtctctgttgccagtgacatcaacggtctcctcccggtatcttgaagtacctccttagctcaagtatcgtcaaacgctaagaccggcacttgcaattcgattgttcgcagttttggaaacaacggcacgaaattcatccaggcacggaaaagcctcgtcattccccgtaatatcggcaatgccacttacagcattgtttcaatgtgataccttgggcaatgcttggactccagatagattttacctacacattcgccaacaatgcccaatgaaatcataatgaagccaccgataagccatatcgaacacatcagtgacccccatccggccatcgcatgccccaccgttaatgacaccatgacatagacgaatatgacgattccgaccaagaccgataatgcccccccacaccagtcacgaaacttaacggctttgtcgagaacgaggtgatgccctgaatggcaaaggaaatcatttttttcgacgcaacaaggagatcaaacttatgatgaagaacttcggctgtatggcgcaatccttcggcctcgttgtaacaaggcaacacgaaatacacaataggctcgtcacggttttcctcatgtatcgccaattgctcagcatattcagtagacaacgccatatcgctccagactcctagccaaccatactctcacggcgactttgtaatacagtaaccttcactgacctactactatcagttatctattgccgtaaactgtattgcacggtcactcagcacaccctgttcgccattccggtcatttctgatggcaaagtaatagctattgtcatcattcgtgaacgccaggaactcgggcttttcggcatcctcatcggtctgtgcacgcaacgtagcgaaaattcgatattcaccattgttgaacatatccagtggaatcgaatatttcactgtatggtggccgggtacgattggcatgcccttgcactccgtttgcgtgtcgacgtcatagacctgtccgcttctacgggaatcctgcagaacaattcccaaataagcagggatatcctcgttaaactcatactcaatagagaattcaagaggcgtcttgccatccacaacctttggcccatcactagtcacgttgagaatcggcacccgagaattcaacccgttaggatgaacgtatttcttttctcccttggtcttgaagaaatcattgttctgagcattttccaagctgtactggtctgccacattacgaggatcaccagaacaaacaatctccccatcgcttatcagtatggctttgttgcaatacttcttcatcgaatccatgctgtgtgtgaccaggatgaccgttttcgttggatcttccttcacactcttgaagaaagcatcgcacttcttctgaaatgcagcatcaccgaccgctaacacctcatcaagcaccagtatgtctccctgagccttaatggcgaccgagaatgcgagtcttacctgcataccactggaatagttcttcagcttctggtccataaactcgccaagctcggcaaactcaacgatatcgtcgtacatcgcatcgatttccgaacggctgaagcctagcaacgcaccgttcagatacacattctcacgaccggtcagctcaggattgaacccaacaccaagttcgatgaatggtaccagcttgccacgaacatccacggttccctgctcgggcacataaatctgggagataatcttcaataaagtagatttaccggagccatttcggccaacaatgccgaaaaaatcacctcgtcggacatcgaacgtaatgtctcgcaacacatgctgctcggtgtaccctttgattcccttcgtccagttcaggaatgccatcttcaaaccacttgcttgctcggtcggcaaccggaatgacttggctacatgcttgacgctaagaacaactgggctctgacgctccagactcacttcataatcacttttcattgcttacagcacctccgcaaacttggcattgtgcttgcggaatacatgcacacccaccatcaggattaccaaggtcaacacatacggtacgaatggtagccacctgctgttgatatatgtccacactgtcggcacatattccggtgacagcaaattatgacgaatgtccataatgacctgggtactaggattcaacatcaggaacttagaagcccacgcaaaatctggtgcccgctgggcaatcatgctaatcggatagataattggcgtggcatagaacatagcttgcatcagcacttcccaaatgtgggccacatcgcggaagtagacatacaacgtgctcagaatcagagatatccctaatgccaacaaatacaactgcaatatgttaaatggcaccaacagaatacgccacgtataatgcgcgtgggcaaagaaaccaaagcatatgaccaccaccatgttaatgccaagggaaatcatggaccccatggtgttggatgctacgataatgtagttcgggaaatgcaccttacgcaataagtctccgcgatcaacgatgccgcgcataccaacggtggtggcctccgtgaagaaagaccacaagcaagtaccacacagcagggaaatcggaaacgttggggtgccatcagagaatttcaggaaccggacgaacaccacatacattacggcaaatagcatgagcggtttcaataccgaccacgccatgcccaaaaacgagccctggtaccgaagctggaaatcagttttcaccagctcctgaaataccactaatgaatagcggtacttgttcctcacccactgcacaagtttcttcataaacatccaattctagcaagaggcgtatcggcaccagccttggctagcgcaacacccagcttacgctcgtgttccagttttaatagctgctctagaaatctgaagctatgccacctgttccgtgcaatatgtccatccttgtgaagaactcattcttattaaggcatcagaatgctaacatagtactcactgacggctaccatatacactatgactcaagaagtgtttaccccgaaaaacatcattgtgaccggtggctgtggcttcatcggctctaattttgtccactatgtatataacaaccatccggatgtgcacatcacggtgttggacgcactgacatacgccggcaaccttgacaacatcaagtcattgctcggcgaccgcgttgattttgtgcatggcaacatttgcgacgccgagctactggacaagctggtacccggacacgatgcgatcgtgcattacgccgccgagtcgcataacgacaactcaatcgccaacccggagccgttcctgaaaaccaatgtggagggcacgttccgcctgctggaagcggcgcgtaaatacgatgtgcgttatcaccacgtcagcaccgatgaggtctatggtgaccttgcccttgacgaccctcataaattcaccgaggaaacgccctaccacccttctagcccctattcctccacgaaggccagttcggatttgctggtccgtgcatggcaccgcacctttggtgtgcgcatgaccatctccaactgctccaacaactatggtccatatcaacacgtggaaaagttcattccgcgacaaatcaccaatattctggaaggtatacgtcccaagctgtatggtgacggactgaacgtccgtgactggattcacaccgatgatcactcatccgccgtgtggaccatcctcaccaagggtgttttgggagagacctaccttatcggtgccaacggtgagcggaacaatatcaccgtgctgaaggacattcttgaagtcatgggcaaatcccccgatgatttcgatcacgtcaaggatcgtccgggacatgatcgccgttatgcaatcgactctaccaagctccagactgaactcggctggaagccatgtcacaccaatttccaaagcggtctagaacacaccatcaagtggtacaccgacaatcgtgattggtgggagcccgtcaaagctgcaacggaagcaaagtacaagcagcaggggcagtgagcttgttaccgcttgggaaaacgtattggaatcgataagaaagacggaataaatgtcattggaattcgaaaaggaactcaaggtcaccaagaccaatattcctggcctgctggtatttgacttaccggttcacggagataaccgtggatggttcaaggaaaattggcagcgcgcaaagatgacagctctgggacttcctgacttcggtcctgtgcagaacaacattagtttcaatgccaaaaaaggtgtaacgcgcggtatccatgctgagccgtgggacaaatacatctctatcgcaaccggtgagattttcggcgcttgggtagatctgcgccccggcgacagcttcggccaggtcttcaccacccgtctagaccccagcaaggcaatatatgtgccgcgtggagtcggcaatagcttccaggcgttgcaggatggcaccgcttacacctatctggttaacgcccattggagcctcgaacagaagaagacctacacgttcgtcaatctcgctgatccggagctcaacattcagtggcctattccactggtagattccgagcgctcggaggctgacctgcatcatccaatgctgaaagatgccaagcctatggcgcctaagcgcaccatggtattcggcagtaacggcaaactgggccgcgctatccgccgctatgcggaaagccatggcctacacggatttgaatatcacgacaccgatacgttcgatatcgccgatgctaaagcctacgccgccattaactgggacttgtatggcaccatcatcaatgctgcggcattcaccgccgtcgatgaagcggaaacgccgggaggtcgcaaaaatgcatggagaaccaacgttcagggtgtcaagaatctcgcccgcatcgctactgagcatcgcatcacgctagtgcatatctccagtgattacgtattcgatggtaccaaggagctacacaccgaggatgaggaatttgctccgctcggcgtatacggacagaccaaggccgcaggtgacgctctcgtagagaatgtaccccaacactatctgcttcgttccagctgggtgattggagagggacgcaacttcgtgacccgtatgctgggactggctcagaaccacgcccatgccgaggcaccttccgatcagtttggacgcctgacctttactgatgacatggctaacgctatcttccatctgctcgatggcggtgcctcgtatggcacatataacatgaccggttccggacgcatcgcaagctggtatgacattgcacgactcgtcttccaaactgctggagtcgatcccgataccatcaccgctaactccgtagctgagtatgcccgtgaacaccatgctgccatgcgtccgcagaattgctcgctggatctcagcaaactggaagctaccggatatcaccctcaggattgggagcaatctctcacgacttatttggcaaaggagcttgagcagcgatgaaaggcattattctggccgggggatccggcacacgcctatacccccttaccacggttacttccaagcagttattgccggtgtatgacaagccgatgatttattatccgcttagcgtactgatgatggcaggtattcgtgatatcctcatcatttccacgcccaaggatttgcctaactttgagcgtctcctgggagacggttcgcagtatggcgtgaatttcagctacaaggtccagccttccccagacggactcgcccaagccttcattatcggcgaagagttcattgcgggcgaaccatgcgctcttgtgctgggagataatatcttctacggcaatggtttgggaaagacgttgcgtcgagcggcatccgtgaagcatggcgcaacggtattcggctactatgtggacgatccggaacgctatggcgtagtggaattcgataaaaaccacaaagcgatttccattgttgaaaagcctgagcatccagccagcaactacgcggtaacgggactctacttctacgacgagcgcgttaccgaattcgccaaacgagttcgtccttccacccgaggcgaattggagatcaccgatcttaaccagatgtacttggacgatgattcattgacggtgcagacgttgggtcgcggttacgcctggctggataccggaactatggatagcctgtatgaggctggggagtttgtgcgcactgtgcaacgtgcacaaggccttcccatcgccgtagccgaggaaattgcctatgaaaatggctggattactcgggaccagttgcttgaggccgctgaaaagtatggcaaatctccgtatggccagcatctgaagagtgtggcggaaaaccggattatcagtcaaccatctgacgatccacagcaagcctgattgcactctttacagtagttggattctcagataaggcccgacgcagtaatgcgccgggccttatctgaggcttctgctgttttcgtgggttaggttcttggttgtggtaggcgtatgtcgagtccgccgcagcggagcatgatcagggcgatgaggttggtgacgtggtggaagccgtgggccatgcggatggtggccttgatcctgttgtcggacgcctcgagcctggcgttggagtatcccagctggatcgtgcgcaggatgtcgggccggcgccgccggatctttttggcgagttcgacgatctcgggtatgcgcgagtgggacgcccggaacacccagtggttcagttcgccgcgggcctgttcgaccggatgcttgagcagggtcctcaatagttccttgaactgccaggcgcggtagatctggcccttggggtccgtgttcctgatgccgtcgagcgtcgcgaactgccggtccgtcaggtcgccggggttcttcagcacggcgtgtttggcgccgcgcatgcgcttcgtggcattctcgtccccgtcgcgcctcgcctggttccacagacgtttcctgaccttgtccaaggcgccggtcatccaggagacgatgtggaagccgtccaatacgcgttcggcgttcgggcaccaccggccgacgcacgagtcaatccagcgggctccgtcgccggcgacgaccttgatggaggcgcgctgttcgggcgtcaacgccttgaagaacaggtcgaacacgtccccgccgaccccgtcgtgcgcccagatcacccgatgccgctcgtggtcgacgaccacggtcagatacgcgtggcccttcctgtagccggtcccgtccacgccgaccgcggtgagtccgtcgaacggcgaggacatcgacgccttgacacgttccgcgacccgacgggcgacggcgccggcggtcctccacgacacatgaaggaaaccgctgaccgtcttccggttcgcgaccgtcatcagccacgcgcgctccacctcaaaattgctccagcgcctgcagcggcagctcccggaactcctccgtataacgcacacccttagccatgatcccatcatctcctatcaaacgaggggaaaaaacggaacaaaaaccaggtcacatcaaaaccaggccacttcatctttagacaccgaacgcataagtcttagtgtccgcgagtctcccatcagaggtatatacctcataatgagtccaatatataccctttttgggcttccaaatcgcccacggtcccttgaaaccttgcacccatttgctgcgtttaacatcatagattttaatctcataatgggcagccgcattatttgaactttcccccagcaacacatgattgttctgccatcccgcatatgttgccgccacacgcgttgtacctggtgcatacctgaaagcgattgtctgcgatccgataatcttgcgagtccgagagtcacgtgcttccacgtgtagccaatagtctcctaactggtccacccaacctgcccaattggcacctgtccaatcggtgatggttttccaacgtttgctggataaattatacgattgccatttgtaatcaatatccgatgaagggtaatcaaccgatgctccgacagcaatatcttcagagcgataaacccaagttatctgaaccgcgggagtgaattgatagttgccgaacgcattcatatccacgcgaccggaaatgccgttgatggagccgccgctcgtgtactgccagccgcggtcgttcgtggggaacgcggtgtactgcatggtggagccatactgggcgacccaacgggtcttgccgtggatgttggagctgttgagcgcgctgttcaggtagctcgtgtacgagtagatgctcagattgttgtaaccggccgcctgcagtttgccgtaccaggagttcaccataccgtcgtacacgctcggactcgttgggctcttgtgccccgtgtacgtccagttctccagatcgtagaacaccgggtaactcaggtcgcccggattcacgcctgcctggcgcagcaggttcaccacgtccgcaccctcggatgcgccgtcggccgcactttccgcatacgagaagacgtacacgccgaacgggatgccgagacgcttgcattcgctgatgttgcgcttcgcctgcacgtcaaagccattgccccagccgtagctcagacggatgatcgcgccctcgacgcccgcgttcttcaccgcctgccagtcaatcgtgttctgccacgcggacacgtcgatcacgcccttcgcctgctgggcgaacaggttgttgcgcgcgtcgaagaacgcctgcgtgccgttgtacgtgccccagtgcgcaccgtactcgttgttctgcaacgcggcgagcttcaccgacgcgttgtcagcacgcgtcttcgaggagaccgcgttcacgtcaccgccgttcgcagcgaccttctctttcacatccgcggcgctcaccggaatgaacgactcgccatccgtcttcgccaacggatctggctgcttgctctccgtgcccacgatcttcggatcggtgaccgtctcgcccgtctcgatgtccttcaactcgccttccggcgtagccgcatattgctcggacaccaccgtcgcgtcatcggagatctcggcggacaccttgtccggcagctcggcattcggattgtccggcatcgcgtcggcagccgtctcatcggcgaccgtcacaccgttcgcgaccggacgcgtcgcggaagtcgcagaccgcgcctgcgagcgcgcgtcggatgaggttccgtccgaggcggtcgcggaggccgcggaccggacgccggacgcgtccgcgtcggcgttcacatccgcgagcgcgctggccggagtgacgcacaccgcgcccaacatcgccaccgccgcgacggacgtcaccgccgcgatcacgccgcgccccgcaccggacgccgccgcacgcgcacgcaacgcacgcagcatgcccgtcgcacgcgccgcacccgttgcgcccgtcgcgcccgtcgcatccgagccgtcgaaccgcttcttttccaccatgcgtaactccttgacgcacccatcccgcgcacccgcacaccgccacgcgttccgatggtcgaccggactctcacacgcgggaacaggcaggcgggaataggcgtaatcccaacgttttcaaccgcgtctcagtctaatgtgcgcggcggataaggcgggcggagcgaagcggacaaaatcagcggaactccaccgcacattccggcgacggcatcatcctatcttttgagaagatacttcctgtttctgctgcgcggcggcgcagtggcgagaacgactccacgctcaacgagccggctcaacgccttacgcgtcgtaggaaggcctctccccgagcgacggccgatttcgtggacatcaagtggcgtatccgccgacaatacggacagtatcgcggattccgatgccgtaagccccttacggcccccattcggctccccaccatcgaccttctccgctagtgcgtaccgatcagggccgatttcatcggccagccccgcttggaccaatctatgcaaaatcaccctgatgtcgtcggaatccagatacagcgcgacatgcaactgcggaaccgtcatatcgccatgcctcttcaacaagagcaacgccatacgttcatgacgagtcaaggggacgcccacatgatcaagccagtcacggttctcctgctgctccacgccgtagcgtccaagaacgaccgtgaaccgatcgggagtcgcgcggaacacaggttcccccagtgcgtgggatttcatctcgcgaatcaccagagggatgccggagccaccgccttccacggtcacatcattcgcatcgtcatacggtatctgatgaagcagctgcatcaacgtcgcattgcggcagcatgacacgccgctgccgatcgtggccagcgtgaccccaccccataatccgccaggattcgacacctccacccgatcggggtagatgtccacggccacggattctccgaggaattgcgcatcatattccctgtgaaccacggcattggcgacgacctcgcgcagcacctcctttggaatctcgctatcggtacgggctccgacccccacgacgaacgtgggagcccgcaggtttttggcgatggcctccaccgcctgttcgattgcctccggcatattgccgtcgcattgcacacgatccacgaagcgcggaccctcaaccgccgatttctcgacacccggatgtgcgacgacgtcaatgatcagcttgggatagtactgctgcgggtactgtccggcggccaacagtcccgcaagacgcacctctccaaccttgttcaccatattcaatctggtcatgcgctcaagacgagtatcagtcccgcgcagcgtcttggaattacgatgctcagcaagcaccctgtccaccgcctcggcattcaaatcggagacgtcggcttcagggacaaccatacgatccgcggaactgagcgtcagggcatgggtcatttcgaacacttcggttggcgacaatctcaaatccttgtcgtccacacggcggtacccaccggtttgcggccctctcgctgtaagatagcagggtttgtgctgaatgccgttttcatggatgtcgatgaccaggaacgacgagccgttctgctcgcatcgggaaacgtcatactccggaggattcgtcaaccgtgctccttgcggattgccatctcccataccatccatgaactgcgatgcaatatggttggcgtcgaatcccggaacaggcgagaaatccccgtcctcgctgattcccaacaacagcacgccgcccttggtgttggcgaacgcgctcacactctcccacacgctggtgccgatggtccgagcacaggatttcgcctcgaaacgggcatcatcgttgccttggacgcgtagatgttccagcacctcggcgatatcgtcattcgtccacatcatcatcccccttgatcagctcatttgtcttatttgttgcgaccacatggatccaagcgatcgcctccaatcgacttcaaacccacgtctgaaatctcatgataacgtgaagataaatactctatgatgagattatcatgattgcatcatgataagctcatgacatcaagaaccggtttatgacaagcggcacgaacacgcatgccgaacagcaacaggaacctgaacgcaagcatcaacatgtaaataccgaaattgaccgaaccaagaaaatcacgggaaatcacgcacgacattacgcgggtaaactatctatagcacatgagtatgggccgggaccgggatgagacggcttcgaactgagtatgaggatgggaagatgatcttcgagacaaacacgcagaaatcggacatcacgagcgccggtggcgatggttccggcgagcgcgccgaccgccgcgaccagccggtcgtgtatttcgtgcttccctgctacaacgaggcggaagggctcgtgcacacggccgacgtgctggccgccaaagtcgcacatcttaccgaaaccggacggatcagcaaacaaagccgcatcctgttcgtcgatgacggttccaaagacggcacctggagcatcatccgcaatctgcacgaacgcgacgcacacttgttcggcggcgtaaagctctcccacaaccgcggccatcagaacgcgctcctcgccgggctcatgaccgcgcgcgcctacggctgcgacgccgccatctccatggacgccgacctgcaggacgatgtgaacgcggtcgacgggttcatcgacggattctgcaacggcgacgaggttgtctacggagtgcgttccgcacgcaagaaggacacatggttcaagcgcaccaccgccgaagccttctacaaggtgttcgagtggatgggtgccgagacggtacccgaccacgccgattaccgtctcatgagccgcgagacgctcgacgcgctcagcgaataccacgaagtcaacctgttcctacgtggcatcgtgcccacactcggctaccagaccagcaaagtctactacgagcgcggcgaacgcgaagcgggcgaatccaaatacccgttgaagaagatgatcgccttcgcgattcagggcatcacctcgttctccacgaaaccgctgagcttcgtcaccggtgccggactgctgtctatcctggtagcgattggcatgttcgtgtacgtgctcgtctcgctcgggttcggccacgccatcgccggctgggggtccatgatgatctccatctggctcatcggcggactcatcatgctctccctcggcatcgtcggcgaatacgtcggcaaaatttatatggaatccaaacatcgcccccgttaccgcatcgaaaccacactgtaggaggggccggcggccagcggacggcccctcctacagtgcttggattatatctattttgtcctcatcacacgagtcaacgcgtatagcaatgccccctgcttgaggcggaaatgagaccgtcgccgttctcctgccttgctataacgaagaggtgaccattggcaaggtggtgcgcctgcgcagtggccaccggcatcatcctgctcacgtatctggccttgtggctgcaatatacgcccgccgacgcgactggcgtggatggcatgcagttccgctacttcctgccattaagcggcatcttcatgctctgcgcttgcgaatgcgttgccgggttgcggcgacgcgtgggtcacacaagccacacaagccacacaacgccgcgcgactcaagcactgcatccaaatctacagccgtaccttccgcagtagacgctgcacgggcttgagcaccacggtatcggcaatcaccgcaaatagcagcgccgccagcaacgtagcgccaaacatcaacacgctgatacccgcatacgaccatccgtccgtgggcgcgggaatccgcgggccgatcagcaccttggacaggggcgaatgcaccagatagatcgtgtaggagtaccccgccagccaggtgatcgccctgcgcagccgcgccgacgccggatgcacgtcgtaccggaagaacaggaacaccgcggccaccaccaccgcgaaggaaaccgtgagcgtgcggccgacctgaatctgctggccggcgaacaggtacggcgtggcgacggtccaggccagggcgaacggcgccaacgcgtacaaaccatgccgcatccgcgtggacggcggatagtattccagcacgaaaccgagcagatagtagaccagcagtccccgccaaggaaacgactgcaggaacgtcaacgggtatccggcaagattgcagatctgctcggcggcggccacggcggcggccagaccgatcagcagccaggcacccgaccggcctatcgcgcgcaccatcgcggccagaaacggcgtcgccaacacgaaaccggcgagcatgaatacgaaccaatagacggaatcgtcatacccggaaaacagatcaaacaacgttccagacacagcgccgccaaccgaacgatgatcgatcaccaggtaggcgacgaatcccatgccgcccgcgtacagcagatacggcacaatcagcgagataaaacgtttgtagtagtagcgcacgtacggcgcgaggctgctgggatcggcttggccggcaccgccgcctgcccgggcatcagagccagagcccggcagacggcccgctgagtgggtgctcaccggccggtcggcatcgaatgtcaggttgaaccggccggacaccatgatgaacagcggattgcagaccatgaacaacgcgaacagcacggatcgcaccgtttccgcgctgccggcgagggccatcttgacgggcatgtagttgttgatcacgtggacgccgatgaccaggcacatcgccaccacgcgcagcagatcgtagttcacatcgcgcggcttgccggcgacgccggcaccggcggcgtcggaaacggaatcgggcatggtcatcacatggatcctgccagggacttcagatcgaccgggcagctgatctggctcttcagcttatccaaggtgtccaggccggccgagggatcggaggacgcgcccttatgcgcgtcgttcttgccgccgttcgcaccatcggcgccgttcgtatccgccgagcactcatcggtcaccttaccgttggagcccgtctcgacgccatccgcattcaccaccggcgtggttaccacgttcagtggatgtgtggcatcgctgctgacccgaacggtataggcaatcgtcaattcttttccgggctcgatccactgctggttgaacataatgtactgacggtcatacaggctcgcggtgttggtaccccatgaatctatatcagcctgcacagcggtgatttcgccaccgtacggggcggtaagcaccacgcggtacagcatgccaccgagcactggattctccgagccgccattaacgaaatcaggcaacgattcggccttagccttagtcagcgtgttcttcatggtgaaggtgactgtgtattcgtcaccgagctgatcttccgtaaactgacccagctgcgtgttacgcacggctgtcgtgatgcgcttatccagcacgccagaatacagggcgttccggctggccgaggcgtcgccgcaggtttttgtgaccgtggtggaggtcttcagataccaatcctgcttgccttgctgcagctccgaaagatagatgccggtttcaggtacctgactgtcagcagacaactcgccactggccttatcgtcgataagtccggtggcaatcagcgcctcctgctcatccggatcagccatccatagcttgaaatgaccgctagcgctggtatctctgattgccttcaacagcggggatgcggtggaagcattcgcgttgccaagcacatggttcataattgcttgagccgcttcggaaacgaagttgttctgctgctcgaagtccgggtaatccgtgtacaggtctgaagcgaagaacggcaccgtggtggtgccatccagcactcggccgtccgaaagcttgaccttgcctgtggctcccagcaatgcctggaggaatacgggatcgaatgacaatacacccgctacgttctcgtcttcgttgcctttctgatatagccacatgtatttgttcatctgtgccacacgctggaattcggggtcgatggtcgtggtagccgggtactggtcaaaagtgtcgccaaatacctggcgctccttcagcaccgtagcatccattggcttctcaggaatgtcccaaccagaagtggtggcgaaatcaccgatggtaatcgtgcccttatctgccgtgattgcggcgatggtgcccaccatgccgcccgccgaacgcagctcggccgggttctgcaccatcaccagatacgtgcgcttgccgtcctcgccaagcagttgcggtagcaagttaatgaggccatcgtattcgctgagcatcgaatccacggtcttgagcgcagccttttcggattcgagcacggtggccaccttggcgacgctcggagtcggcaccttgttgagcttggtgagctgctgcgagatatccttatgcgcctgcttgacgatatccggcatatccatcagggcgctgacgtccaccgagccattcttcagggagaagccctgcaatcgtttggacaggttcagcagatcagtgaacggaccgttgaccagcgtatccacggaagccagcatttcgcgggcagcggtgatgtcgctgccaaatcgcgaatggtcgcggaagaagtcccactgcgggccgttcagctcctcgttgagatcattggtggcattgaccaactcttgggagatgtccgacagactcttatcgctgccgcagccaagtgccgaattggccagactttcggcggatgtcagcacacgctgcgcatccgtggccattctcgagacggatgccgcgtagagcgtgcccacacaggtgacgctggccagcaacgtcagcagcagtacaaccaccactcgcgcccatatcggtgtacggctgatcagcgaacggccgtcgccacccacgtgctggggagtcttcaggtttacgggacccgtctgatgatttgcagcgctattcgtagatgcggagcgattggattttccgttaccggcatgacggcttctcctacgccccacagccttatggctcgaatgccctgaagtgaatcgcatacttatcctgcccgaaaatctgctcagctcatactcttatccagcggcgcgaggccacgcttccggatgccggactccgggtgaatccggaatcgcagacatgccggagcacacgtgacgccacgcatatctcatgccagtgtaccgatgccaccgaaatagaccgagggtttatcccataccgggtgcaaatcccctcatgaccaccacatcgctgtcagaatgttctcagacttcattgaggggtataacagtattgcgcaagaaaacggtcactaaacgcaacaatagttaaagccgtattgatctgttcggcttaggagaacgggagaggtaattagatgttcgtcctcagcaacgcctggcgggccctgacacgttctaaaggacgtacggccctgaccgcattcatcaccttggcggtcaccttcggcacagtcgccggactggccatcattcaagaagataccaacgcacacaccaccgcgtacgatcagcagaaggccacgttggccattcgcccgactgcggctacgtggaagaaggtctccgctacggactcggcttccaccaagcattacatgacgtggacctcatataccgaatacgccacgctcgtccagtcggccaccaactcgttgaacttcacggttaccgaaaccgtgccggcccgcgtgagcggtgatttgaaggccctggacggcggatcgctgggctcggcctccgatgatgagaccggcggccagctcatttggcgagccttctggaccgaggatgccgccaaggccagcgacctcggtaccttcgaaatcgtggacggcaaggacctgagctacgacaacaagtcctccaacccgaacaccaccggcgcactggtctctgaagcgtttgcctccgccaacaacctgaaggtgggcgatacgctcaaggtggcggccgcctcggacgcccagaccacggccgagctcaaggtgcgcggcatctacaagtacacatccgaatccgccgtcgccaatccggtgacggccgcccgcaaccgcgagaacgcgatcttcaccaactatcagaccttcgccaaggccggactcgacccacagtccaacgacaagaccgcctccggctgggcggtgccggatctggacgtggtgttcgacaccggtgatcccgctacatacaagtccttggtatccaccctcaagaagtccaagctgcccgccaagggatacgaggtgtcttccccttcgctggaatcctacaacgcttctctggagccgctggatacgctatcctcgcgcgcgaagaccggcaccattgcgttggttgccgtgggcggcgtgctgttgctcatcctcgtgctgtcaggcgtgtgggcgcccaagcgtgacgacgagatcggcatggcactggtgtccggcgtcactcgcgggcgtttgggatggcaattcatgctggaagtgttcatcgtcaccctgcccttctacgtgattggtctggtcggaggcgcgttcgccgccaagccgatcggacctgctctggcatccggccataccatcccggtgacatcggacctgatttggaccatggtctggtatggcctgggttcaatcctgatcctggcgattcttgccgccctgcgccttgcgttcttcagcgcgaacaagctgttcgccgccgatggcgactggggcaccgtgagcgagactgaggcgattgaaacggccgaaaccactggcgctgctgagaccgatgaagctgctgaggccaccgctcatgatgccggcgaggccaataagacgaccaccacaaccgacgatgcggaggcacaggcatgagcgacaagaacaacgatcaggaactcgagaagaccactgacgcaacggctgacgaagtgacttctgagactgagacgaacgacgccattgaatccgttccagctgactccgtgcagttcagcgtgaccttcgatgacgttgatgacgaaggcactgttgacgatggtatttacagcgcactggcatctgccgaaaccggagcaactgacgagaccagcgaggccgaagcagacgccatcgcttcggccaacgcatccgccgaagtgaccgagcgcaatgccgcccgcgtcaacgaaacactccgactggccaaaaccgatcacaaagacgcattggccgagcatgcggagcctcagggcaaagcggccgaacccaccatgacgctggcctcgcgtatcgatcgcgtgttggtgggcggcggttccgacgacattctgctcaagacctacccgacctttgccctgaacaaggtgacggtcgccggccccaagggcaaggtcaacatcctcgatggcgcgaatttcttctgctactccggacacgcatacgcgctgctgatcagcgacgaccccgattcgggcatcaccgccgacgccaaacgtcgcgcgctgatgggcgtgatgagcggtttggccacgccggtgtctggcacggtgatgaacaagagcgccaacattgttgagctcgagcccgtggaactgcgcggccaccgtctgggcatcgtaccgcagctgcacgccgtgcaaccgaatctcgacgccgaacaaaacgtgctgtacgccatggatgcgtccaaccgcaacttcctgaagcccaagccggtgatcgcccgcgaactgctggccaaggtcggcttctccgaggccaccagcggcgtggccgtcggcacattgcctttggtgcagcagcgtttggtggccatcgcccgtgcaatcagcaccgaggccgaagtgctgatcctcgacgagccgacacgagggctgaacgcggatgacgaggtgaccgtgttcgccgcgctggccaagctggcgcacaccggcgacccgaagcattgcgttatcgtgctcactgcgtcgcgcgagctcgctgaagcagccgacacactcttcaagatctgatctgtccggcagcaatacacaccagacacaccagcacaggctcttgaagctcacgatgttcggatacataccaaacatcgtgagctttttcgatttcgaggggctgatttgcgtgttccgggaggtctacttccgtttcaaggggctggtcatccgccaaaccccgagtataaacggcttcatgccaacgtcattccgccgtttttacgccgcgtatacttgggcaccagccccttgaaacggaagtagacctcaggaggatgccgaatcagccccttgaaacggagataggcatgtcgagatgtccgaatcagctcctgacaatcctgatgcggctcattgccgcgctaatctgaagataaatctgaccgtacgaggcgaaacctgataatcatgaccggatatattcccacactggagcagatcgacgagttgcaccgcaaaatcgcgccgtccaaggcggcgtacgagctggtgcacacgcattgcgtgattgtggcgaccatcggctgccagatcgtgcgccggcagaacgcgctgttcacgcgccgctgcacattaccgaaggacgcggaggtaccgcccaccgcaggcgtcaccggcggccatgtgccgccgcgtctgctcgacgagcatttagtactcatcggcggactgctgcatgacatcggcacctaccgcgtgttcaagcatgacggctctgacgacgaaccgctcaaattcagcaagaaacgctacattctgcacggtcttaagggctacgagtatctgctcgacgagggcgtggacgagtccatcgcccagttctgccgcaaccataccggcgtgggacttacgcgcgaggatgtggtgcgccaggagctgccattgccaccagccgactatgtgccgatgaatctcgagcaggaagtggtgatgtacgccgacaagttccatagcaagtcagtgccgccgaagttcctgcaggtcgaggcgtatacggcccgagccgagcgatttggcggagagaacaaacaacgatggctggatctggtggccaagtatggcgtgccggatattccggcgttggcggagaagtatgggatgcggatgatttgaggctctaggggcctcccccccccagtcagtctgtcggctgacagcccccctcgtcagagggagcttatgaagctatttcagatggaacggagacggtaggtgccgttgcggttggaggcgatgatcatctggtcgttctccagcacgttccagccttcctgctcatagccggaagaggagaccaccacaccggcggagtcgccgttgtcgtcgcgcagctcacggtagcgcatcacacggtagtcggcggcctgcgcgccacggccatactcgtcgtagatttccacgatgcgcgggctggtcttctcacgaccggcggcgcacagggcgatgagctggtcctcggactgaatcatgcagttgtagctggacttcgggtaggcttggcgcagttcgcgcacggcctgggccacggcctcgtcgagcggaaagccgaaaccgatgtattccagaatcaccgcgaagaagatagcggagtcggaacggccgccggtggagaggagcacgctgtggttcaccgggtatgagcggttggtgacgatgttgcggccattggcgtccgagatatcgccgttgtggatgaagctcaggccgttcgcatagaacgggtgctggttctccatgatgagcggcagattggagcttgccaagcgcaggtgccagatggcaccgcgagacggttcgtcggccagcgtctcaaacgtgctgtcatgacgggccgcgatggtcgacttgtagattcgggtgccggtttccggggtgggtgcgccaccgtcgcgcacgtgcggcgcttcggcgggatcggaaagctgggctacaccccagccatcattgtggatttcagacagttcacggaaatcctcgacattgtcttgccccaacacggcgttgagactcaggttgaaacctgccgtcgcgtatcccagtaatctgcacatggtatttcaacttaccgaaaccgtgcggcgacgtgcggcgaccgttatagccattctttatagagcgcatcagcgccgctgcaaactggtatgttatcgcttctgtttggcggagcgctgaggcttggcggcgggtttgccgttcttggccttgcccttatcgcctttatcgccctgctcagcgaccgcagcggcggcagcggtctcagcgatcttccgctcctcggccgatacggcggcatcgagctcctgtaccaatcgcccaagcccggacgtggtgtccatcgggtcggggacggcggccgggtcggccactgcacgagtcggcgtgggcgtcgtgatggtcttggccgtatcggtgcgcttcagacgcggtgggcggcgggtggagacgaacagcggctgcacctcgaccagcgggttgtaaggtgccagaccgaaccacttaaccggcgagccggccatgcggcggattgcgtacttggcttgcaacgacagggcaccgcgtgcggaaaccttggattccggcatcagggccttgtgaatcagcacgtaacggatggtgccgatgtccggatcggcgtcgaccttggggtaaatcgacttctgcttaggcagttcgccggttttggacaggtcgtgcatgatctggtggatgtacgccgggatggactgcgaaaccttgaagcccaaacggaagcgcacgcggtagatgtagttcgtgccgaagtcctccaccgagtattcacgggtgaacggctcgtcggtggtttccacgctgactgcccaccaagcacgggcacgcttggggtggtcggcgaagatggagaagaagatgtccgtgtcgagtcgcttggtttccgagtcggaggtcaggtacacgatgttgtccgcaaaatacgggatgcggaaatcaccgtgcagcttgtcgagcgcgggtaggaagtcgttgggccgcatgtgacggcgttgcgcacgttcgagcttggtgccctcattccacgtgtacatgacgaacagaatcgcggcggtcagcaacatggtgaaccaaccaccgtgcaggaatttggccatagacgcgatgaagaacatagcctgaatcgccaagaacagcacggtgaacacgatggcaccgacccgcttgccggaatgccataagtagacgccgagcaacacggtggtggtgatcatcgtaatggtcaacgccaggccgtacgcggcggagatgtgttcggaatccttgaagatggcgagcacggcgagcgtggccacgcacaacacgccgttgaccaccggaatgtacagctggccgcgcgtacgggccgggtaacgcacctgcagatggggcatccagttgaggcgggtggcctcggaaaccatggtgaacgcgcccgtgatcagggcctgggaggcgatcacgccggccgaaacagacagaatcacggccaggtaccgcacgttcggggtcatcatctggaagaacgggttgagcgacttcatcgcggtgtattgcgggttatcgctattggccaacatccacgcgccttggccgaagtagttgagcaccagcgcaaccttgatgaatggccaggtgaagtagatgttgccgcgccccacgtggcccatgtcggagtacagcgcctcggcaccggtggtcgagaggaacacggtgcccatcagggcgatgccggcagcattgtccgggctgaacaggaatttgatgccgtacaccgggttcagggccgcgaacacagaccagtcgttagagagattcgtgacgcctacgatggcgaggaagctgaaccagaccagcaccatcgagccgaatactttgccgatgctttcggtgccgcgcgactgcacggagaagagaatcacgatgatcacgacggtaatcatcagggtcaggcttgggttttcgtcgaacaacccttccaatggcggcagggtctgcaagccttcgactgcggaactgatggaaaccgccggggtaagtaccgaatccgcaaggaatgccgcgccgccgagcatggcgggaatcgcgagccatgcgccgtacttgcgaatcaacgagtacagtgcgaagatgccgccttcgccattgttgtcgatgcgcatggcgatgagcacatatttgacggtggtgatcagcgtaatcgaccagaagaccagcgacagcatgccgagcacggcctctcggtttacgctgccaagccctccctgaccggcaaggaaggtctgcgcggtgtagaggggcgaggtgccgatgtcgccgtacaccacgccgagcgccacgatcgccatgccccaggtaaccttgtctgggctggattgcaagcgggcccaccatcggccgaggccgcctttcgaccatgcgctggcgattttctcggcttccttggtttcggcttccctctgcttggcgagtgcctcgcgctcctccttggtgagagtgcggcgggacaccttgggagcgttggtaaaggtgtcggccctcagcagtgcttcttcttcctgtcgggccttggctttggcggcgccagcctgggctgtctgggcctttgaggctttttgggcgcgtgcggtcctttggttcgactcagccatacgttcagtcctccattgaggtggagatcatccccctcgcttatgtcaggtacatcatggtagacctcgttcacaattctgacaaattttacaagtcaacacatcgccgcgacggccgcacacccggccctcacagtccgtatacggcgcgggcggtatcgcgggtgccgcgcgccatatccgcgatggacaggtcgagcgtatcggccatggcccgcaaggtgtaggggatcatgtacggcgcgttggtgcgaccacggtacggcatgggcgtcagatacggcgcgtcggtttcgaccatcgcatggcccagacccacaatccgcagcgattcgcggataccgtcattgcccttgtagctcacggtgccggagaagctcaggtaccatccatgctcgcgcgcaatctcacccatctcgcggtcgccggagtaggagtggaatacggtgcgttcgggcgcgccgtcggccagcagagtctcgatgacttcgcgatgagagtcgcggtcgtgaatctgcatgggcaggcccagttccttggccagggcaatatgcgcgcggaaagcctcgcgctgcagttctttggcaccttcgccggtgcggaagaggtccatgccggtctcgccgatagccaccacttgctcggggtatgtggtggcgaggcgatgtacttcggcgagcgcgtcctcgaaagacgtgtcatggtaaggcttgtatttgagaggcagaccatccggccccggcacaccgcgatgcccgtggagcacggactcattggggtgtattgcgagcgccgcgtgcacattacctggatgatcgagggccatctggacggcggtcatcaggtgcggcagctcgcaaccgcagtcgatgatacccccaatgccgacagattgcgcctgcgccagcaattggtcgacgtcgtacaccgggacttcgggctgccccttctcctgcgcctcatggctcatagcgcgcgcgaaagggattacggaggccacgtgagtgtggttgtcgatggtctgggcgtcgtccggcaatgcttcaggtgccggggcccagctacggtcgcgatggtggtgcttgctcatggtttctcagtgtaggctgtttctcagtgtaggctaccgtcagcaggcgaacacggcgagcgcaaaaaagcacgatggtgacgatgggattggtgatgagactgaacgcctgacgcgtggtgccgtgggtcatgctttctgttggagtgatgttgaggatgccgccgcagtcatcgtcttttcgcgattgcggcggcaatgtcatctacacactcgccgtaagcgatgtgcgcggtgatagatgctcgcggaagaacgccatcattgcgtcattgagttctccgctgccggaatcccacgtcatcaagggatagtcatgaggaatacgcttgccgttgacagaccgcagatcatgcagttcatgatcgcagttcatcgagcgcagtagcatcgttgcgtacagcgcatcgttttccagaaaatcatcggtactggtggaaagccataccggcggatatgcgattgctcgcatcaacgattcagtacgctcatatggtgttccctccaatcgtgatatcaatgttcggaacgctggccgcagcttctcgaacagctcgccggaatccgggtagaacgcatcgaacagatggtcatacaccagcatgccggaggtgaaaccgactaattggaaccgcacatgattactatcaatccccagaagagaggacagctcctcattggtctcacacgccaacaggaacgttcccagcaatgcgccggcagaatcgctgaccaggaacagttgctcagccgacagctgccacccatcaccattgcttactagccatcgcaaggccgtcgacacatcagtcaacatatcgaggaaatcgcccccgggtgccaacgtatagttggggcacaccacggcaaatcctcggctggcaagctgagcggcatacgcattctgaatttccttgaatgaatagaagaacgcgccaccgtgaatgttgaaaataaccggaatatcaccgtcgccgcgcaagtatgcgtccttcggcaggaaaatatccaacttatgagcacgcccgccatcggtcatatagtcgatatccggaaatttcatcacggtatcaggcaacgcactgcggaagtccagtcggcgtacgtcactgaacgcgtagcttgcccgatgctgccgcacataatcgataaagactcgatactcatcatcatcgggtatgtctgcggtatcgggaagatcctcgtcaaggtaagtccatgttcgggccaaccgttcctgtagcggcgtcaaaacacaagttccattcgtagcgtaaatatcattcaacgtgaaaggaattccgttgacagagaacgtcattgcatcgtcgtcttgataacgcatcattccccacctcacttcagctcagccttcatatcctcaagctccacaccgttggtttccggcaggaacttgacgacaaagaagaagcccagcaatgccatcagcgtgtagaagccgtacgtccatccaagaccgataccatcacgcataggaggataaatcgtagtgataaggaagttgaacatccagttcgcggcagtcgccacggcctcccccttggcacggatacgattcgggaaaatttcgctgatgatgacccagacggtgacgttcgtagtggcacagcaaaccaggaagaacgcgtaggtgcatacgatggaaatccacgtccatgtaatcgacaggctcagagtaccgtcagcactcaactgtccttggccgaagccaatggccgtgatgcccaggaataccgtcatcagcaaagttccgtatttcataagattacggcgaccgactcgatcgataagcaccatacctaccaccgtggcaacggcggcgagcgtcgcacgtacaacagcgatggtcagcgacgcctgctcgctgaagcccagcatgttccaaaggctggaatcgtacagcatgatgatattctgcccgttggcctgagccagcagaacgaagatgatggaaatccagaccacgcccttgagaccgaacgtcttaccgcgcagttccctgaaggaaaccttcttctcgttctcctcgctctggaacgacttctggattttggcgatggtcacatcggcattgttgtcaccgatgacgtcaatcagaatggtcttggcctttgcaatctcgcccttcataaccagataacgaggagtctctggcaaagcgaagcataggaagaacatgataacgccaggcagggctgttgtcactagcatccaacgccatgcgtctatccccatccagaatggcatttcagcgccaccggatgccacgacatagatatcgttgacgaccagcgatgcgatgatgcccaatgcgatggccatctgctggaagctggtgaagaagccacgtcttgctgctggagaaatctccgaaatgtaagcggggccgattgccgaggtgaatccgacaccaaggcctccgacgatacggaagatgataaatatggtgaaattcgtcgtcagacctgtcaccaaagaagctgccacaaacaatatggcggcaagttccagtacacgaattcgtcccatacgatcggcgaccacaccggcgaaccatgcgccgaacacacatcccagcaatgcgctggagaccgagaatccgctcatggtactgctgagtgcaaaaccggaatccggactggcgattgcggtcacggcgccgttgatgaccgacgtatcgtatccgaacaggaagccatccacggctccaatcgtacagacggcaattaacttgcctttaagcttgccatcgatttgagactgagtctgttggctcatgatattctcctttgcccgatgatggacctcgtcgcccaccagtaagcccctatcgtattgagtgagcatttgccggtcattggcaacagggctatgagcgtgatacaaatgaatgattttgtgaccgatggttcaaggcgtcgttgtcgtactcggaggaagcctgataacaataaaagcggaggcgaactgacgcagtgcagtcgcccataccgcttaatcacaccaacggagatgcctatgagttttgcaagcataatccatcagcatacggtgatatccgtggacatcggcggcaccaaaatcgccgctggtctcatgtgcgtagacctcgacgaacaaggaagaccgcgggacatgccagcgttgattcgacggtacgtcataccgacgaaagcacgtctcggcggcacctccgtattgcaacgcgtcgttcaagccattcgccagtgtctagacgatggtgagattcctttcccactattggggatcggtgtagcgagcgcaggagtcattgacggcaacggttcggtggtatcagccacttcgttgattcccggttgggccggtattcaactgcaaaccgaattatcggcaacgttcaacgtgcctgccatcgtcatcggagatgttcaggcacacgcccttggtgaagcgcactggggatgcggacgacaataccaatcactactggtcgccgccatcggcaccggtatcggaggcgcgataatcatcgacgggaaactggtacgcggcgcccacggagcctgtggccatatcggccatctgccgcatcccgacgccattggtatatcctgctcatgtggatgtaagggccatgtggagtcaatcgcctcaggtaccggcattgccgataattatcgacgtgctctgcaacagaacggacacaatactctccccaccgacatcaatggacgcactatcgccgaactggccagtcaaggtagtacggaagccgtaaccagtatcactctggccggcacgagtctcggcgatgttcttggcggactaatcaatgcccttgatcccgatgccgtgatcctttctggctccgtagtccattctggagaactatggatgaaatctgtgaaacaaggcatccaaagacagaccttgggcattctttcccgaacaccggttttgacaggaacactcggcggcagagcccctctcatcggagcaacatcagctctgtgcgccgacctcagatcgaataaggagcagaaatatgaatactaacgatacttattcgaaacgtcttattgattcgctccacggcaaactgatagtcagctgtcaagcatatcccggcgagccaatgcggcatcccgaaaccatggcccaagtcgctcaatcagtagaaatcggcggcgctgccgccattcgatgccaaggtcttgccgatatcagcgccatcaaaggccaagtaaaagttccagtcatcggcatatggaaggaaggcgataacggcgtatacatcacgccaacgttacgccacgccagagcctgcattatggcgggagccgacatcgtggcactcgatgctacagatcggccccggccagacggtctaaccctgcagcagaccgcgcggcaactcaaaagcgagggcgcaatactgatggccgactgcggctgcatcgaagactccgatgcagccgtggatgcaggattcgacatcatctccaccacgctggctggatacaccgattcccgcgccaaaacagaaggaccggattacgagctcctcgctcaaatgctggagcggcacccccacgtaccggtgatatgcgagggtaggatacatactccgtccgatgcggccaaagccatagaaatgggtgcctgggcagccgtagtcggtaccgccatcacccaccccatgacgataacgtcatggttcgccgatgcagtaaggtcctgatgacgcacaaaccaacagcgacctaggtaggaggcgatatgcagtacgttaagggcaccaatcaggaactattgaccacatcaccgcagttccctgccctggtcatcgcacatcagggattcgacaaagccaggttgcattggcatgaaggcttcgaggtggtatacgtccgacgctgtcgggccacagtaatgaaaggcacccaacgttcgatgcatcatgccggtgatgtagtactgattcctccacgctgcctgcatagcatcgaacttattcaggatcttcggcaaccatcagctgtaccgcaggcgctttccgtaacgatctcgcccacggagttgctaccgtcatatccgtatattacccaaatccaacaacagctggattacgactacattggcgaaaaagatcatcaacaattgctgaaatgctgcgaacaaatgtttgcggcactgatcagcggcaagcagacacggttccttgaagcgaattcctggttctacaccatgcttaccaacgtttttgactacgccaaaccattggctgcagcgaaccaagaagacaccgcggatgaaaccatactccaggatggacgagtcattagacgaatacgccactacgtgcaacgtcattatcgcgagcccctatccaccgcacaggtgtcgcagaaattcggatattcacgagagcatttttcaaggatattcagcaaatattctggagtgacatttaaagactacgtaacgcgtgtacgtctgctggcggcctgcgatttgctcaccaacacggatatgccaatcaatcaaatcgtccgggaatccggattccccagttctcaaaccatgcgaggattgtttgaccgcgaattcgcatgcacgcccagcgaatatcgctctcgttcgatggaagaataatcgaggcctttcgctgtttgtggtgggtggtttgggtgcggggtgatgccggtcgggtaggttggaggcatggatacctctcacctgttcaccgccgcgcttcggttgcagtcaccttggaaggtggggtccgtggacttccgtgacgccgacggcggccggcaggagctgcacatcatgatcggcttcgagcccggcgcccgcttccattgtcccgggacaggctgccgggaagacgcctgcccggtgcatgacaggcgggggcgtgtgtggcggcatccggacttcttccggtacaaggcgttcatccacgccgccatgccccgcgtcacgtgccccgagcacggggtgaggacggtgcccgccccgtgggccaggcccggcggcgggttcacgctcctgttcgaggcgtgggcggtggaggtggcccgcctcctgcccgccggcacgctcgccgggcaatcggacgagaccgacacccgtttgtggcggtccgtcgcccattgcgtcgacgaggcgaggaggctggaggactacatgggtgtggaggccgtcggcatcgacgggaccggccgcaggggccgcaattacatcaccgtggtcgccgatctcgtggagcacgatgtcatcaacgtgacgccgggcaaggacccgaccacggtcgaacggttctcgcgtgatttcatggaccacaacggggtcccggaatatgtgcgtctggtcgcctgcgacatgagcccgggcttccggaagggcatccgtgagcatctgccccatgcgcggcggatcgtcgacaggttccacgtggccaggcacgccaacgaggccgtcgacaaggccgggaagacggaaggccgctccaacccgctgctcaaacggacc

SEQ ID NO: 720 - DNA, 21966 bp, Unknown
  R14_15m  MAG No. k141_40796
cccaagtagaagcagcatgaaaatggcggaatgacgttgacatgttgccgtttgtacttgggatatgacggatgaacagccccttgaagcagagatagatgttcccgggaggccaaatcagccccttgaaggcgagatcggcatctagacggtagggtcgcccgtggtggaaactcgcgcggcgtagaattgtcgtaggttcgtttctctcgaatacattcgaacaaggaaggccgccatggggaacatcaccgacgatatccggcaacatttcgacaccttcgccgcactgccgttcaccgaggcggacagtctcgccctgtcccagctggcctacgcgcgcatgccggataacgtgccgcgctatcacgaggattcggcggacgtcagcggcatgattcccacggtctccatccgcgacctgctacgcgccgaatgctatgacgccatgttcggcaaggtgtggtcgccgcagatgaacgtcgatctgctgcgtgcgatgggggagagcccgcgctggcgcgacctgcgcgtcggcgaatacgtggatgaattcgacgccgaaaccaccaaacagttctcggcctgcgtcttcgaactgggcgacggcacgctgtacgtggctttccgtggcaccgacagttcgatcgtcgggtggaaggaggatttcacgatggccttccgccgtccggtcgcctcgcaggaggccgctgtgcggtatgtgactgatattgccggccgctgggccgggccgattatggtcggcggccattccaaaggcggcaatctggcggtatacgcggcggccaatgtgcccggcgaaattcagggacgtatcacggccgtgtattcgcacgatggtccaggcttcgatgaggcgttcttcgatgaggatgggtacgcgcgcattgcgccgaaaatccataaatcggtaccgggatcgtcgatcatcggcatgctgtttgagactcgtgagcatgtggaagacggctatacggtggtcagcagcgacggtgccagcatcatgcagcatttcgcattgcactggcaagtcgatcatggccaattcgtacaggctgatggactgacaagtagcgcgcgatacctggcacgcacgatcaacggatggatggcaaaatacgacgacgagcatcgccgcaagttcatcgaaaacctgtttgccatcttcgaggctggcgggtacgtcacgttcggcgaactcacgtcgcacgtgacgcagtcgttgccggtaatgctcgccgcggcccgcagcattgatgttgaagaccgtgacgtgatgattgaggtgcttaagggatttgccgcgacagccgccacgtcggtaatctcggccaagtagccggaggccatcaaactggttttgccagtcagtctcaatagcgcaagagccggcccctgagatactcaggggccggctcttacttccatttccccagcggggttggcttaatcgcagtatatctcactgctgaccatgactgttttacttactcctaatcaatgagcttgtagccgtgatcggcgactacggacttgagcttggtgaggtaggtttcggcggccttggatagcttggaacgctcgttcgtgatccagccgaccagcatcgtttcgtcggtgtcgagcggcacggtgacgatcttctcattgttgaggtcgccgttgtcgatgccggtgcacaccgtgtagccgttgaggccgatgatgaagttcagaatcgtggcgcggtcggtcacgttgatctgcttgggggagtattccggccagactgcctcctcatagaagtagaacgagccttcctcgccctgttcgtactggatgaacggatagggcttcagatcctccatggtgatgatctttttggcggccaatgggttgtcccgtgagatgaacacgtgcaggggggcgcggaagagcggatggaattcaaggtgtttctcgcgcaggagtttaccgatcacgtccttattgaagtcggacaggtagatgatgccgatctcggactgcatgttcgccacctggttgatgatgtcacgtgtacgggtctcacggatcgtgaactcgtattcgtcggacttgatggagttgatcatctccacgaacgcctcgacggcgaacatgtagtgctgggtggagacctggcacagctgcttgcgcggcttggcatgcttgtaacgctcttcgagcaggtcggcctgatcgagcacctggcgggcgtaggtcaggaattccgcgccatccacggtcagggcgatgccctgcgaggagcgggtgaagatctcgatgcccagctcgttctccaattccttgaccgacgagctcagggccggctgggagacgtacagggcatgggaggcctcgttcatcgagccgcactcgacgatcttgacgatgtatttcagctgcagcagtgtcataaagtctatttatatcgctagggatggtcgccacacgggtttataacctcatcaatccactatggcgacacaatatgagacgcctcgcatatcgcggacgctgtgtaacgggatatgcgccacattggtaacctaatggcatcgacacgagcgggaagggccaagcgtgagggttgtcaaagtgctgatgctgtgcggtctgaccgtcggctgcctgggatccgtgttcggctccaaggccgcggccggcttcgctcggaacctgaggcaggaccagtacgatgccatccagaccttctccttctccagcatcgaccgcttctccacgccgagcctgatgaccaggctcggcgccgacgtgatgaacatccagaacgccttcatgatgattctgcgcatggtgccgcgtgccgcgtcgttgaagtgctcaccgaacagtgcgacatgccggtcgccaaacggccggtcaccgtcgtcaaggacgggtccatagacttcaactgccgcgacgcaatatttggcgacttacaggcgtacgccgagttcggcgagcgattcgcgcgcctgcgacgcgttctcgaagaggatgctgtggatgccgacctcgttggcgccgacgatgttcttggcggtgtcgtcgaagaacacgcagcgctcggccgtgagaccgaagcgggtcaggaccagctcgtagatgtcggcgttcggcttgtgcatcttctccacgccggagaccacggtgccctgcagcagctgttcgaggcgcgggtacttctcgaaggccaggtggaaggtctcatgcgaccagttggtcagaccccatacgccgtagccgtgggccttcaaatccgccagcagttcgaccatgcccggcagcgtgcggggcagcgcgtccgcgtagtggccgatgtagaacttgaagatgtcggcgagttcctggccttgttcgcgtaccacatccgggtagatgtccgcgaaatcctcgccggcgtccatgcggtcctcgtagtggaagaagccgcaggggtcgtcgtcggcgcagatgcgttccacgatttcatcggggaatcggccttcaaggcatgcgcgggtgttccagtccagcagcacgccgcagaagtcgaaaatcacgtcggtgatgggggagttggccatgatggttccttgtgtgtttgggtcgttgggtggggtctgcgatttagtgtacggggtttgtgtataggtcggggtatgtggagtttgaggcttatgtttctctccctccgtctcggctttgccgagacacctccctcgtcagagggaggtcaacaaggttatgcgacggcgtcggcgatggcttcggggatggcgtggatcacgtcgccggccacgattgggtggccgagcgtcatgaagcgctggcgatgctcgcggccgatcagttccggctcctgccagccctgctgctcggattcggaggcgatcgccgccgccaggccatgcaggtaggcggccgaggccacggtctcgcccgtggtggccacgtcatcctgctgggcgagtagggcgccggtcagaccggccagtacgtcgcccgcgccggcggtgcccagccaggccggcgcactgcccgacgcatagacatggtcctcatccaccacgatggtcaccgcgcccttcagcaatacggtggcaccggtgagctcgtgggcgcgcttcgcgctggccaacgggttcagccgcacgtcgtcggcggtgtacggctcgtgcgaatcggcatgctccgcggtgctggcggtggtttcgaaccggttgagcagtttcgccatctcgccggcatgtggcgtgatcaccacctggccgggcacacgctccggcagcaggtcgagtgcgccggcatccaccacgattggcggcatgtcgtaggcgtccttgttctcatcctcgctgccgagcgcgtaatgcttgagcaatgcggcgatggtgtcccgctgcatatcgccgtcggcgccctcgacgctagcctcgggcacgccggaccccacgacccaggactgcacatgtcccttgccgatcacggcttccggcagtgcggtgagcaccatgttctgcgcgcgctccgggcccagataccggaccatgccggtgttcgcgcgggcggcggcgctggtggtgagcacggcggcaccggggtagcgctgcgagccggtcaccagaccaaccacgccccgggagtatttggaatcctcgaaccgggggagacggaccgcgtcggacgcgaacgaattatccaccacctcgacgtccggatccttgtcgtcgatatcgaatccgaaatcgaacaactcgatacggccgcaggcgaacgtggcgggcggcagcaccgcgcacggcttcatcgcgccgaacgtgaccgtgaccgtggccggaatgtacgggccgggcagagaaccatcgttcacaccgacgccggatggcgtatccacagcaagtaccagcggaaaatcgcctgacgactcatggttcggcagggcgggctcatcgggagactcgccgtcgagaccaagggcggaggcgagcgcggcgggaatgccgcgtagcgagccttgaatgccgatgccggtcatcgcgtcgatgatcagatgcgatttcctggccacggcgatggcggtctgcaatcgctcaccggcctcaccggcggaaaacccggacgcgcaaccgggaatatcggctgccgggtcaagcaccagcaccttgccgccggcgcgcacgagcgcggcgaatccggcctcatgcagcgaccggcccacggcgatggcagtgacgttcgcgccctcctgggccagcgcggcggccgcgaacagaccatcgccaccattgtctccggccccggccagcagcacgatcgacgtgtcctccagcgccagatcctcgtcgtccagcatgccggccgccatgtgggccgcggcctgggcggccatgcgcatcagcggcacgcctttgtccagcaggggtcgctccatggcccggaccgtatcggagtcataggcgctgtgcagcagcagttcgcgatgatcggcgtcttcggtgtattccatggcaacccctttcttgtgtttgttacttgcggcccgtgtttacaggccgtacacctcgtgggcgaacttttcgagcacgaggatcgaacgcttgactttctcggtgtcgatgcagtaggccatgcggaagtatccgggcacgccgaagctgtcggacggcacgaggatcaggtcgtattccttggccttcatgcagaacgccacggcgtcgtcctccaacgccttggggaagatgtagaacgtgccgccggggcgcaccacgtcgaagccgatgccggtgagcgcatcgtagagcaggttcatgttcgtctcgtagacgttgaggtcggcggtctggtcgatgaccttggccacgcccagctgaatcgagctcggcgggcagttgtggccggtgccgcgcgagatttggcccatcatcggcacgagcaggtcggcgtcggtggctgcggggttcaccgcgacgtagccgatgcgttcgcccggcaggctcagcgacttcgaccacgagtagcaggtcagcgagttcgcatagaagctggccgggtagggctgggtggctccgtcgaacacgatttcgcggtaaggttcgtcgctgatcaggaagatgtcgtggccgtactcggcctgcttggcggtcaggatcgcggccagacgcttgagcgtgtccgccgaatacaccgcgccggacgggttgttcggggtgttgatgagcgcggcctgcacgttcgggttgagcgcggcctcgaacgcctcgaagttgatctggaagttctcggtgtcggccggcacgatggtcagcttggcgccgatgcccttgacgtacggctggtattcggggaagtagggggcgaaggtgatgatctcgtcgcccggcttggtcaccgcgcgcatcgcgtgggacagcgcgcccgccgcgcccgtggtcgggaagatatggttgccggtgtatgccatgccgaaacgttcgttgaggttttcggcgatcgcgtccttgacggacgggatgccgagcgagggggagtagccgtggatggccgcaggatcgccgttttcgtagaggtcgaccatggcgtcggtgaaggatttcggagccggcaccgagggattgccaaggctgtaatcgaacacgttctggtagccgatttcagcaccgcggctcgtggcgtactcgctcagcccgcgaatcacggacttgccgccaagcatggccttgtattcctcattgatcatggctgttctcctcgcatggttgtactggtatgcaccacgctactactatcgcggccggtttgcgccatttgccgcgccgtacctaagccggctgttctatttgttctattagtggagtttgaaccggcatatacccttgcaataaagccatttgtaggtctgaggctttccggggttgcttgtctcatagattttcggcctcttgatatttgcggttgatagctgtgatgtgtgtgggcgatggctgttgaggcatcatggggatctcttcgactgtccgccgtcgccatgccgccatgatgcctacagaaagtcgagttgcgtatttccgccaagcagggtggtgaccggtggggggcgatcggtgggggtgaccgacacccgctataggcagcaggcagccgcacacatcccaatatctgtgggacggcagacgagtcaatcgtttgtcgtccgcgccgtccctcaagagcgcgggatggcagacaagtcaaccgtttaacgtccgtagcgtcccacaccgacgactgtagaaaccgcggaataacgccgattctcgctgcagctccatgattatgcacaaccgttcatagcgagcgctgtgggacggcgggcggaaaacggccgaatccgcgtgccgtcccacacctcgtacaatccgcgttttgggaaagcatcaccgtaaggctgacgcgcatccgcatccacagcaggagccttaccggccgtaatcccgcactcgattattttttctgacaggaaatcgaacccgaaacactaacccatgcccgccccaccgcaaacagcgaataaccaaaaaaatgcatgatctatccttggtgccgaataatgagagcctgactgtagtggctacgggtagctatatcggagaaggattcgatcagaagcgtttcgacacgcttctgcttgccgctccggtctcgtttgagggtactctctcgcaatatgtagggcgacttcatcgcgagaatgatggcaagaccgaggttcgtgtctatgattacatcgacgtgaccgtgcctttatccgctgtcatgtatcgaaaacggctgaaggcatacgcaaatcaaggatattcggtaaatcctgaccatactgagaaaatggacatgctcagtgcaaaggcggaagcgttgcgcgcttgcatgacggccgcgacgcagggcgaagatgctgcggatgcgttgctcgacacccggtctgacggattattcgaaggcggtatcgttacagccacgaattatgcagagatactccgcaaggatattgccggttgcgcacgttccctgattatctcggctgaatatgtatcacaacagggactcagcgcaattgacgatgaattgctccgactggccgacaggaaagcgctcatcgaagtctatgtccgtttgccggcgactgctgcggtggcaaccagaacacgaatagaacggaatattaatcggctgcgtgctattgggtgcattgtccggaccgtcgaatcgtgttccgattttgccataatcgatgacggattgatttggtttggaggcatccctttacttggcaatccaaggagtgacgactgtgcacttcgattcaaagatatgaaaatcggcgagaatctagcagatggactgaaacgacggtcgtcctgagtcaatattcagttaagataatcgcgcagtacgagggcgtgattgatatgcgggtccttggcggcatagagcagggtcacgtcgggatgctccgcgcagatgtggcgcagattgtccacggcggcattggcgtcgagctcggcgatgtaacgcatgcggaattccgcgaatttggcggggtcatggccgaaccatttgcgcaggaggggagagggagcgacgtccttcagccacaggtccaacgccgcacgctctttcgtcatgccgcgaggccacaggcgatccaccagcacccgatacccgtccgacgcagtcggctcttcatatatacgtttgattgcaatacccatacgccccatgattggcgtgcgcttgccggaagtcaaggggagacgcgatccatctacccgttcgatttctgggtgttctgtctaaggccttgtgctatgacagctagcgattcagcagcttttggtgatatcgtccaaccggaccgccttgcccctgtcgaaggtgttcaaagtgagatcgacgggtttggtcttgatgaacgctgacagcgcggtgtgcggcgggttgtcgatcaagtgggtgatgggggcaatcgcctcttcgacgctgacgcccacaatggcgtaaatggcacgcgccagcagcttcatcagtggcgaatcgaaactgttcaatgcctcattgctgcgcacggcccaagggttgaacaacacatagtggatgcggcctccggtctgctgttggttttccgcgaagagcactcccagcagatcgttcagacgactcgtacagatagtcgcgcaatgctagaacgtgattgatgtgcacccttcattgacggtctctcaattgatctcctgcgattcatgccgtataaggaagttctcgaccaaggcgatcatcgtgtctttctccgcaggtgcggacagtgcaatcatcagcgtcatcgccgccaaggcattaccctccacaagcaggggagtcatcgtcgcccagtatactgttgccgttcaggaaatacacgaacagtgcggcggcacaacgtttattgccgtcggagaacgggtgatccttgacaacttgatacagcaggttcgcggctttctcctgggtggaacggtacagttcttcgcctccgaacgtctggtagagtcctgcgacgattccttggaacgaaccgttgcgttccctcccgaacagatcggattgcgtgtagaacggcatcgaccggatgaacagcatcgcgtcctcataggtcaagacccactgggactcgtcgcccttgggtatagggacattgcctgtgtcatagtcgttaagcagcacaagactcggcaaatatcgttccaagatctctgcggtgccagcaatttccggttcggtggacctcgatagcaccttgacgacggcgtgaagtgcgtcaagccgcttgtgattgatggtgtaaccatcaacgagatgctgcttcagaactgagttggcccatcgccggaaattagatgccttccttggatttgacgcggtatccgaccgacaggatcatatccaagttgtaatgctcgacttggtatgtcttaccgtcagatgcagttgtcgcaaattttgcgacaactgaaaatccattgagctcttccctcaatgcattgccgatatgcttgccgattgttttgatatcgcggccaaacagcaaggccaattgctttctgttaagccacaccgtatcctcgtccaccttcacatcgaggtgcacggtgtggtccgcgctctcgtactgccggtcgagaaccgggtggcaagggcggccaccaccagtatagtcaccacaccggcgcacaggatgccggcgatggaggccacatccgaagcgatgtccgcacctgcggccggcagcagtgtgccggaagcgtagtcgaagcgcgcgatgtacaggatgtagagagcgaccgtcaccaccgtctgcaatgccacgtacacggcgtagataccaaacagggcaaggattttcgcattgatgatcgtggcgcggtccagatccttgtacaggaacatgcggccggaggccacgggcgtatagatggcaccagccaccagataggccatgaccaccatcggcagcatcaagcatgttctgtacgacgaactcgccagcgaggaaatccagcacactcaccgaaccggtctttccgctgactttcatgaaatcggagttgaacaggttcacggccggcagaatcagtatgaatgacggcggccggatccaaagccgcgaccgccgcacgtttcgcgacaccgagcggccggccaagctcgataaccgtgatccgcttctgttcgccggcgaattcgtccgcaagccggccgcctttgatgaacaggaatcgcccgcacaactcctgcaattcgttgagctgatggctggagatgagcatggcgatgctgcggtcgcggtacggccaaagtcccacaagttcaagcaccgggcggattgggaggcgcgagcggtgggtcggacgattacagtgtgagccgaatacgttcatgaatcatcgaatcacaaggcgaggcggcccgcaagtattcgagagtcgccagttcggtcgatttcaatgacaatggtgtggacgattacgcggatatcgtggcgggtgcgcgcaaggacgccgaaaaccatccggcttacgattccggctactatcagggcggctatccgccggccgattgcggggcgtgcaccgtacgtgattcacaacatggcgcagcggcagcgcgaaaacgactacttcgccttcaagaagtacatgacggtcaccgggcactaccgtttcgacgcttcgaaagtgctgtagagcgtactcagggcttggcggtgacggtcggagcggcgtcggcattgccggctttggctccggctgtatcagctgaatcggtgccggccgcactggcgttagcactatcgtcagcgttggcaccgccggctttggccttggcatcagccgcgctcccgccatcgatcaccagtcgcagataatcgcggtcggcggacttgcggcgcggcacgaaccgactgatgatggagtttttcttgccgcggttcttcacgtacaggaagccgaacacggagaacacgaccgcgccgatgaagttgacgataagatcctccatcgtatcgatcagaccgatgtcgaggtagccgccgaggcccaagtcttggccattgaccgtgacctgggtgatgtcgttgatgcgaatcgcatggttggtgtgcgtggggtcgagcatcaccgagctgatggaatgcacgatggcgtctttctgcatgtcgaatccgaacaactggtccatgccgaattcgaagaactcccagatcacgccgatggtcatggagaagcagaaggagacgatcgccagatacaggggcgaaagctcgaacttcacccggtcggaccggttgagcaggtcgaccagcgagaagccgatcgccgcggcgaggaagccgttcatcgtgtgcaacaccgtgtcccagaacgggaagatctcatagaacgaactgatctcgccaagaatctcggacgagaacacgaacaccagcacgatgacttccagcaccgaaggcagctcgatgcggaactgcacctggatgaacgccggcgccaacagcaacagcaacgtcaggatgcacaggaacacattttcgtagtcgccgttaaagaactggagtattgccatggcgagcaccagcatgcgcagcaccacatagaccgcgaatgagcttttgtgttcgcggatttccatgcctacggctcggctcatggtcttccagcgtacgcgccaggacggtttgcgttgtgcgtcgtgctgttgtgaccgtttccgggtcattcttgcctctttctcgcattgttctcgcgccagtctatccgaacctgcttacaggcaatcggcaagaacgggcgatagtctggccgcatgaaccgaatggaaaccgatgctgcctcgattgtggaccgcacgaatcatgtggcgatgctcgatagggccattgtgccggcggcacgccaccgcgtgtgctgattgcagtgctcgccgtgctgctgtaccgccgtatgggcatgattacaccgctgatcgtggctcatggcatgtatgacgtctccgccgccatgaccaatctgaccggaatcgccggctcctcatggccactggtcgtagggctggcaatcatggccatgccggtggtttgggctatcgtgaggtgtgcgagataggctttgtaccggttggcagcaaatcaaaccagcgagacaacggaatgaacgaagcgaaaggaacggtatctgatgactccgattgaattgtcaacccgacgccgggttacgggactgacttcggatgagttcgccaggctgttcgtctctttgcaacgcgatgtggacggcgaagccgcgcattggagcgccacggacgtcgaatcctgggagctggtcggcccgccggtgaccgccgaacagcatcttatcgacacgttcgccgcggccaacgaattcgtggccacgcttgcggaccgtctgtaccacacgatcatgccagtcacggaagaatcggtcatcaccgcatacgctgatgacctcacattctgggcatcgcatccggaccttggcggagtgccgtgcgcattatggaacatcgccgcactgcaggcggccgaatgggcccgcaaggaaaccggcatcgcctgtgaactagacgtgcgcgaaccgctggtgtgacagctgagctcaaacatgggcgtaggtaacggcatggtttgaggactatggtgttgcgttaccggtcggaaaggatatgatggtggggcgtcatagcaaaaaagcgcgtggacagtcgaggagacatgcgcgaaagccctccgtttggagtgaaattcgcggctatctgctgacggtgatcgcggtgatgctggtcgtgttgctgggacgcaccttcgtgttcaacgtctatgtgattccatcccgtagcatggaagacacgttgcaaatcggcgaccgcgtatttgcctcgcgattgactccgagactctttgcactgcaccgtggcgacatcatcgtgttcaaagatcccgcagactggatggagggggagcagcttcccaccaatctgatgtcgataatcgacagcaatcgttacctaatcaaacgtgtcatcggtctgcccggcgataccgtcgcctgcaagggatccggggagcccatcacggtcaacggcaaacccattgatgaaagcgcttatcttaagtccggcgtgaatccaagcgacagtcctttttccgtaaccgttactgacggcaacgtgttcgtgcttggtgataatcgctccaattccagagattctcgataccatcttgacgacggcaacaatgggctagtgccatacgacgatatccaaggtgtggcgttgttccgcttctggccatttacgagaatcggcttgctcaattgagtttggcgtgaatacgcaagttgacatgtgtcgcacggcccggtgcatcctgcagtcggaccgtttccggaaccctccccccgaaatctgacgacccccctgtctcacagctatcgtacagctccgatacgggaaacgtgcgggtgattccataacgactacgtacttcaggaagtgacgtgtatcacattatggtcatgtgttcagtgccgcagataggcgaagtttattcatgagccgaatagggccggtgaagcgggctctcactgcgttcataatacggcatatcgtgaacggcgttatcatcacagtcaggccgaattaaaggaggctcggtcatggtcgccgcatccacggcattcagcccgtcaagcacgatgacggccagtttggtggaatcgactggcctgcccagtgccgctattcctgtgcacgaggatggtaacaacggcaacggcgacagtagtgccgatggcagcggcgacgacggcggcatggtcagatcgctgagcctgtggaactacttcaccatgggattcggcgcaatcatcggcaccgtatgggtgctgctggtcggtgactggatgatcgtcggcggtggcccggtcgaggcgatgatcgccttcgtgctgggcgccgtgtttctgctgccgatcggctcgacgtccggcgcggttaccatggtcgggtcgtttctgcccggagtgctggtgatgacgccgctcttctacaccggtttcgacacgattccgcagagtgccgaagaggcaagcgaaggccttgactggaagaagttcggtatggtcatctcagcttcgctgctggccgccggcttaatcatcattggcctgcaggtgctgccgttctccccggccgcgctcaaacccacatcatgggcaatcgtggcggtgtggatttgctgggtctggcattgcgttggatcagtgcacgttcacggcgcgaatagcggtgcgccggtaggtcgcgagccgttcagtcacgcgcgacccaaagcgtatcgaggtcgtcggcctcggtcgcctttttgcgcttgcgtacccactgttgcaggaaatacgccccatagcaggccacgatgaacacgagctcggccacgagcgcgaaccgttgctccacgtcgaaaatcaccaatacgaacgatgcggtgcacaggatgaacgccgcccaagacacgtacggatagccgggcgtgcggtatttgagttcgctggtggaatggccggactccagccaacggcgacggaacacgatctggcagtaggcgatggcgatccacaccaccacggcggacaggccggaaagcgccaccagcaccaggtacacagtcgaggcggcgatcacggaagacaggagcgccagcaggccaccggccatcgcggcgcacaaggcgagcatcggcacgccgcgacggttcgttttggcgaaccagcgcggaatcatgccttcgttgcccatcgaccacaccatgcgcgtggaggcgtacaggccggaattcgaggcggaaagcacggccgtcagcaccacgaaattcatgatgtcgcccgcataggggatgccgatgctgttgaagacgagcacgaacgggctttcgcccacgccggcctggcgccacgggatcagcgcgcacatcacggtgatcgagccgatgaagaacagcgccagacgccacagggtggtgtggatggctttcggcacggcggtttgtgggtccctcgtctcaccggcggtcacgccgatgagttcggtgccggagaacgcgaagttgacggtcagaatcgtggcgaacaccggcatgaagccgttggggaagacgccgtccttgatgagattgccgaacatcggggcatgttggtagccggcgaccgggatgacgccgaagatggcgagcgatccgatgacgatgaacgcgcagatggcgaacaccttgatggaggcgaaccagaactccgcctcggcgaagaaacgcaccgacaaggcgttcagggtgaagatgagtgtgatgcacgccgcgctccacgcccatgtgggactgttcgggaaccagcgctgcatgagcagcccggcggcggtgaactcggatccgagcgccaccgtccatgtgagccagtactggatcgcgatcacgaagccggtgccagggccgatgaacttctcggcatacacatggaaggagccggtcaccggcatggccacggacagttcgccgagcgtgagcatgaccaggtagacgatcagcgcgccgatgccatacgccagaatggtgccgatggggcccgcctgctggatggtgtatccggagctcaggaacaggccggtgccgatcacgccgcccaacgagatcatctgcaggtggcgggattccatgccgcgcttcaggttggtatgtagggcgtgctcgtctttgccatcatgtggcgactcggactggctggtttgcgctggttggttcatctgttccgaatggcttcgacggccatccgtctgaatctgcggttcctgttgcgaggacggcgactgtgccgccgtgtcggtgtcgggctgactcatgtttctctctttgccatgcgtgcgttccataggcgtcgtcgtgacggcccggaatagtatacccgcactgaggatatagctgcgctgcatgatgctgagtcaaaatcagccccttgaaacggagataggcactcgcagcggctacttcaccttctggatacgcagcacgaacacggcagcgcacacggccatgacgatggagatggcgagcgccggcgtgtaggtgccggtcgtggtcttgaccacggaggtgatggtgggaccgactgcttggccgagcgtggtggccaagctgaggatgccgaggtccttgtcggcctcttccttgttcggcaacacgtcgacgttgagtgcctggtcgatggccgagtacacgccatagccgaagccggcgatgcccgcgtacaggtacatgcccgtgacactcggcatgatccacggggtgcggcgtcccatcttggaacgcgtgtggtcggagaggttgccgaacacgaggttggaaaccaggcccacgatggcggtgaccgagttcaacgtgccgactgccgcatccgggttagcgacgccgatgtccttgaacagctgggggacagcacggtggccaccacgtacaggccgctgctccacagaagaccgaaagccagaaacccgacagtaaatcgaatgttgtttgttttgatgtgtccttggacatgtctgtcagcctcctatggtgattgcgtgccgttgtatggcgattgtagaccggctcggattggcggttttccgggctttttgagcgtgtggtagcggccgtatgcgccgttgcaatattgatcttgtgaacggttaatgtactcggggctcaaaatatattccagcgtgcggcgcgtttcttgtttaaggaaagtaattcggaaaaagcagccgatgcatggccgtatcaggtgccgtatggcgagcggcgtatggaaaaagtgtctccgtcgggttgtgatgagcatctatgagattgacgtatgtcgtcaggggcagcaattggcatgtgcgggtggatttgcggctcaaagatggggaaacgatatgagactggcgatggcgcagatggcgatgaccgacaatatcgacgaaaacgccgatagggccttggcctactacgatcaggccggcgaggccggtgccgatctgttgttcttccctgagatacagttctccccgttcttcccccagtatgagaaccgcgatgcgtcgcgatatctcatggacctgaccgaccgtcacgtcgccgcattacagaacaaggccctgcaacacggcatgtacgtttcaccgaacctgtacctcaaagcccaggacggccacaactacgacgcttcgctatggatcaacgaacaaggccatatcagcggcatctcgaccatggtgcacatcctgcaagcagaacgcttctatgaatgcgactattatgcgccctcccaagacggattccacgtgttcgagaccccgttcggcaagatcggcatcgtcatctgcttcgaccgtcacatgccggaaagcatccgtacatgcgcattgcgcggtgccgatctggtcatcatcccgactgcgaacatcagcgccgaaccagtggagatgttcctgtgggagattcgcgtccaggtcatgcagaaccaggtggccatcgccatgtgcaaccgggtcggcaaggagggcgatgtggcgttcgccggccaatcagtggtggtggacccgtacggcaacgtcgtcagcgagactgatgaccatgaacagttgattatcaccgacatcgatctcacacaaaccgcagcagcgcgcaaacagcgaccattcctgaaactgcgccggcccgaatggtacgcctgacaagaacgaaccaacgtcagcccggaatcttctcgacgatggtgttcaaggtgtcgaaagtctcatcgatttggtccactacctgcttgccctggttgaccatttcggtgatctgttccgtgcggggttgcggcagcgcataaatcgacgtcttgacgcgcttcaagaccgcaccggcgtcggacaggtcctgcttgatggaagcgattttgggaatggaaagcgtgccgtcggagaagttcatgccggatagcggctcttcgatatcgaagtccaccagcgtgccctgcgcggcactgtcgattttgggcagggtgttggtcgcggcgtcggcggccgcgcccagcatgccgcgcaccgccttcacgtccgaaccgtaatatggcacgtattcggcggcctgccatggcatgccttgggtttcatcacgcgccgtgacgatgtgactgccagcgctgcccatctgctcaagcgcttgcttgaagtcgccctgcccgacggattactgcgcttcggccgtatattcgcccgcctgctgcgcctcgccgatcacccgttgcgccgactgccagaacagccagccggaaatgcccgacgccagcagagccgcgaccagtatcgtgagaattacggtgccgatatgtttgcgcttagccataggaccaatgtaccttttgtcccatctagcgccattgtgttctggcctttagtccatcaaagtgtccaacagacttgtcttctctgaagaagcgcatggaaatcagttatagtcgattctctcctgtagctggcgaaaaacagatatagttgaattggactaacgggttttatgtaggggtgccgaggaggacaaccatgaatcaggggagggctcgactggaacgaattcggtgatggagggctttgcgaaatccccggtcaatcgatttgctgactggttgggatggggattcgtcttcctcggagcgggtataggagcgtttctgggtgtcgtcgcgtacgttcaacactggattagctgacggcttcgaatagttctccgaccgcttctcggatttgccgggtggcatgaggttttcgaccgctcacgtagtggcggcgacctcacgctaatcagtaatacacactttgatctagcagaccctacggctaaggctaggaggccgacgatgggaaaccgcgtatggaaaggtgaaccttccgccggtggccgggccggaacgatcatcgctttgggcatcgcggcgttggtagtggcgggagtatggttcggatggactcgatactagggctatagtccggtttcgaatctgtcgcagacgttctcgatctcattttccgaggatgcgcgggcaatcgtcagcaaggacgaggaaagctttcatggggacggataccggtacgtgaaggtcgccgctgacccagaacaagtcgacggcaccattctggacggcagggattactccagtggccaactgccccaggagaacatccgcataatcaaggaagcggatgcgaccctgcgattgaacctgggaacacagctcgatgcgctctacgaccggcctcataaggagataaccaacgagggcggcacgctgatcatcatccatgatgccgattcctcggaatggcatttgttcgaatgcctcgtctgaaagctgagcactcccgaaacatatgcgattgtcctgaagaagagcccagaccaaccaagccccgattatccagataaaaagaaacccccagtgcatcacggctgagtcgaagaccgtccgaagaggccctttgggggaattcttgatacatcataatgagccatgagccgacagtcaaattcaacaactgatttcctctcacggacttcaaggaaaggaagtccgcgggagcaggcgctgcgcgcgtgcattaccgatgaacggcttgccacctacaattatgaggctcaaagacgttcatgcccagcgctagagctgtacctgtgggatcacgacatggccagcgcctgtatgggcgacatcgccatcctcgaggtcgctctgcgcaaccgcatggaccggcaactctccctcctcgctctggagcagaatggcactgaagactggtatatggcagggctgcaattcgatgaccgaacccagtaccagattcgtgaagcgtggaaccatctcaccccgcaccagcgaaaaaatcatacgcatggccatctcatagcgtcattgacattcggattttggcgcaatctcttggaagacggcggaacaatccacacgaagtggccagaccagcgccgtgcagattatgagaacgatttatggcgcaaaggactcgataagacattctccaatgggcgccggtatgcccgtgcagtggaagaacgctggatgagaaagtacgcgctggatatcgtaaaaacagtgcatgccctgcgtaatcgggtcgctcaccatgagccgcttgtcaacggcatacctctgccgggtgagaatcgacggattgcattggagaatgcgacgcaggcgtgcttcgctctggcgatgatcctagaccgagatctacacgcatggttgatggataacagcaagatgaaacttgtgctcgaacacgagctgaagcctaatgaataggtagtgagtatcgttttcgccaatcatctcttcagtgggaatggcaatgagctgcagcgacaccaacagattccttaggatccgacaccggcacgtccggcctggtatgcgggttatggcagtgctcgatcgccactgcgggcgaacccgtgccccacatgacatggaagtccttggatacggccgagatcatcgcgcacatcgcatccagggcgaacggatcattgtccaatacgggcgatacggatcgaccgcgccgcagccccggtcatgtcatcatgtcccatgccgctcatcgtggccacggtcgcagccggacgaaacctgctgtcatgcgattacttgacacgatgttgcgcttttggccatgcgcaggttgaatgggattgcgccacgaaaggatatgccatgaacgatctgctgattatcgacatgctgcccacgtacgggctgctgttctacctgctgatctcggtattcgtcttcgtgggatgccgtggtctgcgccggaggacctcggatcgtggcctgctgcgttttgccgtaggagcgttcttggttgtttccgcgctcggcgccgtgttcgctgcgctggtgtatatcatggcagcgcctttggcgcagccggatatggtcgacttctaccgcacgtaccggccaggagctctgatcttcctgctgggattgttcatcatacaatttgtcttcggcgtcgctgccgtgtatcggggaaagtaacctggtatatcctgcgataaacgcattggcagacacttgctgcctatctgtaaacacaccctagataaggcttgcggccgttggccgagcacagtagtagtgtggtctgctgtgtcaacaggaggagtgtgaccaatgcggctgattgagacatggctggcggaccaggaacgcgcgtttgacttgttcgcgaaattcccggcggaggagacgggattcgagaacccagcggccggcatgaatcgtgaacggttcg

SEQ ID NO: 721 - DNA, 5804 bp, Unknown
  R14_15m  MAG No. k141_40824
tccaaggtgactcggccaaggttcgagacggtggtcgtggtctcgcggtcggcgatgaaccgggccagctccagcacccagtccttggcaggggagggcgcgagacgcagcgccggattcttttccagcgcaatcatgcggttcatatgcgattcgacgcgctcgcgactggtggcatggtcgagctgctcctgcacatggcgggcgatgtcggccaacggctcatcggtcagcaatccacccataccgttgccgtgcgcggtgcgggcggcggactgctggccgtcgccggtcgcgtctgggcccgttgcggaagttttcgcggagtcctcatcggcttcgatatcggccggcgtgtacgccacgtaagtcatgccgtagaagttgcgcacggtctccgacctgaagaaggcgcgcaagtcgaccggaatatccacgcgaatcgcgcgattgcgggcgcgcgagggcatgacgtcgcgaatcgcgcacagtatcgcggcgatgaggtaggaggtgaggctcactccgcactgatgcgctgcaccaagcaccttgctggcgctgacgtgatattccatgaacgtgggcgcgtcccggtcgatggggccggccagccggtagatcttcgtgccgggcgcggcaccggccttgtctttctcgtagtatttgtcgaagctgttttcggctttgtcgctgtccgagccgtcgtaatccgaaggcacgcccggcacgtcgtaccgctcggcgatgtaggcgtgcaacagtgacttgaacaggttgatggcgccgcgaccgtccgaaatgatgtgcgagacctcgagattgacacgattgcggaaataactcacgcggaacagcatgcttttgggcccgtaatgcagtcgcgagcatatcggcagatgttccggctccaccagcggccggccgtccgactgttcgaggtaatgccagaacatgccgttgagcaggtgcacgttgaagctcgggaactgggcgatggcatggtcgagcgcgtgctgcaggatgtccggggcgatgtcgtccgccagctcggccgaatagcggaacacggtctgcgaggagcggccagcctgggaggagtagaacttgccgatgttgtctagtcggtaccaagtacgtcttgccatgcgtcgcctccctccggtgcgttggcggtggtgccggtgccgggagccggcaccagcggtgtgtcgtcgaggaaatgctcgatgatccggtaagtggtggacaccagccctacggccgacgtgttgagcagataaccgtggatgccgtcgtgaatccggtaacaggagacgttgtcgttcaccaattgcagacgacgggcgtacgcttcgtcctcgtctctgagcgggcagtattcggcggacaacaccagcgtgcgcggctgattgctcaggtcatgcgcggtgagcggcgcgaaatacggattggtcaggtcggccacggacgaacggtacatgtcgatgtagtcggccatgtcctgtgcggtgaggatgtagtcggtgccgttggtccgcaccgattcgaacgggctggtctcgggattgtagtcgttgccgaccaccgggtaaagcagcatctgcgtgcgcggcatgaactcgccgcggtcgcgggccatgagcgagacggcggccgcaagattgccgcccgcgctgtcgccaaacagcacgatgctgtcgggatccggtgctgggattgtcgcagatatatcgcccccgccggtgggggctgtcggcgcagccgactgggggtggtcaacatcaacagaaccacccaccccagaaatcggcaattccccagcaaacagctgccgggctacctcatagcaattctcaacagcagtagggaagcggtattcaggagccagccggtactcgaccgagatcacacggcgttgcagacgtacggccatatgcgcgcaagcctgcgtgtacaggttgatgccgcctgtggtccaaccgccaccgtggaaaaacaggatcgtgccacgcggcgtgactgagggaagttccgtgttggcattgccggaaataccgtcggtgttgccgctcgacatgctttccttgatgggtattttgggtaggactttgggtaatacggcgggcagaatcgcggatattgccgaggccactggcgtgccattggcggaagattcctccagggcttcgggcaggggcgctccataggcgaccagcggcgtgaacactcgcaatggtacggcatatccatccgccataggcgcgaaggcgtcctcgacacggcatttcggattggcgggtgcctgcttggcgataagctcttccgccacgcgctgcaatttgtacgacttgcccgcgttgggcttgatgtagctggcggccttcatcgcggcgaacaatgcctcgttgatcggcatgacgacaggtcctttcagcggcggattcggtagtgcgaacaccccaaccttagcccatgaccggcatgaacaaaaaagggaaggaacccgagagttccttccctgtgtgccgtatcagacgcgatacgcgccgattatcaggcggcgaagtattccacgccggcctcgaagatcggctggtacttgttgccgggcacgttgacgtacaggccgttgccggaacgctccgagtgacccatcttgccaaacacgcggccgtccgggctggtgatgccctcgatggcgagcagcgagccgttcgggttcacatctaggtccatgccgggggtgccggtctcgtccacgtactgcgtggcgatctggccgttggccctgagctgggcgagtacctcgtcggaggccacgaagcggccctcgccgtgggagatggccacggtgtggatgtcgccgaccgaagtcttggacagccacggggagaggtcggaggccacgcgcgtgcggaccagtcggctctggtggcggccgatggtgttgaaggtcagcgtcgggcaggcgtcggtcatcggcacgatgtcgccgtacggcaccagacccagcttgacgagcgcctggaagccgttgcagatgccgagcatcaggccgtcgcggttcttcaacaggtcacgcacggcctcggtgacggccggcgcgcggaagaacgcggtgatgaacttggcggaaccgtccggctcgtcgccgccggagaagccgcccgggatcatcacgatctggctcttgttgatctcatcgaccaacgcctgcgtggattcggcgacggcggccggtgtcaggttgttgatgatcagcgtggtcacgtcggcgccggcgcgctcgaaggcggcggcggaatcatactcgcagttgttgcccgggaacaccgggatcaccacatgcggcttggccacggaagagccgacgtacacggtcttcttcggcgcgtggaagtcgatggtctcgacggtcgcgcccttgtcctcgcccttggaacggtacgggaacacggattcgatgccggactcccaagcttcctgcacagcgttcaggtccagcgtctcgccggcggccttgaacacgtactcggaggtggtggtgccgatttcgccgatctcgaccaaattggagacggccggaagcttggcatcgtctgccagctcgacgatgaacgaaccatatgccggggtgaacaggtcgtccacggcgatgctgtcgttcagagtcacgccgatgcggttgccgagcgtcatcttgaacagggcttcggcggtggcgccatagcccggcgtggagacggccagggcatcgtggaagtcggtgagctcctcgatcacggagaacacctcaagcagcgcatccttgtccggggtcagaccgtcggccaggtagcgcggcgcgatgcgcacgatacggtgatcggcgtccttgaattcaggggaggtggcgcgcttcatgttgcccacggccacggcgaaggagatcagcgtcggcggcacgtcgagatcctcgaacgaaccggacatggagtccttgccgccgatggcgccggcgcccaggtccacttgggccatcagtgcgccgagcacggcggccgccggcttgccccagcgttccggctcgtcgcgcagcttctcgaagtactcctggaagctcaggtaggccttctcatgctcgaagccggccgcgaccagcttggccagcgactcgaccacggacaggtaggcgccggtgaactggttcttggacatgatgtacgggttgaagccccacgccatcgccgaagcggtggtggtctcgccgaacaccggcagcttggcgaccatggccatgttcggggtgagctgacgcttgccgccgaacggcatgagcacggtgcccgcgccgatggtggagtcgaagcgctccgaaaggcccttgttggaggccacgttgatgtcggtgaccagcttgttcatacgctcggccagcgtgccctcgccccacggggtctcgtaggactgctgtgcctcgacatgcacggtctggtgcttggaagcgccgttggaggccaggaactcacgggacagattcacgatcttgtcgccgttccaggtcatcaccatgcgcgggtcctcggtcacggtggcgatcaccgtggcttcgaggttctcttcgcgggcgtagatcaggaactcgtccacgtcctcggcggccacgtccacggccatgcgctcctgggattcggagatggccagctcggtgccgtccaggccctcgtatttcttgggcacggtgttgaggtccacgaacaggccgtcggccaactcgccgaccgccacggacacgccacccgcgccgaagtcgttgcagcgcttgatcagacggcaggcatcgccgcggcggaacagacgctgcagcttgcgctccaccggagcgttgcccttctgcacttcggcgccgtcgagttcgagcgattccacgttatgcgccttggacgaaccggtggcgccaccgatgccgtcacggccggtgcggccgcccagcaggatgatcttgtcgccgggggccggggtttcgcggcgcacatggtcggccggagtggcggccacgaccgcacccacctccatgcgcttggccacgtagccggggtggtagatctcgtcgacctgaccggtggccagaccgatctggttgccgtaggagctgtagccggctgcggcggtggtcacgagcttgcgctggggaagcttgccttccagcgtctcggagaccggcacggtcgggtccgcggcgccagtgacgcgcatcgcctgatacacgtaggaacggccggacagaggatcgcggatgcagccgccgatgcaggtggccgcgccaccaaacggttcgatttcggtggggtggttgtgggtctcgttcttgaacaggaacagccagtcctcgtcgtggccgttcacgtcaaccttgaccttgacggtgcaggcgttgatttcctcggactcgtcaaggccggtcaggacaccgttcttcttgagccacttggcgccgatagtgcccatgtccataaggcagacgggcttggcgtcacggccgagctcgtggcgcatcgccaggtaacgctcgaaggcggccttgacggtggcgtcatcgatggttacttcgtccagctcggtgccgaacgtggtgtgacggcagtggtcggaccagtaggtgtcgatcaccttgatttcggtgatggtgggctcgcggccctcctcgctgaagtacttctgacagtattcgaggtcggccagatccatggccagaccgcgctcgtcgatgaacttctggccggcttcggcgtccatctcgttgaaaccggcgatggtctcga

SEQ ID NO: 722 - DNA, 45130 bp, Unknown
  R14_15m  MAG No. k141_40939
atcggcattccgttgattatggcactttggccgcagaacggcgcgatttacgtggcgctgatgtcgatcatcgaccagacgctgctctggacgtacggcgtatggctgtgcgagccggtcgacgaaacgactggcggcaacgcgattggcgcgcgaggtgcggtcgtgaacggttcggtgaacggcgccggttcggtgggggaggctggttcggcgagcaatgccgcaaacggtggttctccggccgtcgtccgcccctcgccaggcacccgcgtcctcggcctgcttaaacgattcgtcaatcccgccttcgtcggcgtgatgctcgccctgattctgattctgctcggcgtcaaggtgccggacatcatcctgaagccgctgcacaccatcggcaatatggccacgccgatgtcgctaatctacttgggcggcctgttcgcgctgaccaagtggtggggcgtcctcaaacgctacgaactctatgctggcctagtcgccaagatgatcgcattcccgctcgccttctacgcgctactgaccgcgctgaccggcgcattgccgcaactgccgatcacccatgacatggtgctgatgattacggtcatcgccggactgccgaccatgaccaccattgccatgttcaccggtcgcaagaacaacatgcccgagtatgcggtcggcttcgtgctcgtaagcacgctgttctcgctggcctccctgacgattgtgtcggcagttgtgttctgaattgtccccttcgacgaaaagaatgccgggggcctccggcgcttggaatttcatcgacgccgccaacgactcggcatccgaggcggccgtgccgtatttcaaggagatattcgattacgcgcgcacgctcgatccgcagcatcgcccgctgacctacaccaatctgctgatggccgccggaggcaaagacaagtgccatcagttcgcggatgtcatctgcctgaaccggtattacggctgatatgtgcaagatgggtatcagctcatcggagccaagaaggccttcatcaacgagatgaaccaatggatgaacaccgaacccaacaagccattcctgttcaccgaatacggtgcggacaccgatgccggtgcgcacaagctgccaagcgtgcagtggagtgaggaataccagtgtgagtacctcaccatgcagcacgaagtgttcgacatgttcgaggcagtggtgggcgagcaggtatggaacctctgcgacttccaaaccggtgaaggtatcatgcgcgtcgacggcaacaagaagggcgtcttcactcgcgaccgtcagcccaaagccgccgcctatgtactcaaggagcgttgggagactaagtagcggcccgcccctggaatattccaggagcaacacacatcgcataacacacaacgcaacatacaaaaaagaacctcgtgaaacgaatttcacgaggttctttctagttacgctgaatgactcccattagactcccacaagagaagagcaatggcgaaatcccaacgttgctaagctctcaaactcagatgtggaagtagagctcgtactcgagcggggtcggggccaggcgagcctggtcgatctcgtcgcgcttgaggccaatccaggtctcgatcaggtcgtcggtgaacacgtcgccggcggtgaggaagtcgtggtcctcttccagggcgtccatagcctcggccagggagcttggcacctgcttgatgccagcgtgctcttccggcggcagctcgtagagatccttgtcgaccggctccggaggctcgatgtggttcaggatgccgtccaggccagccatcagctgagcggagaaggccaggaacgggttgcaggacggatccggagcgcggaactcgatgcgcttggcagccggggaggtgccggccagcggaatacggatggcggcagaacggttacgagcggagtacaccaggttgaccggagcctcgaagcccgggaccagacggtggtaggagttcagggacgggttggtgaaggccagcacggaggaggagtgcttgatcagaccgccgatgtaccagcgagccagatcggacagaccagcgtagcccttctcgtcgtagaacagcggcttgccgtccttccacagggactggtggcagtgcataccagtgccgttgtcgtcggcgatcggcttcggcatgaaggtcgcagccttgccggccagagcggcggtctcgtggacgacgtacttgtacttcatcaggtcatcgcctgcgtgctgcagggtgttgaagcggtagttgatctcctgctggccagcgccggcgacctcgtggtgggaacgctcgaggatcagaccgaccttctgcaggttggcgaccatatcgtcgcgcagatcctgggtgtggtcaatcggcggaaccgggaagtagcccttcttgacgcgattcttgaaaccgatgttcggggtgccgtcctcttcggagtcaacgccggagttccacggagcttcgatggagtcgacctcgtagaaggagcgctgcatggagttctcgaaacgcaccttgtcgaagatgaagaactcggcctcaggagcgaaggatgcggtgtcggcgatgccggtggacttcaggtaggcctcggccttgccggcgacctgacgcgggtcgcgggagtacggctcgtcggtcagcgggtcgacgatggagaaggccacgtcaagggtcttgtgcttgcggaacgggtcaacgaaagaggtctcaacgtccgggaccagcttcatgtcggactcgttgatggcctggaagccctgaacggaggaaccatcgaacggcatgccgtcggtgaaagcgtccttcaggaattcgctagccggcacggtgaagtgctgctgaacgccgataagatcggtgaaacggacggagacatactcgatgccttccttgttgataagggcctcgacgtcttccttggacttgagttcggtcacgggaccgctcctttcgtatgagatataacggtatatatcgtaaaatagcgcgtttcgccggctcgaaacttgggttacgagaatgtttcgtgactgtggccgacaatcgcgcaggcgcgttatttcaacgaaacatcattacagaatggaaacggagactatcgggggagtaggtagagatgtccgcaacgtggacagtgggtattgacaggtgacgtaggtggatgtaagtggacgcgattatgagacatatgacgaagccccggaaccgattgaacggattccggggcttctgtgcgatttggttgtgtgctgccgatcagcgaccgcgcatcgcgcggcgggagatcttctgcgggcggttcggatccatgcccttggggatggcatagcccttcttggcctgcagcgtgcgcagacgatcgttcagcgtttccatctcggccttggtcagcaggaagcgacggcgcggatgaatcttggcgatcagtgcgttcttgtggtccgtgggctcatagctcttggacttgatcaccgtgctacgcagcttggtcagcggcacctgcttggggccgtgtcccacggcgatgcggtatatcggaatggaggagccggcggtgacgcccttgatatcgcgttcctgacgatccatcgccttcatgacgcgaccgtattcgccttcgccgatcaggtagatgccgttcatcgaagtgccgcgccagatggcatccttggtcttcgggtcgatccacaccggttcctgcgggaagtcaaagccggctttctgcatgttgctcagcacgccgatggcggcacccggcttgccatcaatctgcttgtagccgactgcatccgcgcggcgggtgagcatcatggtggccagcagaatgccgagcatgatggcggtaatcatggtgaagatccaggtcagccaggtccacttgacaatcagaccgatgatgatcatcacgactacaggcagcaggaaagcaccggcctcaagccacggcagggccttgtcttccttagccgtgtacttgtagatctggatgatctgcttgattgtgctctgcttcttcggcttcgcgtccttttccgccatcacttcttcctttgttgggacgaaacacactgggcaatatcttatcaggtgcgctggtccgaacttgcttgtgctggtcggtctcagcgtgtgtgcaacggtcgtccgtcggccttgagcagcgcctcgccgagcgtttcactgaatgtgggatgcgggtgaacgaggcgggctgcgtcggcgagcggcacatggttgccgaccagctgttcggcttcggcgatgatgtcggaggccatcggggagaccatgtgcacgccgagcacgcgcggggtgtccgggttggccgcgtcgcagccggagacgatggtcaatgagccggccgtgccgctcatcagcatgcgcgcgttcgccagcatcggatagttggtctccttgatttcgacgaggtcctctctcgcctgcgcctgttcgacggtgagcccgaccgacgccgcttcggggaaggagaacacgatctgcggcacagcggcttcgtccaccggcttgggattgagtccggcgatggtctccgcgatgacgatgccttgctcaaaagcacgatgcgccagtgcgtgaccggccgtcacgtcgcccaccgcccatacgcccggtttgtcggtgcgaccgtacgcatccgtggcgacatgtccgtggtcatcaatcgtcacgccccatgctgggtcggtgatcgggtcacgcccgatggcgacaagggcgatttcgccccaaacgctctgttcgccgtcctggccttcgcgcgtgtagtgcacggtggcaccaaggttcgcgccggtgtccacatgggtgacgctggcgcgggtgatgatgttcacgccatgacgtttgagctcacgggtcagcgtggtgccggctctccggtcccaggctgagagcacgcggtccttgcgaatcagcagggtcaccttcgaaccggcggcgttccacatcgaggcgaattcaagggcgatggccccggcgccgataatcaccgccgaagagggaaattcgttgacttccagcgcctgtgtggagtcgatgagggcgccggcgaacgggttaccgggcaatgggtgtggcttggcaccggtggcgatgacgatgttcgtggccgtgaggtccatcgtggggccgctgggttcggggacatcggccttgtgataggtgaggatgtcgctttggtcgggggagggaacgaggtggacgatgtggttggaagttgctggagcgatctcatccgcatggaacgcggcattggctcggaacacggtgatgccgcgatgggccagcagtccggccagtcctcccaccatcgtcttgaccacgcgcaggcgatagtcgcgcagcgtgccgaagtcgatgccattcaccgaggcgttgacgccgagttcggccgcacggtgcacggtgtcgatggtgtgggtggcggtgatgagcgccttggaggggatgcagccacggttgagacaggtgccgcccacggtggcgtcacgctcgacgagtgccactttcatgccgagttcggcggcgcgcagggctgtggaatagccgccggggccggccccgatgatgaccagatcaaactgttcgctcatgattgcctccttggtgcatataagtatggctcccatgctagggagccatatgcggctatcgccgccacttcgcctaaaaacagtccactggactgttttctttacggctcagcccctcaacgaggggagccagagtatatatggacatcagtctgccggccagtgaccgcgcttcgggtaacgcggcttgggaagcctccaacgacgcatctgaatcgaacggctccaagcgtaggagaaggagcgggagcccttggacacggactgttcgccgtacttggcgatgagcttggccttgagcttgcgccacatcagccatacgtcgatgatcacggcaatcaggtaaccgtacataagcgccatcatgatgatggaagcccactggttctgcatcaaagaagtgacgaacatggagacgatcagaatcgcgaaggccaccgggatgaaccattcgccaaggttgaaacgggcatccacataatcacggatgtagatacgccaaggcaggcgttccgccttgggcatgtggttgatatcgcccttctgcatcgcctcgtactcggcgttctccttctcacgcagacgggctttggcggccttggcgctggccttgcggtccaccggaaccagcggacggataccggcggcctgagcctgcttcatcttcggggtaggacggccttttttctcagaaggatcggcggtcttcttcggggcctgctcaacgggaacttgagcctcttcttttttcctaaacggattccatgtcatgctttgaggttacggtgacgttcagacacttgtacactggcgcagtcattgcaatgacgccgctcacgcacatatatacgcacatatataaaggaggaccatcatggcaacgctcaccgctgacgagattcgttcgcgcgtcgaaaccgattggaaccgcatcgtcaaggtgctggccgaaaaggttgcgctgcagtcgatttccgccaagggcatcaccgccgaacatatgaagcgctccgctgaattcgtggcagacgaactgcgcctcgtgggtgtggatgccaaggtggtccaggcttccaatgccgacggcactccgggcgcatgggaggtcatcggctcgcatatcgtttctccggacgcccccaccgtgctgctctacgcccatcacgacgtgcagcctgttccggacccggccgagtggaacaccgacccgttcgtggccaccgaaatcgacggccgtctttacggccgtggctccgccgatgacggcggcggcatcgccatccactccggtgcgctgaaggctttgggcgacgacctcaacgtcaatatcaaagtgttcatcgaaggcgaagaggagatgggctcgccaagcttcattcccttcatcgaggctcaccgcgacgaattcgccgccgacgtgattatcgtggccgattccggcaactggtcggcggacattccttctttgaccacctcgctgcgcggcaacacctgcgtggacgtgaccgtgcagggccttgagcacccggtgcactccggtcagtacggcggcccgattcttgactccaacacgttggccgccatgctcatcgcttccatgtacgacgagaacggcgatctggccgtgcccggcgtggccgcggaagagccaatcggcggtttgcaacgcgaccttgacgaaaccaccgtgcgcgaggattccggcgtggtggccggttacgagttcgccggcaccggttcgctggcctcacgcctgtggaccaagccgtccgtgaccgtgatcggcttcgacgcccacccggtcgagggatccttcaacgtgatcgccccggagacccgcttccgtctgtcgctgcgcaccgcgcccacccagcgccctgaagaagcgcaggaagcactggctgcattcctcgaatcccacgcgccgttcggtgccaaggtcactgtcgaacgcggcgaaaacggcatgggctgggccatggacccgaccgccgtggccaccaaagacgcgctggaagccatgaccgaggccttcggcgttgagcccatcaacaagggcgagggcggctccattccgttcatccccgaactgcagcgcattttccccaacgctcaggtgctggtcaccggccccgaagacccgaaggccaacgcccacagccccaatgagtccatctccctgcccggcctcaagaacaacgtgatcaccgaggctttgctgctggacaagctcggcaagtaaccgaaccgcatcggtaatggtggcgagctgccgtcaggtaggtcacggatgtggctattgcctttgacggcggcttgctttatagtcggggagttgacacgggagctgccgttaggcggctgagaggagattcatagtctcgaccgatggaacgtgaccggataatgccggcgcacggaaatgtcgctcttacccacccgtgcctgaaccaacccgcgcgtggccacgaacatgtgcatcatgtgcgtacatatatccatgtatgttcggcctgtgtacgagcagaagaaaggcacattcatgactgaagctgtggccaaagccaattacaagtggcgcgtcgtcgatatcgtcgtcgccgcaatcatcgccgtcgcatccggcgtcattttctggggctgggacattgtctgctccgccccgctggccctgttcgagggcgtgacccccggtttcgaaggtctgctcaacggattctggctgttcgccggcccgctcgccgcaatcatcgtgcgcaagcccggtgccgcactgtttgccgaaaccctcgccgccttcctcgagcttacgctgggcaaccagtggggtgtcggcggctcgctgatcgtcggcatcatccagggtctgggtgccgaaatcgccttcgccgtcttcgcttggaagaagtggaacatcggcaccaccatcctgtccggtgcgctcgccggcgtgggctgctgggcctactactgggccaccaacccgggctggaacggcctgcgcgtcacttggtatctggttggctccatcatctccggcgtcgtgatcgccggcgtggtggtctggtacttgtctcgtgcgctcgccgccaccggcgctctggaacgctttgaatccggccgcagcaaggcgcgcgtctgatgcaggttaatccggctgcggtagaggccagcggctggggatggcggcacgccacgcgtaaggacttcgcgttgcgtgccgtcgatttcaccatccggccaggtgaacgtgtgttgctgctcggtgcttcgggcgcgggcaaaagcacgatgatggccggtctcgcaggcgtacttggcggcgatgaggaaggcgagcaggagggctcgctcaccatcgatggcgtcgatgcgcgcgaggcgcgaggccgcgtgggactggtgcttcaggacccggactcgcagatcattcttgaacgactgggcgatgacgcggccttcggctgcgaaaacctcaacgtgccgcgcgaggagattcggcagcgagtgcgcgaatcattggatatggtgggactcggcggactcgaactggatcggtccacccgccatctgtccggcggtcagcgccaacgtctcgcgttggccggcgtgctggctatgaagcccggtctgctgttgttggacgaaccgaccgccaacctcgaccccgaaggcgtggtcgaagtgcatgacgcggtcaaaaaggtcatcgaggccaccggacagactatggttgtggtcgaacatcatatcgatgtatggctcgatctggtcgatcgcgtgattgtgctcggccgacccgatgcaagttcgcccacgggcgcggtcatcgccgacggcaagccggacgaggtgttcgccgagatgggcgacgtgttggccgccggtggcgcgtgggtgccgggccgtgcgattcccgattactcgccgaagcaggagcctgcgcacgatgcgccggtgctcagcactgagaacttaagctttggccgtggaaccgctcttggcgttggcatcaatctggatttctatcccggcgaagtaacggctctgatgggtccgaacggcgcgggcaaatcgaccttggccttgaccttggccgggctgctcgagcctatcgccggcaaggtgctcatcgccgacaacctcaagcccgcgcatgccgggcgtgagccgattgactggaaaagcaaggaactgctgggccgtatcggcatggtgttccaggagcccgagcaccagttcgctgccaatttcgtgcgtgacgaagtcgccatcggccccaagtcgatggggcagagccaagacgaggcttatcggaccgccgaccgcatgcttgagcagatgaatctcacgcgcttcgccaaagccaacccgtataccttgtctggcggggagaagcggcgactgtccgtggcctccatgctggccgccgcacccaaagtgttggtgatggacgaaccgacattcggacaggatttcagtacgtggaatgaaatggtcaagctgatcgccgccatccgcgaccaaggctcgtgcgtggtcatggtgacgcacgatgaggcgctggtggatgcgctgggcgcacgacgtgtgatgttcgaggaggcgaggcatgagtgacgtggtaaccgtcagcccgcaggaaacgcgcgtggagccggtcaaagcctcatcgccctcatggttcatagcgcgcatcaacgcggtcagtcgcatcatcggtgcgctgttgctgtgcgttccgatgttcatcagtctggatgtggtatccgcatccacggcgctcggcatcgaattcgtgctgctgtggattggtggcgtggctccgtggatcgtatgccgtaagacctggccggtatggatcgccgccgccggcagttttatctccgtgtttctctacggccgtacctcgggcgagatcctgtggcagggtggctggattgtgatcagcgagggatccattaatctggccatcgccacggctatcagggtggcggccattgccgtacccggcgtgatcctggccctgggcctcgatcccactgatttggcggacggtttggttgagattctgcacttctcaccgcgattcgtatacggcgggttggctggattgcgcatgtttacgctgctgcaggaagattggcgcgcacttggcttgtcccagcgttcgcgcggccttggcgacggtaacgccatcgcccgtgccctctcccaagcgttcggactgctggtgctctccatccggcgcgccaccaaacttgccaccgccatggaagcgcgcggcttcggctccagcgccccacgctcccaagcccgtatctcgcgtctgaagcctatcgactggatcttctacgtcatctgtctggctgtcccgctggcctccataggcgtagccatcggcaccgggaattggcacttcgcctttcaaggtgtctgaaaggcgacagactggcacagtgcctttcaaggtgtctgaaaggcttacgatgcctccgccagcgggagcgagccacgactgacgtaatgacccggcagtagggtagtggctatgcccatcaacgcccagattcttgataatccgaaatccgaccgcgttcgccgcatcgccgatctgactcgcgccaaaggccgcgaacgttcgggccgttttcttatcgaaggcccgcaatccgtgcgcgaggccgtcacttggcggccggacgtggtgcaggacctctatgtggaggtttcgcaggcgttggaacatccgcgtatcatctcctccacgttggagaagatcgtcgaaacctcgcaggatgccacgatttatgtgcactactgcaccggcgacgtgatgcaccgcatcagtccggacgcccagggcatcgtggccgtcggcaatgccgagtccatgcacgccggtgccgatgacgtcgaacttggcaagaacggccggggcccgcagatcgccgccttctggcaggtgcgcgacccgggcaacgccggcaccgtgatccgtgcggccgatgcggccggctgcgacgccgtaatcttcgtggacgactgcgtggacgtgctgaaccccaaggtcatccgctccaccgcaggctccctgttccatctgccggtactcgccatgagcaccgacgaattcttcacctggacaggcgaccataatatgggcgtctgggccgccgacgtatacggcaccgaagaatgcaagccggaaagcctgcccgcagtactggcggacaaggcggcggtcgaggctccgaaagccgtgctgttcggcaacgaggcgcgtggcttggaaccggacatcctcacacgctgcggccgcatcgtctccatcccgctgtacggcaaggccgaatcgctgaacctcggtacctcggccgcggtgatgttgatgtcgctgtctatgtcgggtcatgttgaaagaatgtgaaaccggtaaaaacgctgtgaaacgctgagaaaacatcagacgaaagggttctcgtggcagaacaaatggtgttcgacgccgaccaagtgaccgctgaggttgccaagggcatcgagaaaatccagaacgcctccaacctggaggagctcaaggccatcaagacaacgtacgcaggtgccgattcggcgatgaccaaggccagcaaggccattggctccctgcccgtcgaccagaagaaggaagccggcaagctcatgggcaagctgcgcgccgacttcggccgtgcctatggccccaaggaggtcgagctcaaggaagccgccgagaaggccgcactcgccgctgaaaccgtggacatgacgctgccggtgaaccgcaagcctctgggcgcccgtcacccgctgcccaagctgatggaagacgtcgaggacttcttcatctccatgggctggcagatctcctccggtccggaaatcgaagccgaatggtacaacttcgactccctgaacttcggcccggaccatccggcccgccagatgcaggacaccttctacgtcaagggcaatcaagccaaggacgccgccggtttcgtcggctccaacatggtggtgcgtacgcagacctcctccgatcaggtccgtgccctcctgacccgtggcgtgccgctgtacatcgcgtcccccggccgtgtgttccgcaccgatgagctggacgccacccatactccggtgttccaccagtgcgaagccctcgccgtcgacaagcacctgaccatggccgacctgaagggcgtgctggacaagctcgccgtcgccatgttcggccctgaagccaagacgcgcctgcgcccgagctacttcccgttcaccgagccgagcgccgagctcgacctgtggttccccgacaagaagggcggccccggctggctcgagtggggcggctgcggcatggtgaacccgaacgtgctgaagtccgccggcatcgacccggacgtctacaccggtttcgccttcggcgtcggcatggagcgcacgctcctgctgcgcagcgacatcaacgacatgcacgacctggtcgaaggtgacgtgcgtttcgccgaacagtttgtgatgggggagtgattcagccatgcctatgatcgatatcgattggctcaaggaccatgtcgaggttcccgaaggcctgacctacgaacagctcgccaaggaccttgtcaaggtgggtcttgaggaagaggagatccactcctcccaggtgaccggcccgattgtggtcggctacgtggtcgacgccacccccgaaccgcagaagaacggcaagaccatcaactggtgccacgtggactgcggcgacgaatggaacgagaccgacgaagacggcaacaaggtgccgcgcggcatcatctgcggcgcgcccaacatgaaggccggcgaaaaggtcgtcgtcaccctgcccggtgccgtgctgcccggcgacttcaagatcgagccgcgcaagacctacggccacatctccaacggcatgtgcgcatccgagcgcgaactgggtctgggagacagccacgacggcatcattctgctgcgtcagtacggcttctccgaggctgaatatgaggctctgaagcctggtcaggacgccatgcacctgctgcacctcgaccagcctctgcttgagatcaacatcaccccggaccgtggctacacgctgtcctaccgtggcgtggcccgcgaataccaccactccaccggtgccgcctacaccgatccggccgtggcactgaacgagaaggccccggaacctgctgactaccagcccggcaccccggtggacatcgatgttgaaatcgacgataacaatccgattcacggcgtgcccggttgcgaccgctactacgcgcgtatcgtcaaggacttcaatcccaacgcccacacgcccaactggatgcgccgccgcctgattcgcgccggcatgcgctccatctccttggccgtggacgtgaccaactacgtgatgcttgacctcggccagccgatgcacgcctacgacctcgacaagctcgaaggcccgattgtcgtgcgccgcgccaacgagggtgagaaactcaccaccctggacggcaaggaacatgacctgagcgtcgaagatctgcttatcaccgattcgccgaacggcgaacgcggctcgcgcatcctcggccttgccggtgtgatgggcggcctgtatggcgaagtgaccgctgacaccaagaacattcttctggaggcagcgcacttcgatcaggtgaccatcgcccgttcggcccgtcgccacaagattccatccgaggcctcccgccgcttcgaacgtggcgtcgacaccgcgctgcagcccgccgccacccagatggccgccgagctcatggccaagtacggcaacggcgagcccagcgaacacccgaacgacgtgaacaacacgccgcgcgccaaggtcatccacttcaaggcctccgaagtggcccgcgtggccggcctcgacgtggacatcaaccgcatctccgacatcctgaccgacattggctgcacggtggccggcggcggcaacggcgagttcgccgtaaccgcgccgagctggcgtccggacttgaacgagccgtgcgacctggtcgaggaaatcgcccgactggtcggctacgaccagattccgatcaccgtgccgccggcaccggtcgagggtctggtgggcctgaccccggaccagcagcgtcgccgtcgcgtggcggacgagctcgccgagttcggcatggtcgaatcgctgagctacccgttcgtgggcgacgacgattacaaggccttcggcttcgacccggaagccaccaagaaggtcagcgtcgagatcgccaacccgctctacggcgaccgtccgtacctgcgtcgcgagattctgccgaccctggccaccaccgtgcagcgcaacatccgccgcggcatcgaaaacgtgtccctgtatgagctcggccacgtctacctgtgggatccgaacgcgcccgccatcccggcactgcccggcggcgtgcgccctaccgacgaacagctcgccgcgcttgacgccggtctgcccgaacagcccgaccatgtggccggcatcctgaccggtctggccgaggacgatggctggatgggcggcaagcgcccggtcgactggtccgacgccgtcgaggccgtgcgccgcatcgccggccgtatcggtgccgcaatcgaactcgaccagcccgccgccgacgatgtgcccgtccaatggcaccccggccgcgtcgcccgcgtcatggtgggcgacgtcttcaccggctgggttggtgaactgcacccgcgcgtcaacgaggcgctcggcttcccggcccattccgcggccttcgagctgaacctcaccgcgctgttcgccacgctgaccggcaagcccgtccaggccaagccgatctccacgttcccgccggtcaagcaggatttggccttcaccgtggacgagaccgtgaccgcaggccagcttgagaacgtgattcgcaaggccgccggcgcgaacctcgaatccatcgaactgttcgacgtgttcaccggcgaacaggtgggcgagggcaagaagtctctggcctatgcggtggtgttccgttcaccgagcaagacgctgtccgccgaagacagcgacgccatccgcaaggccatcgtggctgaggccgccgaaatcggcgcccagctgcgcgcctgacccaaccgatcatccgaatcgaggagcgtcatgagccaaccggagcaggacaagccgaaatacgggcagtaccagcagcctgaatatggtgctatgtctggccaatacggaccgaattacaacccgtatatttatggcgctcccgagccggataccaagaaggattccgccgcagccgctggcatcaacggtggcgcggcgcaatcccagcaggccggccagccgtacggtcagcagccggcgtggcccggcaatcagcaggcgggcggctggccgtatgctcaaggcggccaacagtccggtccgggcgcatatccgggcgggtacccgggcatgcaggggcagtcgtatggtcaacagccgaacggtcagcctcaccagccgcattattaccacggcatcgacctgaacgatccaaaccagaacccactctacgggcactgggattcgtatgcgatcatctcctttatcctcgccctgttcttcccggtgccagtgctctcggcactgatgggcgcggtggcaatgtggcgcacgcgcaccttccatatgaagggcttcggtttggctgtggccgccgtggtgatcaacgtgctgtacaccatcgccgtcatctggatggccttcaatggctatgacgccatgagcctctaccaggaagccctccagcaactcaccggcggcaccggctcctcctccgactccatctccgcataagtggcgttcacataccaacacacccactgcataaatatgcaatagtctgcataatcgcgtatactcatcccaagacacatcagtgaaaagagatgagtatggcgaaatatacagtggccgtggccggtgccacgggctatgccggcggtgaagcgctgcgcattctggccgcgcaccccgacttcgacatcacctgcgtggcaggccattcctcagtgggggagtcgatggccaagcacatgccgcatattccccaactggccaatctggtcgtcgaagataccacgcccgaagtgctgaacgggcatgacgttatcatcctcgcactgccgcacggtgcttcgggcaagctcgcctcgcagctcgatccgaatgccgtggttgtggatttgggtgccgaccatcgcttcgaagaacaggccgcttgggatgagttctacggcggcgatttctatgagcattggacctacggcatgcccgagctcatcaccggcaaagccgcggacggctcatacacccgccagcgcgcggcgcttcctggcaccaagcgcatcgcaggccctggctgcaacgtcaccgccaccacgctggccctccagcccggcatcgccgaaggactggttgaatcgcaggatatcgtggccgatctggtcgtcggatactcgggtgccggcaagaatctcaagcgcaccaacctgcttgccgccgaggccctgcaatccgccctgccgtattcggtgggcggcaagcaccgccacattcccgaaattctgcagaacttcgcccacgcggccggcaagagcgcggccgaagccagcgaattcacgctcggcttcacgccgattctcgcccccatgtcccgaggcatcctcgccaccgtgtccgcccgcatgacggacaaggccaaggcgctgagcgatgaggagattcgcgccgtatggtccaaggcctatgaaggccaggacttcatggtgctgctgcccgagggcacactgcccgccaccggcaacatcatcggatccaacgcagcccacctgcaggtcgtcgccgaccgcaaggccggccgcatctacgcttttgccgccatagacaacctcaaccgtggcaccgccggacaagcggtccaatcgctgaacatcgcactcggcctgccggaagacgcgggcctgaccaagatcggagtagcaccgtgagcgttacatttgcacaaggtttctccgccgccggcgtggcggctggtatttcatccgtcgaaggcaagaaggacttggccctcgtggtcaacaacggcccgctcgacgcggctgcaggcgtgttcacctcgaaccgtttctgtgccgccccggtgcagtggagccgtaaggtcgtcgccgacggtcacgtcaaggccgtgattctgaactccggcggtgccaacgcctgcaccggcgaggccggttacgcccagtccgtcgccaccgcggaaacggtcgccggtctcatcggcgccgaaccgaatgatgtggctgtctgctccaccggtctcatcggtgaactgctgccgttggacaacgtgctggctggtgccaagagcgcccatgaggctcttgccgccaccgccgaagccggcgccgacgcctcccacgccatcatgaccaccgacaccaagccgaaaacggtcgaactgaccggctccaacggctggaagatcggcggcatggtcaagggctcgggcatgattgccccgcagctggccaccatgctgtgcgtcatcaccaccgatgcggtcgtctccgccggccagatgcaggccgcactcgccgtggccgccgaacattcgttcaaccgcatcgacgtggacggctgcatgtccaccaacgacacggtcctgctgctcgcctccggtgcctccggcgtcgaaccggacaaggacgaattcaacaagctggtgcgtgaggcctgcgcatccctgtcccgccaaatcatcggcgacggcgaaggtgcctcccacgacatccgtatcaccgtcaccggtgccaccagcgaagacgcggcacttgcctgtggtcgtgccgtcgccgcctcgaacctgctcaagtgcgccatctccggcaacgatccgaactggggccgcatcgtcagctccttgggcactgtgccgcctgaagtcgcgccttacgattcgaacaaggtgaccgtggacgtcaacggtgtgcgcatctgcgagaacggcggcgccggccgcgaccgcagcgaggtcgacatgaccccgcgcgaagtccacatcgacatcgacctgaacaccggctcggacgccgaggccaccgtctggaccgacgacctcacccacgaatacgtccacatcaacgccgactacgaaagctgacaaacagcccagtgggctgtttgtagcagccggcagcgatagcgtcgccggcgtcgcatataacgcaaacagcccagtgggctgtttgtagcagccggcagcgatagcgtcgccggcgtcgcagaaaagagaaaaattggctacagaattgaagggacctgggttccatttcgacgtgcacaccgatttgcgcgccgatcagaaggcagaagtgcttattgaagcgctgccttggctggaggagttcgccggccagcgtatcgtcgtcaaatacggcggcaacgccatggtcgatgaccatctgaagcagtgcttcgccgaagacatggtcttcctgcgtcaggtgggcctgcatccgatcgtcgtgcacggcggcggcccgcagatctcccacatgctcaaggccctcggcatcaaatccgaattcaaaggcggcctgagggtcaccacccccgaggccatggacgtggtgcgcatggtcctgaccggcaaggtgtcacgcgaactggtcggcctgatcaacgcgcacggcccgctggccgtaggcctgtccggtgaagacggcggcctgttctcggccatgcagcgcaggcccatcatcaatggcaagcccaccgatatcggcttggtcggcgatgtggtttccgtcgatgcctcggcagtcgaggatctggtggccgccggtcgtatcccggtcgtctcttccgtggctccgaacgaagaagatgccactgaagtgctcaacgtgaacgccgattccgccgccgccgctttggctgccgctgtgggcgcacgcaagcttgttatcttgaccgatgtggatggtctgtacgccgattggccggacaagaattctctgattggccggatcggtgtggaaaacctgcgcgatatgctgccggacctggaatccggtatgcgacccaagatggaggcctgtgtcagggccatcgacggtggcgtgccccaagcccatatcatcgacgggcgcaagccgcattcgattttgaatgagatattcacctccgcaggcatcggtaccatggttatgcccgatgaaggactggaaatgaggagctcttatggctactgagcatgaggaaaaactaggtacggaggacagcaagtggctgggagagtactctcaggtccacatgaatgtgttcggtacgccgttgcgcgtcatggatcacggccaaggtgcccacatctgggatgttgacggtaacgaatacctcgatttcctggcaggcatcgccgtcaattccctcggatacgcccaccccaagtgggtcaaagcggttgccgatcaggctgccaaggtggctcatatcagcaactatttcgcgtccgagccgcaaattgagctggcatccaaactggtcaagctggctggtgcacctgaaggctccaaagtctacttcggcaactccggtgctgaaggcaatgaagctgccctcaagcttgccaagctgtatggccgcaccttgcctggtgccctgccttccatcggcggcaagcccgcacgcattctcgcaatgactcacggcttccatggccgtacgatgggtgcgctgtccgccacatggaaacccggtatccgcaagccgtatgatccgctggtgccgaacatcgaattcgtacgcgccggcgacaaggtcgccctgcacgacgcttttgcacagaccggtctcggccgctatggcaagggtccggtggctgctgtgattctggaacttatccagggcgaagccggcgtgcagccgttgggcgccgattacgtcaagttcgtgcgtgaactgtgcgatatcaaccacgcgctgctcatcatcgatgaagtacagaccggtatcggacgtaccggcaagtggttcgcattccagcgtgacgatctgtccggcggcgtgacgccggatatggtgactttcgccaagggcgtggcaggcggattcccgatgggcggcatgatcgctttcggcgagaaacttgcggctctgttcactcctggttcccacggctccacctttgccggcaatccgctgggtgcggctgcgggactcgccactcttggcgtgattgaagacgagaatctggtggccaacgccgaagctcgcggcaaacagctgcgcgatggcattatggccaccggtaatccgctgttcgtttccgtacgcggccgtggtttgctggacgccgtcgagctcaagcatccctgctcccacgcggtgatgaactactgcctcgaacacgggctcatcgtcaacgcggtggctcccaatgcgctgcgtttcgcaccgccgctgattgtaaccgctcaagacgtggatcaggcacttgccatcctcaaggatgtgcctacggacctgcccgacgactgatttctcgccgtcactgccgacccaccgatccaaggagatcatcatgaccccagaacttcgccacatgctgcgtgacgacgacctcaaccatgaggagcagaagcaggtactcgaacttgccatcaagttccaccatgaccgcttctacaagcagccgttcgccggtccgcaggccgtcgccgtactgttcgacaagccatccacccgcacccgttccagcttctccatcggcgttgccgagcttggcggctacccactggtcatcgacaagtccggctcccagctgggccgtggcgagcccgtggccgataccgctcgtgtgctcgaccgcatggcttacggcgtggtgtggcgcaccttcggccaggaccgcgtcgaagaaatggccaagtactccacccatccggtggtcaacgccctgaccgatgacttccatccctgccagattctcgccgacttccagaccatcgccgagcaccgaggcggcgtcgacaacctgaagaaccagaccatcgcctacctcggtgacgcggccaacaacatggccaactcctacctgctcggcggtgccgtggccggcatggacgtgcgcgtggccggcccccacggctacctgccccgcccggacatcgtggccgacgccaagcgcgtcgcggccgagaccggcggctccatcctggtcaccaccgatgccaaggaagcggtgaaggacgccgactgcgtgttcaccgacacctgggtctccatgggcgaggaggccgaatacgccatccgttccaagccgttctgggattaccaggtcaacaccgaacttatggcattggccaagccggatgcgctcttccagcactgcctgcccgcctaccgcggcaaggaagtcaccgctgaagtgatcgacggcccgcagtccgtggtgtgggacgaggccgagaaccgtctgcacgcacagaaagcgttgctgacttggttgaccggcaaggcccgtggagacgaaagcctgctcgcatgagtgaaaccggtccgtccctgcagcgccctgccaccagggcggcgcggctgagtgccatagaacaggcgctcgccacgcatatcatcacctcgcaatcacagctgtccaaaatccttatcgacgagggcattgcggtgactcaggcgaccctgagccgcgatcttgacgagatgcatgcggtgaagacccggctgaaggacggcacggtggcctacacggtgggtcgcagcgtcgttgcttcggaaggtgaggatgtaggggagcgcggtgaggcacagatgtcccgcgtgctgaacggactggtcacctcggtggccgccgccggaaatctggttgtggtgcacacgccttccggtgccgcacaatacgtggcctcggtgattgacaagcagccgatcgaaggcgtgctgggcaccatcgccggagacgacaccgtcatggtgatttgcaccaatgacgacaccgccgtctcccgctccgactggctactaagcctcgcttccaaataaccaacacgccgtgcataaatatacagtcctctgtatatacttgcatcagtttgtttttcagaccttgaatgaaagggaaccaatggcagataacaagcgcattgttctggcctactccggcggtcttgacacctccgtcgccatctcgtatctgaaggagcgcaccggcaaggacgtcgtggccgtgtccctcgacgtcggccagggcggcgaaagcctcgagaccatcaagcagcgcgcccttgcctgcggtgccgttgaatcctacgtggtcgacgcccgtgacgagttcgccaacgaatattgcatgaaggccctcaaggccaacgccatgtacgaaggcgtctacccgctggtctccgccatctcccgtccgctgatctccaagcacctcgtgcgcgccgcccaccagttcggcgccgacaccatctcccacggttgcaccggcaagggcaacgaccaggttcgtttcgaggtctccatcgcctccatcgacccgacgctgaaggccatcagcccgattcgcgacctgtccctgacccgcgacgtcgagatcgcgttcgccaaggagcacaagctgccgatcacccagaccgagaagtccccgtactccatcgaccagaacgtatggggccgcgccattgagaccggcttcctcgaggatccgtggaacggcccgaccaaggactgctactcctacaccgacgacccggccttcccgccggtcgaagatgaagtcgtcatcgagttcaaggaaggtgtgccggtcaagatcgacggacgtgacgtcaccccgttgcaggccatcgaagagatgaaccgccgcgccggagcccagggcatcggccgcatcgacctcatcgaggaccgcctggtcggcatcaagtcccgcgagctgtacgaggctccgggtgccgtggctctgatcaccgctcaccaggaactcgaaaactgctgcctcgaacgcgaacagcaccgcatcaagcgcgacatcgacaagcgctggggcgagctggtttacgatgcgcagtggttctccccggcaacccagtcgctcaacgcgttcatcgaagacacccagaagtacgtgtccggtgagattcgcatggtcctgcacggtggccgcgccgtggtgaccggccgtcgttccgactcctcgctgtacgactacaagctcgccacctacgattccggcgataccttcgaccagaggtcctccaacggcttcatcgacatctatggcctgccgtcccgcgtggccgcagcccgcgacgtcaagttcggcaacggcatcgaggtcccgaagaacaccgtcgagtgattcttactcagtcgcccccgctgcgaggctgtcggcatagctgactgggagtggtctttgaaaggactgtcctcagtcacactccatgtgacagccctcgccagcgggggcaactgtatgtttgaacacattgctacgcttaaacacagctattttcacttttcaaggagccttcatgactgagaacaacgaacatctggccctgtggggtggtcgctttacgtccggtccgtcgccggaactggcccgactgtccaagtccacgcagttcgactggcgcttggccgacgacgatatcgccggttcccgcgcccacgcccgtgctctcggccgtgcgggacttttgatcgccgacgagctgcagcgcatggaggatgcgctcgacacgctccagcgtcatgtggatgacggctccttcgcccccatcgaagacgatgaggacgaggccaccgccctcgaacgcggactgattgacattgccggcgacgaactcggcggcaaactgcgtgccggacgctcccgcaacgaccagatcgcctgcctgattcgtatgtggctgcgccgccactcccgtgcgatcgccggactcctgcttgacctcgtcaacgccctgatcgagcagagcgaaaaggccggccgcaccgtgatgccgggccgcacccacatgcagcacgcccagcccgtgctgctcgcgcaccagctcatggcccacgcttggccgctgattcgcgacgtgcagcgactgatcgactgggacaagcgcatcaacgcctctccgtacggctccggcgcactggccggcaacacgctcggcctcgacccggaggccgtggcgcgtgagctcggcttctcccgcgtgaccgacaactccatcgacggcaccgccgcacgtgatctcgtggccgaattcgcgttcgtggccgccatgaccggcgtggacatctcccgcctgtccgaggagatcatcatctggaacacccaggagttcgccttcgtcaagctcgacgacggctattccaccggctcctccatcatgccgcagaagaagaacccggatatcgccgagctcgcccgcggcaagtccggccgactcatcggcgatctgaccggtctgctggccaccctgaagggcctgcccaccgcctacgctcgcgacctgcaggaggacaaggaggccgtgttcgaccaggtcgatacgctcgaagtgctgctgcccgccttcaccggcatggtcaagaccatgcacttcgacagcgagcggcttgaagaggaagccccgaccggcttcgcgctggccaccgacatcgccgaatggcttgtcaagaacggtgtgccgttccgccatgcgcacgagctctctggtgcctgcgtcaagctcgccgaaggccgcggccaggaactgtgggatctgaccgacaatgacttcatcgagaccttcgccgcgttcctgccggccgacaaggctccgggagtacgcgaagtgctctccagccacggttcggtcgactcccgcaacggcaagggcggcaccgcttacggtcgcgtgcgcgagcagatcgccgacgccaaggccgaggtcgaagaactcaagctcttccccgcatccacgtcggatggctccgcctacaaagcccccggcacgttctagtcccaatagagctccctcgtcagagggagctctattttgctgttgtcactgcaacggcatacactgagaaatcgtaacgaacgggagccgtgaggctgagaggaagtcgccagacttcgaccggggaacttgacgcgggtcatgccgccgtaaggaatcgttgttgcagatttgccgggttctccgatacagctttcattccgtttgcataattcagccgtgagacggtcgtgatggagccaatacatcacagcggtcgaacggtcgcatgattgggttcatgaatgggcgcaccacttaaggtacggttcgtttcgtgcacccttttttactatctgaaaggatattatgcaggtcaacggagagcaggtcacgctcgagacgccggtcagcgtcgccgattatctcgaagcgcacggattccgcgccgagcgtgtggccatcgaactcaatggtgagattatcccgcgcgataagcgtgccgacgccatgctcgacgaccagtgcgtcatggaaattgtgcagtttgtacagggtggatgaaaggaaaagctatgagcaatattaatccggttactgaagcatctgttgaggcgactccgctgccgccgcagcccgccgtcaccaatccggtcggcaccgccgcgccgattctgccagtggaagacaagccgctgaccctgggcggtcacgagttccagtcgcgattcattctgggctccggccgctacgacctgaacctcatcaaggccacggtcgaacatgcaggcacgcaaatcgtcaccatggcactgcgccgcgcgcagaccaccgagaacagcgtgctcgactacattcccgaaggcatcacgttgctgcccaacacctccggtgcgcgcaacgccgaggaagccgtgcgtatcgcccgactggcacgcgaagtgtgccacaccgacttcgtcaaggtcgaaatcgaacacgagaccaagtacctcctgccggacaacgccgaaaccatccgagccaccgaaatgctggccaaggaaggcttcgtggtcatgccctacatgttcccggacccgattgccgcacgccagctggaggaggccggtgccgccgccgttatgccgctcggttcgctgatcggctccaacatgggcctgcgcatgcgtgacttcatcgagatcatcatcgccaatgcgcatgtgccggtcatcatcgatgccggcatcggccgtccgagccaggcctgcgatgcgatggagatgggtgcggatgcggtgatggcgtacacggccgttgcctctgctggcaatatcccgctgatggctgaggcgttcaagcacgccatcgatgctggtcgtgcggcgtatctgtccggtctgggcaaggtgaccgagggacaggccgtgccgtccagtccgactacgggatatttgcactgacacttttattagctcccctctctgaggggagctggccgcgtagcggactgaggggagctggaaacatggagaaaacatggcattgactgatgaacaggtggagcggtacgcgcgccatctgattttgaaggggctgggcgtcaaagggcagaagcggttgttggcctccagcgtgctcatcattggagcgggcgggcttggctctccggccgccctgtatctggcggcggccggcgtcggccatatcggactggtggacggcgatgtggtggatatgagcaatctgcaacgtcagatcatccataccaccgcacgtgtcggagcgcccaaagtggaatccgcggccacggccatccgcgcgctcaacccagatgtgacggtcgacacctactacgagctcgtcgatgccagcaacatcgccggcctcatcgaaccgtacgatctggtgatcgatgccaccgacaacttcgccgcaaaattcctcatcaatgacgcatgtgtactggccggcaagccgtatatccatgcgggcgtggtcgggttctccggccaggtgatgaccgtcatcccaggcgaaggcccctgctaccgctgcatcttccgcgatatgcccgccgcaggtgaaattccgacctgcaaggaggccggcgtgctgggcgcggtggtcggtgtgatcggcagtctggaggcgactgaggccgtcaagctgattgccggcgtgggggagccgctcgtggctcgtatgctcactgtggatgccctgaccatgaacatccgccgtgtgccgttgccgaaccatgtgcccgactgcccggtgtgcggtgagcagccgaccattactgctattgatccggccaactatattcagccggcctgcgcgatttagagctatgtggcacccctccttgaggggagccaagatcggaacgagaggggaagaacatgcctattgctttgcgtaatgcggtcgatgacgatgagagcagtgaagcatcgtaccgccgcatcacgccggcggaatttgccaagctcgacccgaatacggtcacgctgctcgacttgagggaaccagccgacttcgccgcccacccggtcgaaggtgccatcaatgcaccactcgaccctctggcccatgtgctcaaaaccgtgcccacagatcgaactgtcgtagtctattgtgctcaaggatggtggagcgaggaagtagctgaaatccttgccgatcgcggttacgatgtagcaagcctcgatggcggttttcagggttatctcgactatcttgaaacccaccacgattaacggttcccgttgtcgttcttttggatgagtgtgcacggacatacgtgtgccctacaatcggtcacggtattactcgatggattcttgaatatcgtcgggtaatcgtaattcacaacaagggattgcactgaaccaacccgaacggagggtcgaaaccgtgggacatctgctcacccgaacgcagattcaacgcctggtcgccaagcacggccgtgaggtcatcgagcatcgccacatgcagatcgaacgctgctactaccagcacggcaacgtcaccacgttcgaacattccgtgcgtgtcgcctgcctggctgtgtggatggccgaccgcgcgcacctgtggtaccgcgtcgacctcaaatccctgattcgcgcggccctcctgcacgattacttcctgtacgactggcacgactgggataacggcgaacaccagtggcatggcttcacccatggccacgccgccctggtcaatgccctgaaggacttcaagctcaacgatatcgaacgcaacagcatcgagaaccacatgttcccgatgaccctggtgccgccgcgctatatcgaaggctatctggtcaccttggcggacaaatgctccgccaccgccgagaccttctcgctcgaccggttcaacaagcgcgcgttgcccgccgcgaagccctacgccgagatcgaagcccgtcgatgatcatcacactcgaacattatttcctctggtttctgttctacagtttcgtcggctggacgtacgaatccattctcgtctcctgccaacagcaccgcttggtcaaccgagggttcctcaacggcccgctgtgcccgatctacggcaccggcgcgatactcggcgtcgccattctcggcaacgtacataacccgatcatcatcttcctgatttcgatggtgggcgccacgatactcgaatacacaacctcgtgggtcatggagcagctgttccacgcccgctggtgggattactcgaatttccgcttcaacctccaaggccgcgtctgcctgctgggcgcgttgattttcggtctcggcggcgtgggcgtggtacttggttcgcagccatatgtcgagcgggtcacggatatgattccgctgccgatgctgcatacgctggtcacggtactggccctgatcaccatcatcgacttggcggtcacggttgcgggcatgctcggattcgagcaggtgctcgattccgtctctcaggtggtgcaggatgtggcggcacgcgccggtggcacgtggcagtggggctcccgtgcggtatccgacaggatgcgtgagctttcgcaggatacggttgagcgtctgcgctgggccatcaatggcgtcatcaacgcacagcagaagcgtatgctcaagtccttcccgaagttccaggtgccggatcgtcaggacatcatcgactctttgcgcgaacttatgggcccgcgccgctagaataaggcattttactgaatcgcgcggctcggctggtgttcggcactgtcgccatgttctgcgaaacttgactgtgcccaattgggcagtctcattcacaattcgatagggagaagcgacaagctatggctcacgtcaccgacttcaaggaagcgggtttcaacaccctgcttgaggaactggaatggcgcgggttgatttcccagtccacggaccgggatcgactcgcagaagcactgaacggcgagcccatcacctattattgcggcttcgaccccaccgctgcatcgttgcatatcggcaacctcgtgcagctcatcaacatgcgtcacctgcagcttgcgggccatcatccgattgctctggtcggcggcgccaccggactcatcggcgacccgcgccagtccggcgaacgcacgctcaacccgaaggacgtggtggccggctgggccgatcgtctgaagaaccagatcggcggcattctggacaccgaaggcgcgaacgccgtacgtttcgtgtccaattacgattggaccgcctcgatgaccgtcatcgacttcctgcgtgacgtcggcaagaacttccgtctgggcaccatgctcgccaaggacacggtcgcccgccgcctgaactctgaggaaggcatctccttcaccgagttcagctaccaggtgctgcagggcaacgacttcctccacctgtttgacgaataccactgcacgctggaactcggcggctccgaccagtggggcaacctcacctccggcctggacctgatccacaaggtgcgcggtgtggacgtcaacgtgttcaccagcccgatcatcactgatgcttccggcaagaagttcggcaagtccgagggcaacgccgtctggctcgacgccacgatgctcagcccgtacaagttctaccagttctggatcaaccgcccggacgtggagatggaaagcctgctgaaggcgttcaccttcctgcccaaggccgaaatcgaacgattggtcgaggaatccaagaccaaccccggcaagcgcgaggcccagaagacgctcgcctgggaggtcaccagcttcgtgcatggcgaggccgctacacaggctgccatcgatgcttccggtgcgctgttcggccgcggtggcaacctcgaagacatcgatgaggaaacgctggaatccgtgctcgatggtttcaaggtggtcggcgagaacggcgagcacgtcttccccgtctccaagccgggcgatcgcgtaatcgacgccgcccaggctgccggactgttcaagtccgcttccgaggcacgccgcgccatcaagtccggtggcgtgtatctcaacaacaaccgtatcgaggatgaggagcaggtgctggccgaagccgacttcctggccggccgcttcgcgctcatccgtcgtggcaagaaggcgctcggcgccgtggaaaaccgttaatcaacaacgaattaaggaaaacaagtaatggcagaaggtaacgagcgttccggcaagtcctacggcggcggccataaggggtatggcgatcgccgaccgggcaaccgcggcggcaagggtttcaagccgcgcggcaagggcggtttcaagccgcgtcatgacggtgaaggtttcaagccgcgtcgtcgtgaggatggcgaaggctacgcgccgcgccgtgatggtgatggcgagggccacggcggctaccgcaagtcgtacggcaagggtggcgacttccacaagggcggccgctctggtttcggtggcaagggcggctatcgcggcaacggtccgcgccgcgatggcgacggcttccgtccgcgccgcgaccgcgatggcgagggcttcaagccgcgccgccgtgaggatggtgagggttacgcgccgcgccgtgatggtgatggcgagggccacggcggctaccgtaagtcgtacggcaagtccggtggcttccacaagggtggttaccgcggcagtggtccgcgccgtgacggtgaaggtttcaagccgcgccgcgaaggcggctaccgttcccacgaaggcgagaacggcgagaacccgcgctaccagcaccgtgacaacgatcgtcgtgatttccgtcgcgatgatcgccgtgacttccaccgcgatggtgagcgtcgtgacttccgtcgtgacaatgatcgtcgtgacttccgccgcgatgaccgaagggataacgatcgccgtgatttccatcgtgatggcgatcgccgcaacttccgcagggacgaccgccgcgacaacaaccgtcgtgacggcgaattccgcgagttttcgcaggaagagaagcgccagtaccgtgaggagaagcgctctgaatacatgaggcgtccgcgccgtaactccgacggcacgatgagcttcccctcgcagaacccgtacaccgaccgtcgtcccgacgagcccaagatgcccaagggcatggaatggtcgatgctgtccaaggatgagcgcgaacgtctgcgcggcctgtccaaggagcatgcggagaatattggtctgcacatcctcgccgctttcgcgctggaggagagcgatcccgaacttgctttggaacacgccaagtgggtggcccgtcaggcctcccgcatcgactttgcccgcgagacgctcgcgttcgtggcctaccgtcagggcgactacaagctgtccctgcgtgagttccgtaccgcctaccgtatgaacggcttcctcgactacctgccgttcatcgctgactgcgagcgtggtgtcggtgaaccgaagaaggccgtggaactggcgctgtccgatgagggcaagcagctgcatggcgctcccaaggtcgagatgttcctggtgtatgccggtgcccttggcgatttggagatgtgggacaaggccattgaagtggttcataccgtcggccgctctcagggtcttccgggtgagtaccgtatgcgtgccgtgcaggccgagcagtacttccttgaagaggccggccgcagcaaggaagccgagcagcttaatgacctgctggaccgtcttgaggatcagtatgccgacgaggagattgacgaaaacagcgacgacgtggtgattgaccacgatctcgaagacatcaccgacgactccgacgtgctcgagaagctcggcatcgatccggacgaggcgcagtacgccccggatctggagcaggaatacggcgatgaggacgacgaggctgaagacggcgatgccgagtccgatgaggccgatgtcgaaaatgctgagtccgaggatgcatcggaagaatctgaggaatctgaagccgaggagtcttccgagtccgctgacgatgccgttgaaccggctgagtccgacgagaccgagaccgaaaccgaggagtgagcggcgtaatgacccgtttcctcaaaggcaccgatcgcccgctcgccgaggcctatcagcttgcgctgctggacctcgacggcgtggtgtatcgcggcaagaatccggtcgaatacgcagccgattccattcgtgcggccgaagccgccggcatgaccatcgaatacaccacgaacaactcctcgcgcttccagcacgtggtggccgatcagctcaagggcttcggcttggacgtggagccgtggcaggtcatcacctcttcggtggtggccgcccgtgtggtggccaaggcgttgcccgccggcgcgcgcgtacaggtattgggcgccgagcatttgcgcgatgaggtcacccgcaacggcctgaccatcgtggacggtcctcaggaccgcccgcaggccgttattcagggctggtatccggatatgacttggcagatgatggccgatgccgcgttcgcggtcgaggccggagccacgtatttcgtgaccaaccgcgacctgacgattcctcgtgaactgggcatcgcccccggttgcggatcgatgattcgcgccgtgatcacggccactggcgtcgaaccggtcgcctccgctggcaaaccggaagcgtacatgtacgatgaggcccgcgaactgaacgccgccgaaggccacgatctggtgcccaaggaggcgtccatcgccattggcgaccgactcgacactgatatcgaggccggtaaccgcggtgactatgattcgctggcggtgctgaccggtgtcaccaacccgaccgaactgatgctggctccggcacacctgaggcccacattcatcgcccttgatctgcgtgaactcggcgaagcccaaccggagccggtccgcgacgagagcggtacttgggaatgccgcaaggctagcgcttggtttgaaaacggccaggtacacgtcagcgaccccaccagtatggacggcctgcgtgccgccgtatgcgccgcatgggaagccgccgaccaaggcgcacagctcagcgaggccacggtaccggtgttcgccatcgaggcatagtcctatgcctacggatagcgaacacgcgccggtcaccgagcgataccccgaacttgcggatattgatgaacaagacaacgaccgcaagcttgagacctatcgcaacgtgctggaatcgttacaacacgagcttgataacagccgcagctagcagaggagattcattctcccgccagcggaagatgacgtgaagtgctggatggtgggtccatgccgagccaccccgttggtggatggtgggtcgaaaggaaggtatatgaccgagcaacatatcgatcccgcgaccccacttgatcgcctcgacatgatgctcgtggcttcgggactggtcgaatcgcgggccaaagcgcagcgactcatcaaagccgggcatgtgcgcgtggacggcgagaccatcaccaagccatcgttcatggtcaaagccgggcacagcgaactcgccgtggataagggcgacgactacgtctcccgaggcgcttacaaactcttgggcgcgttcgagacctttgccggcaatggccttaccgggccggaaagcttggaatgtctggatatcggtgcctccaccggtggcttcaccgatgtactgttgcgcgggggagcggccaaagtcgtggcgctcgacgtcggccacggccagctcgacccgcgcatcgccaatgacgagcacgtcatcgaaatgagcggcgtcaacattcgcgaagtagaggccgacgacctgccttaccggccggcgatgatcgtctccgacgtctcctttatttccctgacctatgtgattccggtaatcgcgcgcatcgcggctcccggtgcgcagattgtgttactggtcaaaccgcagttcgaggtcgggcgggcaggactcggcaaaaacggcatcgtggaagatccggcattgcgggagcgggcattgcacgacgtggtcgcctgtgctgaacagcacggacttgacgtggtggccactgccgatagtcccatcatcggcacccacggtaatgaggaatacctgctttacgctgtcttgagatgaatgcgttggcagtctccgttcaccagcagcacgctggaggtacggtcgatgcctattgcggtggcacacgtggcgctttccaccgcactgccgttgcgtagcatggcggagtccgccgtcaaagtccggcattgcagatggttggcttcaaccgtgacggctgtgatatggcgaaccatgctgccatcctcatacccatccatatcaaaacgagaaaacatcgtactgcgcagtggatgaacttccagagccctgctgttgacgtcatgacccttcaacacgccgttcaagcggactgtctgaccgctaatatgacgggtgcctagggagccattgacggacagatttccggaacaaacgatatcgctgttgcatcgcagtttgccggtaaaggttatttcatcgcaaataatgtcgccgccgacttcgatgtcgccgctgccgctgatgctggatacgcgaatatcaccatcacaccgcacaatgccactcttgatgaccagtttgtccccttctataactgaggcctcgaggatgctggtcacaatcatggtgtgaaaatgcgcgccatcggcaagacgggaacgttggtccactcctatagtgccgtagactcctttgcctatcaacgtgcaattctgcgtatgcttgcccatgatgataaagccccctcaatatggacgtacagctttatggcttattgccccaataatgagcgcatccatgttgaggggggttatatcggtcacgatgtgagcagatagggggtatagcgagcgcagttagggggggttagccttggatgaagtggtcgatctgatcctgcttgcccatgaggatgagttcgtcgttgcgatgcatgaccagttccttggagccgtactggaactccttgcctggggccttgaggcccaccacggtcacgccgtatttgtcgtgcacctgcacgtcctcgatgctgcgactcaccgcgtataggggcgtgtggatcttgacgacggtgtacgggccgtcgatttcgatgtaatccagataattgccggccaccagatgacccacgcgcttgccggcatcggtctccgcattgatgatgtgacgggcgccgatgcgctgcagaatgcgcgcatgctcctgggacacggacttggcccacagatcggaaacgccggcatccagcaggttgccggtgatgatcaccgaagcctcgatgctgtcgccgatggccacgacggccgtgtcgaactgggaggcgtcgatctgctcgatggccagcacatcggtcatgtcggcctgaatggtgggcagatgcgcggaccaacgggccacaagctccgggttcttatccacggcgagcacatcctgacccatctggtcgagggtggcggccacggacccgccgaaacggcccaggccgatgaccagcacgcttttgttgccgctcggttttgctgccatgatgatggtcctctctatgccggatttctgtgtgccgattgaatggacgatcagccaacgataatgttttcctgcggataacgaataggttcgggagccatcggtctgctgatggagtaggcgatggtcaacgggccaagtcgtccgacaatcatctcggcggacagaataaacaggctggccggattgccggcgcttgccacgcccaccgaataaccgcccaacgagaaggccgagcaggcctcgaacacggcgtccacgaatgcgcagccggtggtgaacatcagcatcatcgcaccgaccataaccagcgcaaagcaggccgtggtcacggacacggcggtcatctggacgcggcgggggatacggcggcggaacacggtgacatcgcgatggccggtgaatgcggcgcggcaaatcaagagaatcaccgcgaacgtggtgacacggatgccgccggcggtggatgaggagcctgcgccgatgaacatgagtatgctcatgaacaccttggtctcattcgtgacttcgggcacccaggaaatatcgaaaccggcggagcggggcatgacggcggcgctcatcgcacggcgcatcttcatgccgggaccgtctgcggggaacaggccggtattgccccactcgaccagcaggaaccaagccagtgaggtggccaccagcacagcggtggtcaccaaagtgagtttggtgtgcaacgtccaacgtttcgggctgagatgccggcgtgcgcactgcaccagattcagcaccacggggaagccgagcgttcctatgaatgcgctgatgagaatcggcagtcccacgccccaacggttcacatgcaggccggtggcgtcaggcgtgaaaccggtgttgttgtaggccgataccgcgtagaacagcgcctgccacaatgtacgtcccatattgccgtggttcacgcggaacaggtcgggcagcagcagcacgaaggtaagcacctcggcgatgatggaggtgcccaataccacggtgagtacgcctttgacctcggaaagcttcgtggtgcccagttcgttcgcggtaagcatgcgctgggagaccttgagtctgcgggaagcgccaagagccaccatcgaggcgaaggtcatgacgcccaggccgccgaactggatggagaataggatgacaacttggccgaacgtcgaccagtattcgccggtgttcaccaccggaatgccgcaggtggacagggccgagacggcggtgaagaacgcgaccgggaagttggtgaagatgatgtccgatgtggagatcggcagcagcagcaagccggtgacgatgatgatcagtgcgccgaaatacaccatggacacacggcccgggtgcctgagcagacggtcggtgatgctgatgcggcgaatgcgcttggcggttttatcgcttttgtctcggctcagtacatcggccgaataccaccatgacaggcccttcgaggcctcctcattggcggaggattcgtcgaagtcattggccatgggtcctcaagctcctcaactgatactgctgtatggtcatacggcatgccatcgcgctgcgcacggcacgcgtacggtgatcgcgcgactgtatgccattgtatgccgaagccttacgttaatcgactctgcggaacgttgtcggcgacgcgccacgaagcggcatttttcgaacacctgtacgagtgatgacggtgtctgcggctagaataatgagcagtgcgaccgaatcgacaggaggatgccatggccaagcgcaacgcggtggtggtgacgcataccaggctcaggcagaccggaaccgtagtggccgaggcggtgagccagctgcgagtggccggtttcgaagtcaccatcatcgacaacaccgaggcccccgatttcggcgtgcagccgccgtgcgtgtcggacgacaccgaaatcgtcgtggtcctgggcggcgacggcacgatactgcgcgccgccgaactcgtccactgcacccaggtgccgattctcggcgtgaacatggggcatgtcggcttcctggccgaattcgaaagcttccagatcgacgaggcgatccgccgggtcgccacccacgactattcgatcgacgaacgcatgatcgcccatgtggacgtctggctgcctggcaccaccaagcccattgaggattgggcgctgaacgacatcacgctggaacgcgccgaccggggcaagatggtcgaactgtccatccgcgtggacgatgtggagatgaactcgttcggcgcggacggcgtcatcgtctccacgcccaccggttccaccgcctacgccttctccgcgggcggtccggtcatgtggccgaacgtcaaggccctgcagttgattccgttggccgcgcatgccctgttcgccaggccgctgatcatcggctccggttcgacctttaccatcgatattctggacgattccatgtccgaaggctggatttgctgcgatggccgccgccagcgcgccctgccgcagggtacgcgcgtcatggtgcgcgaatcgcgcgataccttgcgcctcgcccgactctccggcgtgccgttcaccaaccgtctggtctccaagttcgatctgcccgtggtcggctggcgcgagcacgcgcgcaatgaggcctcgagccagccgctgcatcacgggcacacgctcccggcggccgcgtatgcggctggcgttgccggtgacgctggcgtcgctggtaccgatcccgacaagccgggcgaacgtgacggcaaggcaggagcctgatgctcgaagaactcgatatccgcaatctggggccgattcgagaagccgccattgcgccggccgcaggcatgaccgccatcaccggtgagaccggcgccggcaaatccatgctgctctccgcgatccgactggtctccggtggggccgccgaatcctcgcgcgtctcggccggggcggacgaggcttgggcccaggcgattttcgcgctcgcggatgatgccgtcgcatctgaacattccggcgacaccaacgatgccggtgacgatgccggttctgacgattctgacagcgggctcaccggtgctgccgtggccgtggccaaggcccacgacgcgggcgtcgaccccgaagacggcgaattgttcctttcccgcaccgtacgcgcttccggacgttcgcgggccgtgctcggcggcaagtccgtaccgcgttcggtgctgggggccatcgccggcgaactggtcatcattcatggccagaccgatcagctgaaaatcgcggccgccgcacggcaacgcgagtttctggaccgggtggccggagacgaagccgaactggccgcctaccgcaaggcgtgggatgcgctggccgccatggatgagcggctggaacgcctgcgctcgcaggaatcctctgcccgccaacaggccgactacctgcgcgaatccatcgaccgcatcaaccgaaccgacccgcagccgggggaggacgaggagctgaaggcgcgccgcgaacgcatcgaaaacgcggccgacatcgcccaaggcgtgggttcggcgctgggcgcgctggatgcctcgcaggtggatgtggacgccgccgacggcgcttcggccgtggaactcatcaatcatgcggtgacctcgttgcgcgcgattcgcgtcggcggcacgttcgccgagcaggccgatcggcttgaatccatcaatgccgatttgggcgacgtggtgttcgccctgagccaggagctgggcgacgaaggcagcgtggaggatctggaccagatcaacggccgtatccacgagcttggcgacctcacccgtcggtggggccccaccttggccgacgtgctcgcttggcgggacaaggcggcgttcgatttggaggatctggacgcctcgccggaaaaggtcgccgaactcgaatccgaacggcaggcgctgtacgatgcggccctcgccgccgccgacgtgctgagcgccgcgcgcgtggctgccgctgccgacttgggcgcgcgcgtcactgaagaactcggctcgctcgccatgctgggcgcctccttggaagtgcgcgtcacgccgcgagacaaggccgatgatccgctcggcccgtatggtcgcgacgatatcgcgttcctgtttacgccgttcgaggggtcgccgcagttgccgatgggcaaaagcgcttcgggcggtgaactgagccgactgatgctggccttggagctggtggccgccgacacgcgcggcggtgccgaccagaccttcatcttcgacgaggttgacgccggcgtgggtggcaaggccgcggtcgaattgggcaaacgtctggcacggctggcccgcagcgcgcaggtcatcgttgtcacccacttggcgcaggtcgcctcgtgggcggacgcgcagttcgtggtcaccaaggagccgccggatgccgatgacgacgatttgggcgtggtcaccaccatcgccgaagtcaacggcgaaacccgcgtccacgaaatcgcccgcatgctctccggcagcgaatccgaagcctccctagaccacgcccgagaactgttgaaggaaagtgtcctatgaccaaagccgccatattcgacctcgacggcaccctcctagactccatgggagtctgggaccaagtcgacatcgacttcctgaacaagcgcggaatcgaagtgccgcccgactacatgaccaaagtctccgccatgcaattccgccagatcgccgaatacaccatcgcacgcttcggccttacagacacgcccgaagagctcatgcaggaatgggacgacatggccagcgtcgcctattccaccacggtcgaagccaaacccggcgcgcttgactatctgcgcgatctgaaagcctccggtgtcaaactgggtgtcgccacctcgctgcccccgcatctgcgtgagccggcgctacgccacgtcggcatgttcgaactgttcaacgatatcgtctccgtcgatgatgcgaacgacgtcggcaaggaccagcccgacgtctacctgctcgccgccaagcgcctaggcgccgcgccggtcgactgcacggtgttcgaagacctgctggtcggcatgaagtcggccaaatcggtcggcatgaaggtctgggccatgcacgacgactcctccgcctccgattggcccgaaatctgccacctggccgacggcgtcctcttcgacttccacgacgctccgcgcgtgctgtgataaaaaagttacacccccgctggcggggctgtcggcgtaacggcgttgtttggcataggtgcccctttccgaggccattgtaggcacggcccatgtttcgacactgtatgttggcgaggtgtttgctcactgttcaactgttatgcaacacaccttgacagttaagcagaacagttatactgtgttgtataacagctaaacagctggggtgctagtcaaccacaatcgaaaggggcataggtgaaactgatcatctcatccgtgtccggtgaacccatctacgagcaaatcaaaacccaaatccattcggcggtgctcagtggcgagttgaaggcgggcgaggccctgccttccttgaggaaactcgccaaggagctgcgcatctccgtactcaccgtcaccagggcgtacaacgaactggccgatgagggcgtggtgcagaacatccaaggcaaaggcactttcgtgatggacaagggcaacgaactgatgcaacgtcagctcgaaacccggattcgtgaaagcctggccgaggcaagccggggcgccaaagccgccggcattccgctggacgcattggaccgcatgctcgaagaggaataccgcaaggaataacctcaagaaaggaccatggacatgaccgccatatccgaatccgacgcgatggcgttgcaggtcaccgacgtcaccaaacactatgattccggcttcacgctggacgacgtgaccttcgacctgcccaagggctacatcatgggactgatcggcccgaacggcgccggcaaatccaccctcatcaaactcatcctcaacatgatccaccgcgacgccggttcgattcacgtgctcggcctcgacaacatcgccaacgaggagcccgtcaaagaacaactcggcgtggtgttcgacttcagctacatgcatgaacagtggcaagtcaagaacattgaacgtattgtcgcgccactgtatccatcatgggacggtggatgctatcacaagtatctggatacttttggccttggtggtgcacagaacggcaagaaacatatcaaggatctttcccgcggcatgcagatgaagctgatgctcgccatcgcattgagccatgacgccaaactgctgattctcgacgagccgaccagcggactcgatgtgcttgcccgcgacgaactcatggatatactgcatgcctacattgaggatggcgaacattcggtactgttcagcacccatatcactgccgacctcgaacgtgccgctgacttcattacctacatcaccgatggccgtctctactacaccggtccgaaagacgagtttgaggaatcgttccgcctgattaagggcggtccagacgaactggcacaactgcctgcggacgtggtgctgggctcacatacgtatgccaccggattcgatgcgctggtccggtcagacaggcttgatgctgttgcgtcggtggtttcggggcttgtcgttgaatcggcttccattgatgacatcattcgactgaccaatgcccatgattccaatcgtgacttgagcgggaggtgagcggccatggaggcaatactgagggtgtcgcggtctcggcaacatgcattgaccactgcattgcgcgtcgatatggcctacctgtgcgtcggcgaacggactgtgttctcgttgttgttggcaccgttgttctccgtcatctttcaaggtgaagcttatggtgatggcttcggctatcgcatgggtgtcatcatgacggtattcacctgcgccatgtgggtgctaaccatggcggttgctgacttacagaacggatatcgacttcgtggcattattccggcttcgaggaagagtcaggtggccgcgcgatatgtggttggattggtgatttccgtattgtcgatagcgatgatcgtgctgattgacgggttgcaagtgctggtcaatccggattggtcattcgcgggcaatctgtgggcggctccgttgggaggtttctgcaccgcgctgatggtcgcgcttatcgtgcccacgggttatctgtggaccaaactaggcggtcttcaagtcacgatgatggtgatttatgtcgttgtattggctggattcatactgctatctattttgcctgcttcggtgaccaaaggattggcccatgccgcgaatgccatcatcgcgcaacgattgtggctggttattgcggtattggcaacgacggttgtggcatatggaatctcgtatgtaattgcctctcgcatatttgcttcaagggaatggtgacgatgagctggaaatccgtagtaaagcaatgtcgattcgattgtgtcgggacgggtctgttcagcgtggcgaatatggtatttctgctggttttcccggtgctgtctatcgtggtatcgctggtgatgatatcgacccacgtcgatgaacacgttgttagtggtctgatgggcggactcggaggtttggcatcggcgatggcatgtatgagtgcattggggcctgcgtcatccgaggaatctgcagggcacagtgccatgcgagggctgattcctgtttcacgcactgcacaagttgtaggtcggtacctttttctgttggtggttggcctgctctgggctttggacgtggtgatatgcggcggcgtcttcattgtctttggcgatatagcagatatggggtggatcggtaccttggcagcaggtgctttcatcttcgctttggctatcattcttgggtcggtgctgctggcctgtgcataccggttcaccttccgcaagatgatggtggcctctggcgtggtcctggttggcttgtatgccgtcattgcgctgctggcccgattgcctgttgactggcaatggcttttgctgaatattaccgatttcctgacgatctggtggcatacggcgcttgttctcgccgtgttgtgtctgctcgcatattttggctccatgcttatagccatccgcatctaccgagccaaagaactctagccgcgcatttgtccgaccgcgatgatcttcagccacatgtcgatcggcagcggcacggtgcggaacatcgc

SEQ ID NO: 723 - DNA, 9550 bp, Unknown
  R14_15m  MAG No. k141_42575
agcatgatcaacggcaggaagtagttgttccacgtcgccacgatcgtgaacaacgccgtcgtcacgatgttcccgatactggccaacaacacgctgggggcgagcacgtcgatgtccgtgcccaggaaatcgttcaacgaacccaccaggccgtacttcgcgccatacacgaaaccccagatcaacgtcgacaccaccgcaaaaggccacatgaatttccatccacgccaatcggccttgtgcttattcacacgagccttgcccgaatgtacgggcgcagctgcgatatcggctgaagccattcccaacccctctccttcgaaggttgaccgaaatgtttgcgttatcaccataacaccatttgtaacattgtccaatcgtgttgagtaccgtgttgaattaagggtttctcagtcactctgctacaatggtcacgaagacaacgatgttatcgttaccgtaagcggccctaagataagcgttgcaaacgaaacaccgacattaatgagtcaagcgagggtgaaatgtcgaggccaacacaggtgtccatgcaagacatagcgaaagccgccggcgtttcgccacagacagtgtcccgcgtggcgaatggcagcgatgcggtgaaacccgaaacacgccagcgtgtcgaagctgcaatgaaacgccttgggtatcgtccgaattatgcggcccgagccctaaagcacggccgcttccaggatatcggcgtggtgatgttcaacaccaccgcgttcggcaacgcccgcatccttgattctattgtggacaacgcggccgatgacgattattcagtcaccatccagaccatgcgccacggtgcggaacgcacgctttccgccgccatcgatcgcatgcagcgtcagccggtggatggtgtcatcgtagtgctggaggaacgcatctccgatttcgtcggatacaagcctccgcgagaacttccagtcgtgctcatctgcgaatccgccgccgaccactgccccaccgttgacgccgaccagtatggctgctcgaccgctatcgtcgattacctgatgagcaaggggcacaagaccgtctaccacattgccggaccgtccacctcgcgcgccgccgaaagccgcgcccgcggttggcgagaagcgttggaacaaatgggagcacgcgtaccgagcatgtacatcggcgattggtgcgcggattcaggctaccaggccggcgtggcgttggcccacgaccccgactgcacggccatctacgccgccaacgaccaaatggcatacggcgcaatgctcgggttgcagtcagcgggcaagcgcgtgcccgaggatgtcagcatcgtgggcgtcgatgattcgctggtagatatggttccgcgcttgaacctgacgaccatgaagctgcgctttgacgacattggcgccaccgccttctccatggtccgccgtcaatgcgaaggcgagaagataccggtcggcgtcaaaaccgtaatcccgccggaactgatcgaacgcggttccgtgcgcgacatcagctgacgagcggcatgtgctggcatccactggtacctgtcagtgattcacctgctagtgatccataggcaattccgcaccaaccaatcgactcggttgtgcaatattctgcacatttccaactatgtgcagaatattgcacactttactatactgtgatatattttgcacatgattgtcatggatatcgccgaatacgcgcggcttatcaaggatgaaaggcaacgccagggcatcagtcagaccgacatggcccaacggctgggcgtgtcacgtcgctggctgatcgaatttgaacacgcccgagtccccaatcccggattctccaccattctcagcgctctgaccgagcttggcttgtcgctggatgtccgcaaaaccccgcagcccgccgaactctatgaatggtgacaccatgagcgaaaacactctcaatgcatttctcggcgaaacacccatcggccagtttcgaagaacaaacgatggcagcattattttccaatatcacgattcctatcgttggtcgcaatcacccacaccaatatcgctttccatgcccattaccgcagccgaatattcaggcgacatcccgcgtaatttccttgaggccctggtcccggaatcccctcaggcccgagatgaagccatgcgattgcatcatgcccgatcgacaagcgcatttgatctgttgcaagccatcggattcgatgccaccggcgcattacggctgtccgccgacccgcacttgcccatagatgacgattcacttattccaatcagcgattcgcagatcgcgaatcgactacgcgcagccgcccccacaggcatccagtccgcaagcgtagacgagcattggtcggtcgcgggacagcagggcaagatcgcactgaggaaccgcaatggatcatggttctccaccactggaatcgcgcggacgactcatatcatcaagcccggcataccgacccttccacaccaagcattcaacgaacacatcaccatgcgcattgtggaggcgatgggaatacccgtggcccacacctcttttcacatctttgatggggtcccagccatcatcagcgagcggtatgaccgtatagtgtccgccaatggtacggtgacggccctgcaccaagaagactttacccaagcgctgggcattccctcatcgctgaaatacgaggaacacaacggcccaacgtccaatgcatatgcggaaatgttgcgcaagcacggtctgcccggtcaggccgaaagcaatatccgagccttcaccgacggcatcctcgccagttatctcgtcggggcaacagacagccacgccaagaactactcgctattgctcgatggcgcgtccgtgcggcttgccccgctctatgaccttgcttcggtgttcccttatttggggcatggcaagcagatcataaatgccactttggcgatgaacatcggcggacgccgagatcttcttcaattacgccgcaaacatctggaacgattcgcacagcggatgggattagatgaggaatccgtgattttacgattccacaccttggtggataggctgccggaggcattcgacagcaccgtgcaacccgctcacgacgttatcgcgagcattggtgcgcaggaattcatcgatagctatcgcaagcgcatcatgatggtgtacgacgatgcaatgagctggatggccagtcgaaagggacagtgattcggacgggcggggattggtttcgccatccccctaagaaatcagatcttaagcggcacacgggaaacgaattcgcgcttctcgcctgttattggatcggtgaatcgtagcacacgcgccactaattgcagcggctggctgaaatcgtcgtaggggcgtgtctggatgcgcgggtagaagtcgtcgcccacgatgggcaggccgagcgaattcatgtggacgcgcaattggtgggttttgccggtgcgcgggtggagtgtgtagcggcagatggggtgatttcccggatggggaccaccctccggcgcttcgcgccacctcccgccagcgggagggaaacagaggtcaccgcgctcgatgagggtttcggcgttggccaaacccggttcctcgaatgcggccatcgtgccgtgttccttggtgatgtgcgatcggcgcagcaatgggaacgggcgtggcggttcgacctgcatgatcgtgccgaatcgcgggccgctgatcggccggcagggtgccaggcattcatagatcttgacggcctgccggttctggaacagcatctgatacgcgccgcggcaggccgaatcccgcacgaacaccaatacgccggcggtcatgcggtccaatcggtgcgctggcgtgatgtccggctcccccagccgctcacgcaatcggatcagcgcggtctgccgataccacatgccgcgtggcatggtggccagaaaatgcggcttgtccaccacgatgatccgctcgtcctcatacagcacgtccatctcaaacggaatatgaggctcgtcaatcacataccgatgtggcttactcaacggtcacggacttggcgaggttgcggggcttgtccacgtcgtagcccttgagctttgccatgtccatggcgaacagctgcagcggcaccacgtcaaccagcgggctcatcagcgttgggcaggcggggcgccagaacaccacgtcagcgtaccgttccacatccgggtcgccctgctcggccacggcgatgatgtacgcgccacgagccttgacctcctcgataccagagatcaccttggcgtgcaacacattgcggccgcgctgcggcggcacgatgaacaccacgggctcaccctcgtccaccagcgcgatcggtccatgcttgagctcgccggccgcgaagccctcggtgaacgtgtaggcgatttccttgagcttcaacgcgccctcaagcgccaccgggtagcccacgtggcggccgaggaacaagaaggagttggcgttcaccatgcgctcggcggccgcctggatggtcttgggctgggtgtcgagcacccactgaattttgcgcggcatgtctttcagggagtcgagcatctgatgaatctcatcgcggaacatcgcgcccttgacctgcgccagatacaggcccagcaggtaggcggcggtaatctgcgccacgaacgccttggtggatgccacggcaacttccgggccggcgtgtgtgtagagcacggcgtcggattcgcgcggaatggaggcaccctgcgtgttgcagatggccagcaccttggacccctgttcgcgcgcgtggcgcagggccatcagcgtatccatggtttcgccggactgagaaatggccaccacgagcgtacgcggggtcagaatcgggtcacggtaacggaattcgtgcgcgagttcgatttccacggggatacgcacccagtgttcgatggcgtatttggctacctggccggcgtagctggcggtgccacaggccacgacgatgattttgtcgatggccttgaagtcgtgttcgtcgatacgcacttcatcaagggtgatgtcgccattcgtgtcgaagcggccaagcagggtgcgctgcactgcggcagggtcttcgtgaatctccttgtccataaaggaatcccagccgcccttttcggcggccgaagcatcccaatccacggtgtaggtcttcgggttttcgaccacgttgccgttgaaatcggcgacgatggccttgtcggcggacacgcatacggcctgatcctggtcgacttccatggcgcgcttggtgtaggccacgaatgcggcgacgtcggaaccgaggaagttctccccctcgccaaggcccacgaccagtggcgaatcatggcgggctccgaccacgatgtccggctggcggcagtcggtggccagaatggtgaacgcgccttcaagcatgcgggccatacggcgcacagccttgaacaagtctggcttgccttcgtccgcgataatcttgtccacgatcttgccgagcagcttagcggccacctcagtgtcggtggcggaggcgaatcggtagccttcggcttgcaggtcgaaacgcagctgagaggcgttttcgatgatgccgttatggatgatggccaccttgccgtccatgctggtgtgcgggtgggcattcacgtcgctcggctcgccattggtggcccagcgcgtgtggccgatgcccaccgtggcgagcggcatcggcttgcgctcgatgtcttcgaccaggttcttcaaacggccggccttcttgcgcacgaccaccttatccatgccgggcgcggtcagcgccacaccggccgagtcatagcctcggtattccagacgttccaggccttgcaggcagacctccaaaggcttgccgcatgccgtttcaatatttcccgcgtatccaacgattccacacatggctcaccagcctagcggacgattattgcgcaaagcgaatccaacccgccgcctttgcaggattggaacatgccccttcgtgaaaagcgtacgctgagttcatcagcgtacgcttttggagctgcaacaacgagccttcctacagcacatgctgtaggcggagccgtaaagcggggagcccagtgggctccccgtaggcgacgccgaagcacgacagtgctgaggcaatataacagccttcctacagcacatgctgtaggaagtccttaaacctaggctcggtggggtggtcgatgatgtcggggccgcccttttctacgactacgccgccgtccatgaacacgatctggtcggcgacttcgcgggcgaagccgatttcgtgggtcacgcacaccatggtcatgccttccttggccaaggaacgcatgacgttgagcacttcgcccaccagttcggggtcaagggcggaggtcggctcatcgaagagcatgatctccggcttcatggccagagcacgggcaatggccacgcgctgctgctgaccacccgacagctgggaggggtaatagtccatgcgatcgcccagaccgacgcgctgaagctcggccacggccaggtcacgggcggctttcttggactggtgctgcacgtggatcggggcttccatcacgttctccagcgcggtcatgtgtgggaacaggttgaagcgctggaacaccatgccgaggcgagagcgctgtgcggcgatctccttatcgtccaaggtctgcagcatgtcctggccgtttttggtcacgtgcttgtagccgatgagttcgccgtacacctcgatggaaccgccggtcagggtttccagctggttgatcagacgcaggaacgtggacttgccggaaccggagggccccagaatcacggtcacagtaccgggcataacggttagatcgatgcccttgagcacatgcagcggcccaaacgccttgtgcacctgcacggccttgacagcaggaatcacggaaccgtcagccgccttgcgcacgaccggggcaacactggtgatgtcattcgtagtcataatcgcgctcccgccttatgcattcaatccgacaaatgtggtctggttgagcttgtccacgtcatccttcggttcaccgtcggtcttacccggcaatggcgtctgcttgcccttggtgcccaccggtcgggcatcgaagcccttgccgaagtgcgcctcaaggcgggactgcacaaccatcagaatggaggtgatcagcaggtaccagaagcaggccacgagaagcagcggaatcggcttgtagatacggttggcgatggcgttggtggcaaactgcaactcgagggtgaacggcacggcggtgaccagcgaggtggtcttcagcatgccgatggtctcgttgccggtgggcgggatgatgatgcgcatggcctgcggcagcacgatgcggcgcatgatgagcgtgcggttcatgcccagcgccttggccgcctcggtctggccggggtccacggcttcaaggccggcacgcacgatttcggacaggtaggcggcctcgttcagggccagaccaatccatgcggcgttgaatgcggtgaccaccacgttggagtcgatgctccagaactccaccgaggtgaacggaatgccgaggctgatcttaggaatcagcacggcgaacagaccccagaaaatgagctgcgtgtacacaggcgtgccgcggaagaaccagatgaagaaccagctgacgccgcgcagcaccggattgatggatttgcgcatgatggcaagaatcaccgacaggatgatcgccacgaccatggagatcacggtaagctccaaggtatagcgaatgccttcaagcacgttctcgttgaacaggtacttccagacggtgggccaatccagtcgcggattggtaatcaagccttgaatgagcatcgcggcgagcagtaccacgatcactgcggccacaatcgggccggggcgcttgaccggcaacgccttgatgcggttggggatgttcagcccctcaccgtcgacttctttcttcgccataatctggttccttggatgtgttaggcagcctgaactgcaagttgcaactagcgttgaaccttagtgcacgaatggggcgactgtgttacaaacagtgcgccccattcgaattttcgcgacagcttgtcgactattcgacggccgggttgatttcggccttgtccagtgcaccggattcgacgccccagtgctggaggatcttggtgtaggtgccgtcgtccatgagcttttgcatggccttctgcacggcttcggcggtctgggaatcgcccttcttgatggcgatggcgttcggcacttcatcgaagtccttgccgagctgttccagctgaccatcggtctgggcgatggcgtagccgacaaccggggaatcggcgaagaagacgtcggccttgccggtcaccacagcggtggtggcgtcggtctgctgcttggaggactggatggtgatgtctttcttgccgtccgccttgcactgcttggcggtcttgttgatggcctcttcctcgacggtgccggtctcgacggcaacgttcagaccgcacaggtcgttctcatcgacgttcttggggttgcctgtggccactgcatagcccatgcctgcggtgaagtaggagacgaagtcgacggattccatgcgctccttggtgatggtgaaggcggcgatgcccagatcgtacttggagccgatggccggaatgatcgtatcgaagttggaggagacgatttcggtctcgagaccgaagatgttgcccatggcgcgggcgagatccatgtcgtagccgatctgggtcttgccgtcggcgtcgaggaattcggccggggcgtaggaggggttggtgccgatggtgagcttgccgtccttggtcacggattcaggcagcagtgcggcgatggtgtcatccttctccacggagctgacatcgtagctggtgatggtggcggcatcggagcccttggcggaatccgtaccggcatcggccttgtcggaggcgccgcaagcggcggtggcgaacagcatggccgagctcagtgcaatggccataatggacttcagtttggtggactgcataatcgtttcttcttctctcttacgccgcttcaacggcaacgatcaacggttaagcatatttatacactacagtgcatacatatacaaaaagactcccgccgcagggcaacgggagtcttcatagtaaccgaaactactcgacggacgggttgatctcggccttgtcgacggcgccggaagagacgccccacgtgtcgaggatcttcttgtacgtgccatcatccatcagcttctggatggccttctgtacggcctcggcggtcttggaatcgcccttcttgacggccacggcctcaggggtcacaccaacgtcctcgccgagggcctcgagcgtatcaccggtctgcttgatggcgtagccggcaaccggcgtatcggcgtagaagatatcagccttaccggaagccacggcggtagtcacatcggtctgcagcttggaggactggatgtcg

SEQ ID NO: 724 - DNA, 20779 bp, Unknown
  R14_15m  MAG No. k141_43652
ggacgtgtagaacttgaacgcaccaaggaaagtgccgaactcaaagccggcggattccacgtgctcgtagatgcggtcgaggaattcagcggagtactggttgaagaccgcagggttgtagtactggttgctgatcaggtattcgagacgctcggcggtggaggcgaaccgcttgctgttggtggccacgtgccctgtcacgtattcgcgttcggcggccttgtctttgtcgaactggatcttgccgtcggcgtcatagaggttgagcatcgcgttgagcgcgtggtaatcgtgcgccgggtcgtactgttccgctgcggtgtcggcagtattgtcgagcggcaggccggtggcggtgaggtcagtcattggaaatccttggaatatggcagaagtgtgtttactcagacagttgctcccctcagtcaacttcgttgacagctcccctcggagaggggagccaatacctcgagggggtcaagatttactgttcggtgaagaagcggacgaggccgtttcgcacggcggcagtgtcttccggggtgcccatgagttcgtaacggtagaggtagggcaccttgcatttggcggcgatgatgtctccggcggcacagtaggcctcaccgaaattggtgttgcctgaggcgatgacgccgcgaatccactcgcggttggctggatcgttgaggaagcgtttgacctgaatcggcactgctttcttgaccacgccgccgccataggtgggcaccatgatgacgtacggttcgcggacgttcagcgccgggtcggcggcccgcaacgggatgcggtagacgttgatgccttcgtcctgcaaacggcatccggccacgaaccgtgcggtgttttcggaggccgacgagaagtagaccaatgcgccgatcgtcttgccttcggccgcgaattcgggctggctcagactcacgcggacaccgtggcggcggcgcggttgtcggcggccacctgctgggcgacttcgcgaatcaggtcggggcggtagccggtccaggagttgtccggcgtgatgaccaccggagcctgctggaaaccggcggcctgcagctgctcaagggtggaggggttctgcgtcaggtccacggtttcaaacggcacacccagcttggtgagctggcgcttggtggcatcgcactgcgggcaatgcggcttggtgaacacggtgacggtcatggcgactccccttgatgtggttctgatgaacagtgaagcgaaggccatattacagcggtgtgatttgaaatcaaggcactatatgtagtggcgcgtgtcacataacaaacctagatatagggtttttcgttgatattccgccattcccatgcacccccgaaaatcggcgtgcagcgacccgcccaatcacatgtggcattgttcacatttgcgtttgaaccgctcttcgactgatcctcaaccgccctgcaaccgccatcttgagtttcgaggggctgttttgaccctttccggagatctatctccgtttcgaggggctggtactcaagtaagcgcatccccaaaatggcggaatgacggtggggcgaagccgtttatacccgtgttctagcgggccaccagcccctcgaaacgggagtaaacctctacggaaggccaaatcagcccctcgaagcggagaacggatacctcggcaccccgtgtggagccagaaggcccggccggatgtccaaacgagcatccggccgggccttaaaagtagttgttcagttatcagaatcgatgcggcgcgatactactccgcgtctttacggctccaacagatcttcgatgcggcagccaagcgtgcgggccaaagcgagcacggtggagacggcagctttgccaaggtctttgcggcgctgctcgtacatttggatggagcgcagggtaacgccggagcggcgggccagcccggattggctgagtccggcgcgcacgcggatcgtgtgcagccgggagtcgccctcggtgcgattatgggcggcccgctcgtcgtacacgtcgacgaatcggctttcgtcggcttcgtgcagagtcgggtacagtcgcacgatatcgtcgagcgacagcacatcgagaatgtccgagaaccgcactcccctggtccattggcagtatgcgagtacccatccggcccagtattcgggtgttgagccggcgcgcagtgcggctggcggcatatcgagaatgcgcgcccaaccggtttgccgcatgacttcggccaccagctcctcgccggacatgccacacacgtatttgggcgtgcctcgcccgaaaatcgcggccgcctcggaggtggcgaagaagtccatgaataggccgaccggcaacccgcaatcgttcagcgcataatcgaaggcgccggccaagttggccatggcgtccggcaagtatgtcccatcataggcggggatcatcgttggtcactttctcgcggatgatgtcgcgcatgaacaggccgtcgagatcggcttctgcacttttgcggcggtaggcttcgcgagctgtgcggtcgcgctcgttacgcaatccgtggtaggtcgaagcgcgggcgatttcgcagccttggaaccgcagtgccgcgaatgcctgaggactggcgagtacgatctgcttgccgagctcgcccaaccgcatcgcctcagcgagttggtcgatggaaatcgcgttattgacaaaagcgcgggcgaacgagaaatacgaatcgtcggcacgatatccgacgatgacgtcagcctgactggcatccggcagaaacacttgtttcagatattcgatgccctgcgcggcgacggcggtggtcggctggaaacgacggttttcgaccagcatggccagccagttcaggatggtgtagggcggctgggacaggtccaggaagaggagcccgtccgtggtcaacgtgtaccgattcgcgaaaccgtcatccagtcccgcgcacgcccattccttggccagctcgacgctgcgcgtgcaatagaatccgcggccataatcgttgttcggcttgaccagcccgtattcaggatgcttgatgacatgcgaagagccatgccacagttcgatcgatgcggtctccattggccggctccttctctctccttacatattcttgattatatcactgtggtgatagtcataagggaaatacgagatgaaaaataccgctgtatacgttcgtacacaacgtgaaatgtatacgaacgtatacaacactgatgtccggagtcatgctccgcagtggcgcagcggacgcgccactacaatcggaatatgggactgaagacgtggaagaagtggacggactggccgctgatggtgctgtccgtggtgtttctggtggtgtattcgtgggaaattctctcccgcacgcatatcgcgctgtgtgaaaccgtcatcaacgtgatctgggtggtgttcgtcgtcgattatgtggtctcgctgtggttggccgacgatcgctggcggtggttcaagcacaacctgttcacgctgctgaccatcgcgctgccgatgctccggcccttgcgactgttgcgtttgctgaccgtgctgcacgtgctgaaccgcacctccggcatggcggtgcgcgggcgcatcaccgtatacgcggtcggcgcggtgggaatgctcatgtacgtgggcgcgctggccgtgtattccgtggagcgcggggcgtccggatccacgatcaccgacttcggcacggcgttgtggtgggcgttcgtgaccgtgaccaccgtgggatatggcgacttctcgccggtcaccttccaaggcaagatcattgcggtggtgctgatgttcaccggcatcgcgttgatcggtattgtgacggccacgctggcctcgtggatcgtggatcaggtcaatctggagacggatcggcgcgaggacgctcgggagaaggaagtggccaaggaagccgcgcaagaggctattgcaacatcagccaatcccgaaatcgacctattgcgcgaggaagtgcgtgagctgaccgctacggtagccggtctgcgcaccgaacttgagcgacgttgattggcgaagcgggacaaacaacgattctgccaagaaggtccgcgtcagttgttgtcaccgcggattgcggcagaatcattgtcgccacggctgttttcttcagtcggctcaacccaacttttgataatttttatttttttgatatttttgataatttttattttaggttgattcagcgaggaggcggtccacatgaaggcaaaggaaaacccattcaagccaacggcaggaggggaaccgcccctgctcatcggccgaggcaaagttatccgcgatttcgagaaaggtctcgataacggagtcggtgccccagggcgcgttatgctcgtcaccggcgctcgtggaaccggaaaaaccgtgatgctcactgtgttcggagaccgggccaaagcgcgcagatgggatgtcatcgaagaaacggcctctgccggactatgcgaacgccttgttgatgccttacgaaccgggcgaggggcccttgaccacctcactatccgaccatcgttgacttttgctggagcgggcatcggcctcggagaagccgaactatccccgaagcgtatgcccgaaacgttgagaagtgccattgccggacggttggatgcgcttgagaagcgccatgctgggttgcttatcaccattgatgagactcaagcggctgagcgatccgacatgattgccatcgccactgccatacagcatcaaatcagggaacgacgcaatatcgccatcgtgttcgccggtctcccacagatgatttctgatttgttcaatgacgaagtcatcacgttcctacgtcgcgcgaaaacgaacatgctcacagatattcctcttgatgaagtgcgcgatgctttcgccacaacattccgcgcctccggcatgtccatcaccgacgctcaattaagcactgcagccaatgtgacagccggatacccctatatgattcaactggttggctaccatatctgggatgccgcagacatgcgggactcggataccatcatcgacgctgatgttacggcaggtatcgaggaagcacgtattgaccttgataacgccgtgtgcatcccggagttgcaaggcttatccaaaaacgaccgtgagtatctcgaagccatggcagcgtcagatggtccctctcccaccgtgaatgttgcacagcgcatgggcaaaacgcctaactatgccgccacctaccgcaaacgcctccttgacgccttcgttatccgcgaaacagaacgaggcgaagtcgattttgccgtgcccttcctgcgcgaatacttgcgtcggaatcagtaatcggcacaatgcacagtatcgatatattccgttccatataatgacttttcgcattcagatacacaatggacggcctgttgagtagcactcagcaggccgtccattctatttagctattcagttatcggagacacacctcaggccttgaccggagcgccagcgacctgctgggaggccatcacgccgaacaggtagccgtcttcggagaagtattcgaaggtacgaccggcgaagtcgcggcattcgaatctgatatcgttatcgattcgatcagcggctcacgatactgcccttgcatcgctgtgccactgttgaatgtgcccggctggctcacctttgggtcaccgccgacacatccttgatgccgatggttatagagtcgcaaattcacgactggcgcacctgcccacgcacctatcctgtcatttcgagcgcataatttgctaccacatccggtcagggcaatcgaccttaatggcgtaaacggcacttctcaatacgtaaacggcactattcttggctcccctctcagagaggggagccaagaaatatcaagctcggcctcccaggagagagccagaataatgcaccggcaaggcattaggatggagggcatgagcgatttgaacgcgttgaatcttgagcccggcgaagtggttggtgggtatacgctgatctcccggctcggctcaggagctatggggtcggtgtggcgggtgcgcgacgacggcggcaccacctatgccatgaagattctgcgcgactccctgaccgacgagtcagtggcaggctccggctctgcgtccacggccctgcacgaccccaacctcaagcccgatgtcacgccgcgcgagcgcctgcggcgcgaggccatggccttgaagaaggtcaatcatccgggtgtgtgcggcatcgtggatatggaactcgacgatacgttggcgttcatcgtcactgaactcatcgagggcaagaatcttaaggatgatgtggccgccaatggccggtatgtgggcgacgatctggaacgcttggcccgcaagctcatcgaagccaccaaagccgtacatgcggccggcatcgtccatcgcgacatcaaacccaccaatgtgatggtgtcggccgccggaccggtattggtcgatttcggtatcgcgatgggcgagggcgaaagtcacgtgacccgcaccggcctagtgatgggtacacccggattcatcgcacccgagattattgacggtgccgaatccgacgacgccaccgattggtggtcggtggcgtccgtgctcgcttttgccgcaaccggcgcgcctgtgttcggcaccaagccgatgatggcggtacttgagcgcgaggcctcgggcaacgcgaatctttccggactaccggccggcacattggctgccttccgttctgcactggacccggatcgcagggatcgttgcacgccggatcaattgctgaatgccatcgccttggatgcgttgaatcccaacgcttggcagggcgagcaggcgggaccgttcgccgcgggagccgtggctggacaaccggctgcgatcgttgccgaagccgcggaggcgatgcccccttttggcgcggccggcggcgttgaccgcaataatccccgaaccatctggcgcgcggccgaggaagccgctgaggctcccaccatggccgtgttctccggcaataagggcgataacggcgatggcgaaaccgccgtattctcgccggctggcgccgctaccgccacgctgcccttagccgatatgccgccacgtccgccggccggtgcggagcaggccacgcaactgttgcccgacgctgctgccgatttcaccgacgacgccggcacacaggtactcaccggcgcgaccacaccgatgccggaccaaaccacaccaatggccggcgccaccacaccaatgaccaacaccgattcgactccggccccgaccacgccgctggccgagcgcaccaccgtactccccacgccgcagccgtcatcattccccccgtccggcaccgcccagagcagctggaatcccgcaagcaaccagcccacagcggtggaccccgccattcgcccggcattgcagcgcatcatcgaccaaaccgcccaagcggcccccaccgaaaccatggtccaaaatcctcccatgcccaatccggtggacgtgaagcgaggggaatatctgcggcgcggcaccccgccattgatcctgctggcggcgccgctggcggcactggcggcaaatgctccgctcgtggccatcatcgcggccactgcgttgttgtggctactgctcaccctggcctataacaccgaaccccagcttgagcgcgagggcaaacgcggcggcgagcgcaaaaactccgattcgtggattcgcgtggcgacttttccctggcatctggtcaaagccctgctgctggccattccccgcatactgctgctagtcatcatctatatggcgggaaccgccgtggccaccgcggctctggcactgcccgttcacaccatctcctggtatttcaccgcggattggggtattccggtgccgttgctcaatgatgtgccgttctccgcttccgggctggcgctgggcggtttcatggccatcggctggctggtcactgtgttcgctccacagtcgatgatgattcggctggggggcggcgtactgcgcgggctcaaacacagtcgcccggcgggcgcgccatccaccgaagtgggtggggctccacctgctccagtggcgccggcgcccaagggcggcgggcgcggcaccgtgctgttcaccatatgggccatcatcaccgtggccttgtgcgcgatgccgattctgggcatgccgatcaactggatgccgttcgcctagagcggggcggaatctcacacatcagccatccgcacacatggccgttgtgtatccgatacgttcgttccgtcacacttttacagggaattcacctcagatcagctctgggcgcagtcctcctcaggcccggtcattatgatggggcccaaacattgaagcgattgcaaggggatagctatgtcagatccgaagcgtcaggccaagcgtgccacacgcgctgagcgccgagcggccgaggaggccgcccagcaggcacgggccgagcaggcggctaaggaacgtaagcagcagaccatcatcggctgcattgtggtggccattattgtggtgctggtggccatcgctggattcgccgtatacaaggctatgcggccgtccaacaccagcagcagtagccagcaaagcaacatgaccgtggacgaggcctatagcaagctcaagaaagtcagtacccagccggccaacgccgatgacaaggccggcttcgtgatctcgagcaaggggtacggtcagaaggccgaaggggcgcccaccgtttccatctacatggagccgctgtgccccggctgcgcctcggtgaaccgccagcttgacccgacgctcgtcaagctgatgaacgccggccagctcaacatcgatttgcacttcctcaatttccaggacaacaagagctccgacaactactccaaccgcgcgttcaacggtgccatctacattgccgagcatgatgacaatcccgatcacctcatgagctacctctccaacatctacgctgaggatttccagccgggcgaattgtccaattacgagccggtaagcaacgccaagctggagaagcaggccgtcaatgccggcgtgagcgaggatgtggccaccgcggcattcagtggtaagaacgaatacgtcaagtggctcaccgcctccaacaactacacgatcctacgccccgaactgttcaacagctccggcgcgttctcctcccccacgctcaccatcaatggcgaatactgggatctgaagcagctcacgctggcggacaccagcatggtggacggattcctcaagtccatcggcttggactccgatcaggtgggcgtggaaggccagatgccatcgatcggcgccaacaagaagccgatttcgctggccgattaattaccggcgcggctcggcctgaattgaccactcgagaactaccggtatactagagatttgttcaaaacgatttacgcgttaagaacaatcgcctctttagctcagatggccagagcggccgccttgtaagcggcaggtcgtcggttcgatcccgacaagaggctcgacgcgtagaaaagtggcgtattatatgatacgtagatttttctacgcatataattcttaccttgggtaagtactccaggagccttcccccaactatgggcttcctggaatgagggcggagcgtcccccaaccagctccgcgccttcaggggggcgggaacatccccttctctcccgccccctttttcttttctttttttgagctcagaacaatctgacgagcaggaatggtgacggtggccggtgaaaccgcagtacgggccggaacaaccgttacgatgggtggcgtaatcgttcatccagcaggaagagtatggcaatggcacggcgttggaccccgcagcggtttgttacactgcgtcgcatccgcgtaatcgcctgtatcgcggcgaccagtatcgcgctggctggatcattcgcgttcaccgcgcgtaaatccgtagccctgaacatcaacgggcaaaccacccaagtcaccacatatgcgatgacggccacccgtcttctggaggaacaaggggtggatatcaagacccacgatatcgtcactacctcgtccggcgaccaactcgccaatcatgccgtggtcaccgtacagtccgcctaccagaccactatcaacatcgacggcacgtccgttcccttctggaccgtggccaccagtgccgaccagttgctgggatttttcgaggaaaaccagaacaacgccacaaaaatcaccgtcgacatcgacaatgtgtacaaccagctcaccggcggactggtcatcaatcaggatggcccggtcaccgtcattgcggacggcaagacttccgtggcccccaacggcaaactgcctgcggcctccattcttgactccaaaggcatcgtgctgaacaaagaggaccgtgtgagcgtcgaaaaggacggcgataccactatcctgcgcgtacggcgcgtgacgcatggcgaggaaacacgcacagccgtagtgccatactccacacaaaccatcatcgactccaatctgcctgaaggccagtcggagatccgccagcaaggcgtcaatggcgagaaaacccaggtgtataacgtcacgtatgtcgatggcgtggccgaatcggagacgctgaaatccgaaaccgtcaccacgatggccatcgaccagatcatcgccgtaggcgccgccaagtctgataccgataaaggttccgacaaaaaatccgactccgccgataacggcaaggccgattccggttccaacagtcagcacgagtcgtccggtaacaatgccaacagcacaggcgacaagaacaacagcagctctggcaacaacacgaacaccgataccaacaacaatgccggcaacaccggcggcaacaactccggtaacaccggcaacaccggcaacaccggcaacaccggtaacactggtaattccggtaacaccggcggcggtacgaacaacaattccggctcttccggctccgattcaggaacaaccaccacgccctccggccgactctggcacgccaccgtagcccaggctcaggcctatgccgccggtgccgccgcgcagcgcgggtggacaggcaacgactgggattgcctggtcaaactatggaaccgcgagtccagatggctgtggtatgccgaaaacgcgagctccggtgcctacggcattcctcagtcgcgaccagcagacaaaatggctgcgttcggcgccaattaccgtgacgatgccgccgtacagatcgattggggtctgtggtacatcgcacaaacctacggcagcccgtccaaggcatggcaacattccgaacaaatcggttggtactgatcggttacgaagcccacaaggaacacacgcttatgaacgacaccattcccgccaccggtcacctgttaggtgccgccgatatccgtcgtatcgcggccgatgccggcatcagccccaccaagaaattcgggcagaacttcgtcatcgaccccggcacggtccgtcgtatcgtacgagaggcgggagtgaccgctgccgatcatgtcatggaagtcggccccggcctgggatcgttgacattggcgattctggaaaccggcgccaccatgaccgcagtcgaaatcgatccgccgttggccgaacgactgccgggcacagtcgccgaattcatgcccgaagccacgtcacgactcaccgtcgtcaatcgggatgccttaaccgtcaccccggagaacgtgcctgatttcagcgatgacgcatcgtttacgctggtcgccaatctgccgtacaacgtggccacgccgattctgctcacgctgttggagcgtttcgacaacctcggctcgttcttggtgatggtgcaaaaagaggtggccgacagactcgccgccaagcccggttccaagatctacggcacgccgagtgtgaagctcgcctggtatggcaccgccgaacgggtgggcaccatcggccgcaatgtgttctggccggctcccaatgtggattccgcgctcgtcagattcacccggtatcaggccgatgacccggccgccccgggagcctcgaacagcacgaccgacggcggcgcacaacgggaactcgtatttcgtctgatcgatgcggcgttcggtcagcgtcgcaagaccctgcacgcggcattgaagaccattgcgccctccgaggcattccccatcgccggcatcgagccgacccgtcgaggagagacgctcaccatcgccgaattcaccgctctggccaaggccatcgaatcgtgtggagatggagatgaggcacaatgagtccggtaatctcacatccacgcccagccgctgcccgacatcagttcgatgagctctcccccatcaccattacggtggattgcccggcgaaaaccaatctcaccttggaagtgggacctgctcacgacgaatggggcggacgccacgaactggacaccacctactgtgcaatcggcgtatacgacaccgtcaccgcaaccgccaagcaacccggagcgggattctctctggagctcgaaggcgcttatttgggcgacttggcctcctcacgcagcgacatgcgccgcaaccatgcggtactggccctcttcgccatggcccaggcggccgagcgcgagccggatgtggcgttgaccatcaccaagcgcattcccgtgggtgccggactaggcggcggttcagccgacgccgcggcgaccatgctggcggtcaatcgtctctgggagctgaactggcctatagagcgtctgcgcaccattgccgccacgttgggcgcggatatgccgttctgcctgaccggtggccttgcatacggcaccggtttcggcgaacgcatcacggatatcgcccccggcagccgcgatgagctggcgctgatagaacagggattcagcggcgaagtattggtcggcgcgtaccagtcgcaactcagcactcctgaggtctaccacacctttgacctcgtgggagccgcagaaggcgaccgcaatcatctgcaggctgcggcaatcagcctgcatccccgcagcgggcaggccatcgacgccgccacgcaggcgggtgccagccatgcattcgtctccggatccggcccctcagtggtcgctttcgccgccgacgaggcagcggcacaacgcattatcgatgtgtggcgcgatacggctgtggtcgatcgcattattcgagccaaatctcccgcacaccccaatatcggcgtcagacagtgacgctaaggtagcaaccagccacccgacccatgaaagaagtccaccgatgacgtatcaggttgatgaacgtgaagcccgcaaggcgtacgtgcgccaccgccagaccatcgtcttttccatcagcggcgcggtattggcagtagtgctggtcatagccctactgttcaatttccacgttttcggcctcggcgaagtggagactccggcccgccagccgaattacggcaacgcggcaccgtgcgcggtcaaggacagcagcggcaaagcgcaatacgtgtccaacgcttcggtcggcatccgcgtgatgaacggcacctctcacggccaattcgccaaggccgtgggcgaggctttggccaatcgtggattcagcgtgcagaaaatcgataactattccagcaccggcgttgaacgcaccaccatctacttcggcaagaacgccattaatcaggcgtatacgctgatcggcaatttcaccgacgccaccatgatcatgacggctcgcgaggatcaactcatcgatgtggtcatcggcgccacgttcaacgatctgcaggacaccaaatcctccccacaatccggtaagaccatcaccaatatcgagggttgcaaggccgccgatagcatgaccaagctgcccgccgacaccaaacacgacgcatacacggcggagtaaggcgcatacagcttcatcttcgcgaaaaaccgtacgctgacacgtattcagcgtacggttttttggtatcggactagtatcggactactgaatctcggcgtaccagcgcttgagttcttcgacggccacatcgtggtccaccggaccgttatccaagcggtattccagcatgtgcttgtaggcgcggccgatcatcgggccgggctccaggcccagcaactccataatttcgttgccgtccagatccgggcggatcgcgtcgaagtcctctttcttcttgagttcgcggacgcgctcctccatctcatccatggcctgggagaagatcatcgccttgcgcttgttttgtgtggtggcgtccgcgcgcgtgagcctgttcagccgctcgtacaggtgcccggcatccttgacataccggcgtacggccgagtcggtccacggctcgtccacatagccgtggaagcgcaggtgcatattcaccagttccgagacgtcctcgaccagatggtggtcaaaacgcagcgccttcaaacgcttgcgggtcattttggcacccaccgcgtcatggtggtggaagctcactttgccgcccggctcgaaccggcgggtcttcggcttgccgatatcgtgcatcacggcggccaagcgcagcgtcaggtcgggggcgggcaccgggccgtccgggccggtttccagggcgatagcacgttcgagcacaatcatcgtgtgctcgaagacgtccttgtggcggtggtgttcgtcgatctgcaattgcagggccggaatctccgggaagacgatgtccgcaagaccggattcgaccaacgcctcaaggccggcgcgcggacggtcggagagcagcagcttggtcagttcgtcgcgcacgcgctcggcggatacgatgtcgatgcggtcgcgcatcgaggtaatcgcctcggccgcgtccggcgcgatacggaagcccagctgggccacgaatcgcacggcgcgcatcatacgcaacggatcgtcgtcaaaggactgtcgcgggtccaccggcgtgcgcaacacgcccttggacagatcactggcaccaccgaacgggtccacgaattgcaggtcgggcacgcgcagggccatcgcgttgacggtgaagtcgcggcgggacaggtcgccctcaagcgtgtcgccataattgacctcgggcttacgcgagtccggatcgtacgtgtcggagcgataggtggtgacctccaccttgacctcggtgccgtccgggcggcggcgcatggcacccagcgtgccgaacttgcgccccatgtcccagaagccgtcatgcccccaccggcgcagtatcggctcgaactgctcaggccgtgcggatgagcagaagtccaaatcgtggctccttctatggagcagcaaatccctgaccgggccgccgaccaatgccagctcgtaaccctgttcggcgaacagtcgaccaagttcgatggcttcgggccatacttcgaaattcaatgggcaccttcccgcgtgcgacgtttttctgccctaccagcataccgttaccccacctgcacacggggttgagtaaggtggagaatatgattacgcccgccgaccttgcccgcatactggggcaaacaccagattcggcggatagccatacccaagaccacctgctgtatacgtccgaaactccgcatcattccgccgattcgggcgattcttccgatgtcggcggcaccgcgagccactccaccaatcaggccgttcatcaagacgaagtagacgcagtaccgactgcgcaacattccggtgtgcccggcacgcccgcaacgcccgtcacgcccgcaccatccgaatccgaaatatcggacgccgccagcgacatgcccgcaccgaagccgatgatgcccacaccggccaccgtcttcggcatgcatgccaccgtcaccatcgccactaccagcggcactatcgaagggcaggccgatggtatcgccggcgaggccggtgccgagacgattgccgaggtcgggccgattatcgccacggcacaaacgtccgtaaccatcgtcacgaacgatcccgcggcgaccgcccacgcggccgtagatgctgccgttgcggtcgccaaggccgccgccgcgcataccgcagcgataccgactccgcgcgacgtgctgatgccgcctgcggcacgtaccgcaccggccgcaacgccggtcaccatgccggtctcagcgccgtctgcagcaccagtgaggcccgcaacgtcagcgcatcccacgccggccacggtcttcggccggcatccgtccgcggatgttgcctcgccggaaccggcagtgccagtagaaccggtgacgccatccagcccgactccggccatgatgccgcaacgccgtacgtcggacggtccgaccacattcgcttcactggatgcccaggaactgccggtcgtacgcgaatattcggcaggcggtctgattttcgatgaccagaatcgcgtggccattatcgcccgtcattcccgctccggccatctcgaatggtgcttgccgaaggggcatatcgaaaaaggtgagaccccgcagcagaccgctgtgcgcgaagtgcatgaagagaccggcattctgggcgaggtgatcgattccatcgccaccatcgactactggttcaccggcaccacgcagcgcgtgcataagctggtccatcacttcgcgctcaaacagaccggcggcgaactgacggtggaaggagacccggatcatgaggcggaagacgccatctgggtacgttttgaagatttggatgacgtgttgagctatcccaacgaacgcaaaatcgcgtggctctacgccaggaagaagaacaggcaggcaaacgagtgaacctacccggagtcttacgacattgcacacgtctggcacacgcactggcggctggcgtcgccgttgtggcgatgctggccgctccattgaccgtctacgcgaacgatacgacggacacgaccgattcatcatccgatacgacggacgcaacgggcaatcagaccgagaatcagcccaagcagagcattgccatcacgcaaagcacccccatcgtcacctccaaatcgggctatcatgtcaccgcggtcatcagcaatacggacagcacggccacgtcaagcggcacactgcacctgaccaccaatacgctgttcacctttgtctcgcgcaccgatattcagaattgggccgagaacaacgcccccatccccacccccaacgagttgggttccgttgacgtgccatcgattcccgccggcggcactgccaccgtcaccatcgaggtgaacgccaatcagcagacccttgcctccatagggagctgggggccgaagccgctgatgctgtcgtatatcgtcggcaatcggatactcgccgatttgccgagttttctgacccgatcttcggatgggctcaacaccgcgacgacaccggccatgaacctgaccgtggccatgccctacaccgccagcggctggcaggtcgataacaaggccatcagcaatcgcattgccgaaaccaccacttcctcgacatcaacatcgtccaagtccaacagcacggacaaggccgacaagtccgataacgccgacgccagcaacgcggccaaaggcactgatacgcaagccatatccttatccgggcaggatgccgataccgcgcgatcccttgggcagacattcgccaagcaccgctcgctgcaagtgatcgcggatcctctgtattggcgtcagtccgcagtgcaaccgtccattgccggcatcatgcagcccgccgactttgacatcaccgcctataccgcgctgggtgataccgcggcctacgaaaaggccggcatcaccactgaacagtggaacgccaagcaggcggccgcatggtatgccgccggaaacgactccgaaacaccctccgcgtacgcatggcagggcaacaactgttggacgttggatgcgctgaccgcggcacgcgagcagggctatgacacggtgattgccgatgcctctttcgatgccgaccagactgaagccgtacacacaggcacctacgtggtggatacgcctgccggcgatgtcaccgtgctgaaggagcaatcgaccttgggcatgctggccaagggccaacccaccagcacggacgcgcaggccgagtccagcgatgccggtcggttggcccgactggtcgctcagagcgcgttctaccagatggaacagccttatacatcccgatacctgcttatgacgttctcccgcaccacggaggccggctggatcgatcaggtgatgagcgccttcgagcaggcgtcctggttgaatctgacggacctgaagaccatggccgaggccgatccgtacaatgtcagcgattcggtcaatcccgacaaggccgatgatgccaacaccgccaatacccggtcggcgttgagacagttggccgacagccggcatgacatcatgcgcatggccacctccatattgaagaacgagattgattccgacgaggtctcgtcgttggccccgcaggccctggcccggcaggatgccaatgacaccgtctcgcacagcaacgatccgacgcaatggattggctctttgctggtgctgcatgacgatatggcgctgcgatccatgtctggctccccccagccgacagccacgcgaaaagccatggtcagagccgcgaaaacactggccagcgatcttctgaacggcgtacgcatcaacccatcggaatcaatatccgtgttcagcgaatccgcgaaaatgccaatcaccgtcagcaatgaccttccttatgccgtcagcgtgcaggtcaactcgctgactgactccatgcagatcgtcacctcgcgaaccactgacatcgatattcccgcgcatagcgacgctcaggtgaccttcaccatccgcgtttccacttccggctcatcgacggcccatgtgtcgctgagcgaccgggaaggcaacagcttcggcaacacgcaggataccgcgatcaccagtgtgatgcgcgtcagtgatgccagcggtttcattatcatcggcttcgccgtgctactgtgtattatcggcctgtggcggcagttccatcggaagaaggaccccgacgaatgagttcaaccgtaggtcgtaattccctgatcatggccacgggaaccgctgcttcccgtgtgaccggtcagctccgcacgattcttctcgctgcggccatcggcaccactggattggcggccaacgcctatcaggccggttccatgattccccaatccgtgttcacgctggtgtccggcggcatcttcaacgccgtgctggtgccccagattgtgcgcacgttgaaagaaaaagacgcccaagaacgactgaatcgtctggttacgttggccatcggcatcctgttggccatgaccgtggtgatggcggcggccagccctctgcttgcccgcctgtacgtgggtagcgacgatcaccagatgatagccctgaccacctcgttcaccctgtggtgtatgcctcaggtgttcttctacggcctgtatacggtattgggtcagatcctggccgccaaagaccatttcctcacgtatgcgtggagctcaaccggtgccaacattattagttgcgccggttttactggttttattctgctgttcagcaaggccaatgaacagcccctcgaattctggaccgccgacaaaatcgcgcttaccgcaggcacctggactttgggcgtggccttccaagcgctgatactgttcctgccactggcccgtatcgggttcaagtacaaacccagcttcgggcttggcggctttggactcaggtctatgggtcccgtggcgttaggctctttgggcgtggtggtcaccagtgagatctgcggcattatccttacccgtatcgccacatccgcaccgcagcgcgcccacgaactgacgggtgccagcctgttcagcgtggcaggcaacgcgacctatcagaatgcgtacaccctgttcatcctgccctattcgctcatcgccgtatcggtatccacggctatgttccccaagatctcccgttccatcgcagctgcgaatctggatgaggcacggcacgacctagtcaacgcactgaataatgtgggcctgctcatcatatttttcgccgccgccatgattgtgttccccgaaccgatcatccgcgcattgcttccgtccgtctcgatggacgagaccatgctgatttcctacgcgcttatcgccctatctgtgggcactcctttgggatcggcgttcctgctgatccagcgcacgttctatgcctttgaggacggccttcaccccttcttgtccgcggtgatgcagtatgggttcacctcggtattcatgatgattggcatgatggtacttcctcctgagcattgggtactcggcatcgcctgctcggtgacactcggtggattactggcgttgccgctgacgttgatgatgttgcgccgcaagttcgaaggcaatcttggcggtcgggagatcacgaggacatatgccaaggccattgtggcggcactggcttccggagttgtggtctggctgatcaaacgaccggtagtcgcactgttcgacgcggatattcgaccagtaggcgggcacatgagctggtggtctgcgctggccatctgcgtggtgctcaccatcgtgctgaccatagtatatgtggctgtgttgtgggtggtacgcaccccagaactcatcagcgcctatcactcgatactggcccgtctacacaagactcc

SEQ ID NO: 725 - DNA, 13571 bp, Unknown
  R14_15m  MAG No. k141_44124
agtcgctttatcagtaagtctgtatttggaggtatcgatggcccatcgtccgcttatcggcgtggtcccgttgtgggacgacacactgaatagcctgtggatgctgcccggctatttcgacggcatcatcgaagccggcggtatcccggtgatgctgccgctgaccgacgacgagactacaatcgaacagccggtcggccaatgcgatgggttcctggtcaccggcggccacgacgtggatccggaacggtatggcgaggcggccggccccaagacggtcaaactatgcaaggcccgcgaccggatggaggagcgcctgatcccctccgtcatcgcggcggacaagccattgctgggcatctgccgcggcatccagagcctcaacgtcgccttgggcggcacgctgtggcaggatctgccggacgagcatcccagcccggtcgtgcatcatggcgacaagccgccgtatgacccggtggtccacgaagtgtcgatcgcgcccgattcgccgttggcccgcgcgttgtggccgctgggagacaacggcccgagtgaggcggaggccgatgaggtcgattccttcggcaggccgtatcatccgcgcgcctatacgctgggcgtcaacagttatcaccatcaggcgattcgcacgctgggccagggactggaaccgatggccactgcgccggacagcatcgtggaggcggtctggatgccggccaagcgtttcgtctgggccgtccaatggcatcctgagttctctcaccgcgccgatagcaaccaacgtcgcatcctcagcgccttcatcgacgcctgctgacgcaagctcccgccaatctcgacgaaacgtcttccaagaaatggcttgcccgcatccgcagccccctaccacgacatgagcgcccttgacaacgtcaccctcggcatgcgcttcacccgtgacagcaaacaggtcaggcagcgcaaggccaaggccatgctctcccggctcggactcggccatgtcgcgggagacaagatcatgaccctctccggcggtgaacagcagcgcgtcgccctcgcacgatgcatattgaagcccggggatttgatcctcgccgacgagcccaccggcgcgctcgaccgcgatctcgcccaacatgtcttcgacgaaatgctccgcctccagcacgaatacggcaagaccctcatcatcgtcacccacgatcttggcatcgccgcacaatgcgacaacaccatcgagctacaggcggtttgacggagatattccggcagctttggtctaccgaagtcacgtgttgcccttcaatctcctcggaaatctaggtggcccatttttcaaagaatgcgatcggacgtaacgccccgtaaggagacctgcaatatgaaacgttgaatcgtcatctaaagatgacgttttcgtagatcttccggaatcgccagtcatctgcgatccggatatggcaccggtccggctcgatcgagcccggacgaccatggagaaaacgaacgatcgaatccgaacgcgggtaaagagcctgcgcgacaccattgataaagccaaatttaagaaaacagatcagtatgcataagttttacatgccttcagcctcgtcaaccggcagcgggccccagaatccagtcacagccaggcagagcgtacaacatactgcgtagtacatggcgcgaatcccaatgaccaccatcgattgatgacggccacgaatactcgtactcagccttactgctttggctcatttctgttcacttcacgctggagtaccgagacacgttgagcggaaataccggtaattcacgtacggttaccgaccattggcctgaacggtactcagcatccgcagtcacttggggtatggtcatgacggagagccatcatgaccgatctctcattattctgggatgaatccggcgaggctggaactgaatctaaatattaaaacgcatgatgcacacgttgcggaattagtccaccagaacttcggcatgctcggcaggttcagcgggttcgatgtgacgggcacgcatggcatcgagggcggcggccaggtcggccgggtactgggaccggaccgtggtccagacgcgggtgcgaggatggcggaattcgagcttcatggcgtgcagccactgccggtcaagtcccaaagcttcagacagcaccggattggcaccatacatagggtcgccgcacagaggatgcccaatcgaggagaaatgcacgcgaatctgatgggtacgtccggtctccagattcacggataccagtgtggcctcatggccgaaacgctccaacacatcccaatgcgtaacggccggtttgccggccggagtcacgcagaagcggaaatcggacactttggcgcgcccgatcggtgcctcaatggtcgctttgttctctttaagaccgccctgcacgagcgcatgataggttttctttacctcatgctcggcgaactgccgacgcatctcggtgtacgcaaggtcggacttgcacaccaacatcaagccggaagtgcctacatcaaggcgagaaacaatgccttcacgcccggccgcgccataggaagcgatatgcacgccacgatcacgcaacgatcccaataccgtgggaccggtccagccaaccgaggcatgcgccgccacgcctacaggcttatcgactacgacgacatcatcatcttcgtagacaacagccatatcagttgcgataggctcaggcccggcctgttcctccgccaaatcaaattcgacggtctcccccgcctgcaacgtgctggaccgcgcaacttcacgccctaaaacgcgcgcctgtccggagtcaaccagatcggcggctttagatcgtgaaatacccagcattttggccacggctacgtcgaaacgcttacccaccaatgcatcgggagcagggaccattcgactcattacttggcgtccgcctccggctcagactgtagggattcgtcggattgctcgataagatccttgtgggagaacggctcccccataagaatcagaatcaccaggaccacaccggcgactaccagatagatatccgccacattgccaacggaccagccatagttaaggaaatccaccactttgccgttgaggaagccgtcagcgtacataacacggtcaatcaggttgcccagagcgcctgcaaacgcgaaagaaagcgccaccgaccatttcatggagatagtgcgcaccccagccacagcaagggccacgcaagccacaacggccaacagactgattacccaagtagcgcctgaccccatgcccaaggacgcgcccggattacgcaccaaggtgaaggacagcagtccgggaatcacgcgaatggtctgaccgttggataacgcggccatcgcccaagccttggtgagctgatcgacaatcagcgcagccgcggccacacatgcaaagacggccacgcgagtgcgcagccgtccctgttggttcgtcatacgacctgtacctgcctgcgctcagttggtcttggacgaggtctggtcgacgtagttgttcgactcggaaacctgcgatgccagctggccgaggtactcggtgaggcgggcgcggtattcagtctcgaactgcttgaggctctggatgttgccctcgacgaccttggactgagcctgaaggttgtcgcgcacctgctcggcatacgtatcggctgcagagcgggtgttcttgtcgtacgcatcagctgcggaacgagtgttcttgtcatactcggcggcacgctgctgcacttccttctcgtagttgtcagcgtcatcgtgctgagacttggagtagttgtccgcatcctgacgagtcttgacggagtatgcgtcggcctcagaacgggtgttctgggagtaggtctcggcatccgcgtgaatctggtcacggtaagcgtcggcctcggagcgggtacgatccgaataggtgtcggcgtcggaacgagtacgagtggagtagtcgtcggcctcggagcgggtacgctcggagtagttgttggccttggtgaccaaatcgttgtacttgttctggctggcctcggtgatttccttggccttgttcttgcccttctccacgtactgatcgtgcagctgcatagccagggtcagcatggcggtggcgcgctcgggctcggtgcccggcatggaagcgacgccagcgatcttctgcagagaaccggtctcagtgctcggctcgaccttggaaacctgggcacgaagctggttttcacgctgcttggcttcttcgagctgacgagacagttcagcgatctgagcggactgctgctgagcggcggaaccctcctgctgagcagcggcgagctgacgggacagctcctcgttggccgcgcggaactgatcacgttcctgctgaatggcggcgatctgctggccgacggcttcctggttaccggaggcctgagcggcctgggcggtgagctgatcgatttgagcgttcagctgatcgacctgacccttgagctgctcattctgggaggacagcgcgcggttggattcctcggcttcgctgagcttggcagaggcaagctgtgccgcctgatcattgccagcctgagcggcctgctgggcctgagccacagcgttcttcaaaccagcattctccgactggagttgctgcacctgaccggtaagatcggagatcttcgcattaaggttggtcacgtcagggcccagagactgagtggcctgaccgccggctaccgcctgacgtccaagagcctcgacggtttccgtgacctgatcaaggaagtcatcgacttcgtcgacatcataaccttccttgaatcgaacagtctggaaggtatgctccctaatatccttcggcgtcaacagagccataaatcttgcacctcgctttggggcattgcccgcacttacgttggtctcaagtcagaatgctatcacgaccccatcgtttcagaacattcaacgtgggtttttatgccagatatatgcctccggcgggtcaaaaacggcctcagaacactatcagaacaacactttctagtaccaccaacgcaaaatacagcacgatgaagctgacatcaagataaatcgagccgagcggcaatggacgaatatagcgacgtagccagcgcagagggggttcggtaatggaatacacaatgttgatcagctgggccagcacaccacgtggataccagtttcgtgcgagaacggagacccagtccagaatcatgcgcacgaacagaaccgtgatatacgcgttgatgagccatgcaagaatgcggccgatcagagagaacactaaggaaagcatgcagacagactaacaaccgcgcatgaaaagtttgctcggagcgcaataagaatcggccgactccttgctgggagtcggccgaataccgatataacgtcgaatgcgaaaactactgaaccggtcagtcagcgaacaaatcgtgtgccgaggttggttttgtcggctcttcgaccttgatgttcacctgcgccgggctcaacaggaacacgcgcggagtgacacgctcgagggaaccacgcacgccgaacaccacgccggcggagaagtccacaatgcgatatgccacggcttcggccacaccggtgagattcagtacgaccggaacaccgtcacgcaatgcgcgaccgaccagctgagcatcctcatatgacttcggatggatggtggtgattctgttcacgcgaccaccggggaacggcttggtagtcgacgatgcggcaggcgcggtggttgatgccagcggcgtgaccgtatggtcggaatcgaatgcggacttcggagccggcttctgctcctcgtcctcttcgatgtagtcgtcctcatcgtccacaacgtcgctcatgcccagataggacatcgcgtttttcatgaacccagccatggatcagtcctttcagcgcaggaaatcaggaatgtcgagatcgccggcgggatcgttcacggcgatgttcggatgcgaggtagtcggatcgtcaaagggcagggatgccgggtctgcggtcgtcggggtgaattccggacgcggagtggccacgggctgggcggccgaagcggcggcgggctgctgcgtttgcgtggcagccggctgggcggccggtacggcaattgccggagcggcggcagagggatcctgcggtgtaaccggatcgaaaccggccgcgatgacggtaacacgcacttcgtcgccataggcatcgtccagagcaagaccccagatgatctgggcctcggggtgaatggccttgcgtacaagctcggtggcggcggaagcttcctgcagcttcagatcggtcgggccggcaatgttgatcaacgcgccgtgggcaccctcgatgctctcctcgagcagcggggagctgatggcgatttcggcggcctgggtggcgcggtcttcgccccgcgcggaaccaatgccgaacagcgcagtaccagcgccacgaagaatggagttcacgtcggagaaatcgacgtgaatgtaggaattcatcgaaatgaggtcggtgatgccctgcacgccggcgaggagtgcggtatcggccgtcttgaaggcttcgatgatgccgatggaacggtcggaaagctcaagcaggcgatcgttcgggatgacgatcagcgcgtcgacttccttgcgcaggttgtcgatgccgtattcggcggaagcggaacgctgaggaccttcgaagctgaacggacgagtgacaaccgcgatggtgagagcaccttgctgatgagccgcacgagcgacgatcgggctggcgccggtaccggtgccaccaccctcaccgcaggtgacgaacaccatgtcggcacccttcagggattcctcgatatcagactgatgatcctgtgcggccttagcacccttctccgggtccgcgccagcgccgagtccgcggctggactgatcggacagggagattttcacgtcggcgtcggagcgcagaagatccttcgcatcggtatttaccgccacaaattcaacattctgcagtccctcggcaatcatgcgattgacggcattaccgccggcaccgccgacgccaacaaccttgatgttggtcttgtcgttgaactcattctgcgcgatctcgctcacgtttggctcctgtcacttcacggttacatccaagagtagcgcaaacaggctactcttggagggaaattcacgcgcagaatggcgcgtgttgcgtgtattttcagtattttctcagtaactggcgtccatagggtcgtcaccgaagagcgcctcacgctcttcgtgggtggtggtacgcgattccaaccacccatacggcaagtgcaccttcttggcgaaacgcacgcggccgcgcggtttgtcgaccacgcgtggcgggtattcgatggtcgggtcgagcttgccgatctcgcggtccacatcggccaggctctcgcattccataaaggccttgcgggtggacccacccaccgggaaccctttcagataccaggcgatgtgcttgcgcagatcgtggacggccatcatctcatcgccctcatagaactcggtaagcagctcggcatgacggtgaatcacccggcagacctcgcccagattcgggttgagccgttcgggattgccctcgaaggcgtttttgatgttggcgaacagccacggccggccctgacatccgcggccgatggccacgccgtcgcagccggtctcgcgcaccatttcgagcgcgtcctcggcgccccagatatcgccattgccgaataccggaatgttgaggtgttccttgagctcgccgatgcgggaccagtcggaatgaccgccatagtattcggcggtggtgcgggcatgcagggttacggccttgcagccctcctcctgcgcgatgtgtccggcttcgaggaaggtctcatggttatggtcgatgccgacgcggatcttcgaggtgacggggatgcccgccggctcgcatacggcgaccacgcgctggatgagctcggtgaagatgtcggttttccatggcagggccgagcctcccccgcgacgggtgaccttgggtaccgggcaaccgaagttcaggtccacatggtcggccatgttgccgtcgaccacgattttcgccgcctgttcggtgatggacggattcacgccatacaactgcagcgaacgaattttttcgcttttggcgaaatggcagagacgcagggctttcgggttgcgcgccacgagggcccgcgcggtgatcatctcggccacgtaaagaccatcgggaccgtattcctcgcagatcacgcggaacggccagttggtcacgcccgccatcggcgaaagcaccaccggggtcggcacggtaatgttgccgagctgcacgggggcgatgtataccggagtctcgggccgtgccggcgcgtccgtacgcgggtcgagattgttggtctcgtgagtagcggtgatggtggtttcggtttcagattctgccatgtggttcctgttctgaaatagttttggctcccctctttgagggggagctgccgccgtaggcgactgaggggagtcgcctcagcaagagccccctcagtccacttcgtagacagctcccctcatagaggggagcctctatacagacccgtctttagtacagaccgccggcttcctgaacgccggactcaggccaagcctcgccgcccatttccacgggcttcaggggcacgcgggtgcgcttctcgccgatgcgggcggccacgtaatcggccaccttgtcaagagcgacgcgctcctgggccatggtgtcacgctcacggatggtcacggcgtggtcctcgagggtgtcgaagtccacggtgatgcacagcggggtgccgatctcgtcctgacgacggtaacgacgaccgatggcaccggactcgtcgtagtcgatcatccattcgttgaagcgcaggtcgtcggccaggttctgggccacggtctgcagttcaggcttcttgctcagcggcagcacggcggccttgaccggggccagacgcgggtcgagacgcagcacggtgcgcttgtcgacgccgcccttggtgttcggggcctcgtccacatcgtaggcgtccacgaggaagcacatcagggaacgggtcagaccggcggccggttcgatgacgtacggcacgtacttctcgccggtggcctggttgaagtagctcaggtcttcgccggagtgcttggagtgcgcgctcaaatcgtaatcggtacggttggcgatgccttcgagctcgccccagtcggaaccttggaagccgaacttgtattcgatgtccacggtgcgcttggagtagtgggagagcttctccttcgggtgctcgtagtggcgcaggttctccggcttgacgccgaggtcgatgtaccagcgggtgcgggcgtcgatccagtactggtgccattcctcatcggtgccgggcttgacgaagaactccatctccatctgctcgaactcacgggtgcggaagatgaagttgcccggggtgatctcgttacggaaggacttacccatgttggcgatgccgaacggcggcttggaacgggaggaggtcatcacgttcttgaagtcgacgaagatgccctgtgcagtctccggacgcaggtagtgcaggctgttctcgtcctcgaccgggccgaggtgggtgcgcagcatcatgttaaagtcgcgcggttcggtccactgtccacgggtgccgcagttcgggcagacgatgtccttcatgccgttttccggcatcttgtcgccgtgcttctcggcgtaggattcctcgagcttgtcggcgcggttgcgcttgtggcagttgaggcactcgacgagcggatcgttgaacacgctcacgtggccggacgccacccacacttcgggcggcagaatgatggaggtgtcgacaccgacgacatcaggacgggtgacgaccatggagcgccaccattcacgcttgatattgtccttgagagcgacgccgagggggccgtaatcccaagcggaacgggtgccgccgtaaatttcgccggcggggaacacgaagccgcgacgcttcgcaagggatacgacttcatcgagtttggactgagccacaatgcaccttctggtttgaacggtttggggtctaataacaaccgcttcaggatagccgtatacggtgacaggtcaggcggcattgtccggtatatgttccgcgtctcacgagcggccgttcgcagcgattcctatatcgcaacacctccatattgttcctgttgttttgcccttccccaatttgtaccactgacatcgcgttagcgtcacaaattcgggagatgttgctcggcggaggcgtccacatatcacgaatggacgggacgcgccagacctgacgacacgtatcgaacaaatccgtcacgataatgtccatgttggcgcatagcgtcggcactgtagtgcagggggactcgcatgtggttcgcgagttgagaaaggcctgagcctgacccttagaacctgttggttaagaccatcgtagggagcagtaaatgagcaatagtgcatcattgtttgccgatgtgtccagcggttgtaccgccgggactccggttccagccgattcacccatccgcgacaatatcgccgatgccgttcgccgcgtacgcgagacgactccattggcccagtcattcaccaatttcgtgaccatcaatttggttgccaacgcgcaactggcggccggcggcactgcggccatgagtttcctgccggacgacgtgatcgaaaccgcgaaaatcgcgggcgcgaactacatcaacgtgggcacgctgctgccgttctataaggatgcgctgcccgaaatcgcccagcgactcaactacttggacaagccgtgggtgctcgacccggtggccgccggcatcggccacacccgcaccgccattcttcagaccttcaaggccgctcccccgaccatgattcgcgcgaacgcctccgaggtaatcgcgctggcgaacatgtgggggctcaataccgaaaccgtgggggacgcttccgagcaccgccccgccggagtggaatccgtcgacgacgtggagtccgcaaccggtgcggcggtggcgctggcacagtatctgaccgaacagcacgccaagcattcctcccatgacgcttccacccgctgtgcagtggctgtgtccggcatcgccgatctggtgaccgacggcgaaaccgtgtaccgactgccgggcggcagcgcgatgatgaccaagatcatcggtgcaggctgctcgctgggcggcgtggctgccacatatctggcggtttccgatccgttgaccgccgctctgtccgcatctctgctgtacaaccgcgcggcagagatagccgatacgacttcgcacgggccgggctcgttccaggtcgcgttccttgacgcgctgtggaatgttaccgccgaacaggtggcggaatccgagattttggtgcagtagtttcagttccctctgatgagggagctcataacagtttttcccaataagacttccacaagaaacaacaaaggtaggaataataatgagtaatgaatacccatacgcctccatgcgagacaacttcgacttgtccgcgtacttcgtggtggggccggaggactgcaaaggccgtccgctgaccgacgtggtggatcaggctctgcgcggcggcgcaaccttcatccaactgcgcgccaaggaggccgatgcctctgagctgaccgacatggcccgcgacatcgcgcagatcatcgaggacaatgagaagtccgattccgtggcctttgtgatcgacgaccgtgccgacgtggtgtggcaggcccgccgcaagggcatcaaggtggacggtgtgcatatcggccagaccgacatggagccgcgagaagcccgcgccctgctcggcgacgaggccatcgtgggtctgtcggctgagaccgaaagcctcgttcagctcattaacgagctgcccgacggctgcatcgactacattggcgccggccctctgcacgtctccaccaccaagcccgaggcttccgtgggcggcaacgacggctccggcaagacactggacgccgcccagatcaacaccatctgcgctgccagtgaattcccggtggtcgtgggcggcggcgtgaccgcagccgatatggccatgctcgccggcaccaaggccgccggctggttcgcggtctccgccatcgcgggtgccgagaacccggaagaggccgcgcgcaccatggtcgaaggctggaaggccgtccgcggcgacaagaagcacggctacgcgccgcgcgtcgtagcccacacccccgctgctgatactcaggctgctcaggaaggggccgcaaagcctggctccgaggccactgagaagaagttcaccaacgccaaggacgccaaggatgcccagaagctcgccaagcagcagcgcgtggacatcgccgcccgtggttccaagcagcgcgacaaggcgcacatccgcaagaccaagtccgtaccgttcacctatcagtatggttcctacgacctggaagtgccgtacaccgaaatcaagctgagcgacacgcccggcgtgggcccgaacccgccgttccacgactacaacaccgaaggccccaagtgcgacccgaaggaaggtctgaagcccctgcgtctcgactggatccgcgaccgcggcgacatcgaagactacgagggccgccgccgcaaccttgaggatgatggtaagcgcgccatcaagcgcggccgcgccaccaaggaatggcgtggacgcaagcatgagccgatgcgcgccaaggaccacccgatcacccagatgtggtacgcccgccacggcatcatcaccccggagatgcagtacgtggccacccgcgagaactgcgatgtggagctcgtgcgctccgagctggccgccggccgcgcggtgatgccctgcaacatcaaccaccccgaggccgagccgatgattatcggatccgccttcctgaccaagctcaacgccaacatgggcaactcggccgtcacctcctccatcgacgaggaagtggagaagctgacgtgggccaccaagtggggcgccgataccgtgatggacctgtccaccggtaacgacatccacaccacccgtgagtggattcttcgcaactcccccgtgccgatcggcaccgtgccgatgtaccaggccctcgaaaaggtcgaggatgatgcctccaagctgagctgggagctgttccgcgacaccgtgatcgaacagtgcgagcagggtgtggattacatgaccatccacgccggtgtgctgctgcgttacgtgccgctgaccgccaaccgcgtgaccggcatcgtctcccgcggtggctccatcatggccgactggtgcctgcgccaccaccaggagagcttcctgtacacgcacttcgacgagctgtgcgacatcttcgccaagtacgacgtggcgttctctctgggcgatggcctgcgccccggctccctggccgacgcgaacgacgccgcgcagctttcc

SEQ ID NO: 726 - DNA, 7938 bp, Unknown
  R14_15m  MAG No. k141_46278
cctgagcggcctggccggcagcctcagcatctgagggatccggcaggtcgttcaggtagtcgtccttgttgaactcggacatcacttgttgtccttgtcgtcatcgtcgtccacgacctcggcctcgacggtgtcgtcgtcggaaccggaggcggagccagcggaagcgccggcaccgtcagcgccagccgcaccggcaccagccgcggcaccctcagcaccctgctgggcgtagaggacctggccgatcttctgggcggcggtcatcagctcagtctgggcagtcttgaccttctcggtgtcgtcacccttcagggcttccttcagagcgttgaccttgtcggtgacttccttgacgatgtcgtcggagagcttgtccttgttgtcgttgacgagcttctcggtggagtaggcgaaggcctcagcctggttgcgggtctcggcatcttccttgcgctgcttatcctcagcctcgtgagcctcggcttccttgaccatgcggtcgatctcgtccttcggcaggccggaaccaccggtgatggtcatggactgctccttgccggtgcccttgtccttggcggacacgtgcacgatgccgttggcgtcgatgtcgaaggtgacctcgatctgcgggacgccacgcggagccggagcgatgccggtcagctcgaaggtgcccagcggcttgttgtcgcgagcgaactcacgttcaccctggtagacctgaatcagcacggacggctggttgtcttcagcggtggagaagacctcggagcgcttggtcggaatggccgtgttgcgatcgatgagcttggtcatgatgccacccttggtctcgataccgagggacagaggggtcacgtcgataagcaggacgtccttacggtcgcccttgatgacgccggactgcacggcggcaccgacagccacaacctcatccgggttcacggactggttcgcttccttaccaccggtgagttccttgaccaggtccttgacggcgggcatacgagtggaaccaccgacgagcaccacgtggtcgatgtcgctcacggagatgccggcatcgtgcagcacgttgttgaacggcgtgcggcagcggcccagcaggtcggaggtcatttcctcgaagtgcgcgcgggtcagggtctcgtccaggtgcaccggggtgccgtcaggagtcatggccaggtactgcatggaaatgctggtggaggtggaggaggagagctccttcttcgcctgctcggcggcttccttcagacgctgcagcgcaatcttgtccttggacaggtcgacgccgtacttgttcttgacttcggaaaccagccaatcgatgatcttctgatcccagtcatcgccaccgaggtggttgtcgccgttggtggcctggacctgaatggtggagaagccgtcgtcatccttgccgatctccagcagggagacatcgaaggtgccgccgccgaggtcgaagaccaggatgcgctcgtcttccttgcctttctcaaggccgtaggccagagcggctgcggtcggctcgttgatgatacgcaggacgttcaggccggcgatcttgccggcgtccttggtggcctgacgctgggcatcgttgaagtatgccgggcaggtgatgacggcgtcggtgacgggctcgccgaggtatgcctcggcgtccctcttcagcttcatcaggatctgcgcggagatctcctgcggggtccacttcttgccgtcgatgtcgacggtccaatcggtgcccatgtggcgcttgacggaggagatggtgcggtcaacgttggtcacggcctgacgcttggccacttcgccgacgaggatctcgccggacttggagaaggccaccacggacggcgtggtgcgggcgccttcggcgttgacgatgacggtgggctcgccaccttcgagagtcgcgatgcaggaattggtcgtaccaagatcgatgccaactgcgcgtgccataatgtgtgctccttaatttttcgtttgttcttacgttcttcgcccaagttccgtttggccgtctcttgaaccttccaaaatttgagcctacatcactcaacttccatttggcaagttctattcccaaattccccacaaaaagttgagcgtgtctggctcaagttttttggagaggcgattgagggtgatggattggtgcgtttgaggccaaacccgcctatgcagaaaactgcaaggggtgactgggacagggcggaacggctactgtatggagtcatgtcggacgcgactcaatcagtacatgaaccaccagcggctttccgcataggcattctggataacgacgcctgcgcgctggattgcatcgctcggctggtgtcttcgacccctatccatggccgcatcgttgatgtatggagcactacttctccggcggtggcgattatggaatgtcagtccgtcagccaccataccgacgtactgctcatcgacatggcacttgacggcgttaccgggccacagattgctaccgaaatccaccggcgagcgcccggcattgcgctgatcgggctcacgtcataccgtcttgagacgtaccggcaggccgctgcagatgccggaatcgtcacgctgctggacaaggcgaatctcaccgaaacgcttgcaccggccttacgagaggcggcccaccacgccgagtcgccgcgtcaatcgagctccacagcgtctttgccatctgactcgccatcggcctcgtcatcagacctatcatcggcagtacccgatccagatacgcctgcactaagcgacatcgaacgcaatatcatcgccctgagcatggagttcctcagcaccaagcaaatcggcgcgcgtatgggcatcacggccaatacagtgtcgtcgcacaggcgcaatatcaagcgcaaactgcacgtcggcacatggctggaggcgttggagtattgccggcgcaatcatctgttgtcgccagatgcaggagagcgcgatgttctgtagccgtgttccccacccgtatctgtcgtgcgtggcggcggcgttcgcactgctcaaccttgcggaggggctgtatatattgcatatcgcaggagtcaccgcactgggattggccttgtttgcattgcgcacagcgttggcgctctggttcaccgcgcgccccgagcaaggcgcttatgggctgctcgcgctactggccgccgaaatgtttgcgccgatttccacgccgtttacgtcgtatattctggcgcttgtagccatcgcttcaatcagctacttccgtgcaatagccggcatggtctgcggcacattatttgcattgtgcgctattggctacggtgttattgcaccgtatggtgtgatgggacaaggcggttcactgaccttttctggcctggatattgccgcgatttgcatcggcatctgcatacgttcagcggcgcacaacagccttaacgagcatgaacggcgcgcacggcagcgcaatgttcgcattgcgcgagacttgcacgaccacaccaccaacgacatcaccgacatgatgctgctgattgaccggtaccgcttagcgcctggctcagtatcggccgctgagctaaaggccctacgcacgattgccgatgatgcgctgcagcacacccgacaggccatcgccacgcttgaggaagaaccgccgcaagttccaaagtcggctcttgacgtgactgtggcatctcggcgacacctatctgacgacatcgcgaagcatcgcgctcgattgcagcgtatgggttacgccggtgacgtcatcatcaccggagctatcgatacgctgaacaactcagatacagtgtttattgccgattttcttcgggaattgttcggcaatatcgccaagtatgccgactcaacgcagcgctacgtaatgctgattgccgtttctcaggaccgcgtcaccattgacataacggatcatccacgccaagacggagtatccctcgaagggaggcattccggactcgcatattatcgggaacgcgtgcagaacatgcacggagattggaacgtgcgggaagaacgcggacagtgggtactgcacgcttcagtgccggtcaataccattggctaatcaataacgccggctaaccgataccgcaccaccagcggaaatacggcgggcacaccgtgttgccggcctgcaactgctccccatacgacaacggcgacacctctgtcagtccatcgtcaaacgtgacgctcacatagccttggcgcagccgctccgtcaactgttcctcggtctggacacccaacgaacgagatacacgggtgttaccaaccaagacatagcccgcaacggcatcagtgctccaataatctgcggtccactgtggcagcatcccaagcaacagaaatgcaaccagcactactgtctcgcatacgccaaacgtcttcttcaccgagcctccaataacaaacgagcctgacgatagaatcgtcaagctcatcataggacagcaatatttgctagtaaatcgtcacctgcgtaatagaagctgcagtgttccagttacctatcgtatacggccccagtacaccggtagagtatgtggagccaccgagacttacgcggaatcgggtgaaccatttcccgttgtcgcttttcttcacaccgctccatgctcctgcacgcacaccagaaccgtagaatccacgattggagccgttcacgaacgtcaagcacacatcgttcgaccgacaaggaactctcgtactattacgcggctgaatagtctgttcattgtttagtggctcaacctcaattggttgggcatattgattaaaggtcacgctcacatagccttggcgcagccgctccgtcaactgttcttcggtctggacacccaacgaacgagatacacgggtgttaccaatcaagacgtagccagcggtatctgtttcatcggcgttggctgtcattggattcaccagcatagacgcaattatggcgatgacaactatgaaacttcgtatttgccgtcccactgtatgcataggagacccctttcatcgtgtatgggtgacgatactttcggcacccatactgaaggtatcgtctatgcaacaggtgcagccaatcattacagaaaactgcaatcgacacagcaaaatggccgcactccgcatcgatgtgcggaatgcggccaactcacggcagcagacgagcagactattcacagccgcccgctgactgctctcgagactcagcgacgttcgcgagcgaacttgatggtcagaccagcggcaatcagagcaatcgccatcatcactacaccaagcacagcggtaccggttttgccgatgccctcgttcttcttatcctgctggacctggccctcagcgacaacaccatcaggggtcttgtcgccagagccctgagccggtccctggaaatcgagaggcacagtcttgccagactggcgaccggtaacggtcagcgtgtagctgccaccctcagctaccttatccagcgcaatagcggtggtttcaccggtggcaaccctcacgccggaaacaggcgtggaggaattagacgcatcaagcaccttgccggactggtccttcagctcgtaggagaccaccgcgtcaccattaaaaccggtgaggtcggcgacaaacttgccgttctcattcttcaccgcaaccttagcgtccgaagacagcgcctgctgatcggcggtttcagatgcgaggcccagcgcgtgggcaatggtgaagaagttatcggtctgatcggtcaaaccatcaacgcgggatgcgccggggccggaagccgcaatgcgcagctgggtgcccgtgtggctcatgttgccctgagccttgctcgaatccgccgtgccttcggtgtcattgccatcggagtacaggttgctcgcagacgtgccgtaggagaccaccatattgctgccgtccttggtcttgagcacggtgctcagcgcgtaagccggctgggattccacaatctggctggtgtgagcatggtcagcggtcacgatgaccagcgtgtcattcaggttaatcttctcgagtgcagcggagatagccttgtcgaggtcatcggtctcgccaatctgaccgcaagcgttaccgttgtggtcctgcttgtcgatggacgcaccctcaacctgcaagaagaaaccgttctggctcttcgggttggcctgaagcagatccagtgccttcgaagtcatgtcggccaaagaagccgaattgccggcagcggtcttgttgcccaaccactttgcattggtagtgcactccaccgggttctcatccttggcgggatcccgcttggtcgcaacggacgggttgtactgcgtcggcaggttgccatcacccagcagagccagcaccggctggttctcctggtaccgcaacgcggagaaagcgtccacatcgttctcgacggtctggaagccgcgttccttggcctgctcccacagggtcttgcccgcataatcgccaccctgtgcggtctgccggaagtacttggagccaccgccgatggtcacatcagcgcgggtgtcgagcagctgctcggagatggagccgatgccgccgttctccttgagctgttcggcgcggcactgcttatccgcgttattggacgagccgtcggtcttgccctgcggtccgtagcacgagcgctcggtagaatgcgactcgagcaccgctggcgtggcatcctgaatttcagaagtagtcacgttaccggtggcaagacccttggctttggcgagctcgataaggttcagctgaggattgccgttgatgtcgatgtcgaccgcgttgttgtaggtcttggtgccggtagcccaagcggagccagaagccgaggagtcggtcacgggagtgacgacgccagcgttctcgttaattccgcctgccttcggatacttgccatcgctggagctggagcccaacgagaaagtggtgtactggccggtgccggcttccgcagtgttcagattcggctggccaatcttgtcaaggccatcgaacgaaccattggcaccatgcaggtaattacgggcaaccgtgatttcagaatcacccatgccgtcgccgatgaagagaataacgtttttcgccgtggcgttaccgtacacacccgcaatgcgctgggcgccaccgtgctgggacaatgcgtcaacacccttgccgtcctgcgcaagggccataccggggagcgcctccaccatggcaagcgcagcaactgccgcaccgactgccttcaactgattcttcactattcttcctttcgcttcaggaacaatcgatgaggccttcgaggccgaatccttcacgcgagtgcaggattccgatcgcctttacgatatggccgcaaaacatttgacagcagtaatccagcgaacgcgcaaaggaacttcagatgaacaataaacaaatcggcaagcccagcctacgggagaactactggacgtgccgacgccgaaggcaatgtcttcatcagagagcacgttgcacttgacgccgctaggctgcttagtatcggcgaaccggtcgtgggcgacgggcagctgacgctctccccgcagtcgttcgccgtgctcggatagcccgctaattgcccaactcaccgaatgtattgcaatcgttgtcaatatgagttacggtaaagatagaacagctcggacattggtctgccagattgccggaacctcaacgcagagcggccctcgaacagcaatgcaaacgactagcagtacccgatttgcaagcaaggagtcatcatgaccgacgcgcacggcaacgacgcagcgaccagcaccggcaccatcgcagacaccaccaacgacgccgcttccggtgccccgcagcgcgcggaaagcgcggaacgactcgcccgtccgctggtcaagctggccaaagcatgcgggctttcca

SEQ ID NO: 727 - DNA, 5237 bp, Unknown
  R14_15m  MAG No. k141_46984
gtcgccctggtagccgcgggccatggcgaagagcgtgtcctcctggttatcgaaggcgagacgctcgtaacgcttcggaatcacgttgaggaggatggcggtgtccagcatctgatcgtagtagctgaagtcgttgctggggatgaggccgatgccggcggcctgctgcagcttccagtgcttggcgcgcagttcggcggcggtggccttaacggcggcgaggtcgttggcacccttccagtagccttcgatgatcttcttcagttcgcggttctgcccgatgcgggggaagccggagacggaagtcagagtggacatgaatcctccaatgtatgcgttcgtaacccgacttagggtagcaaaacatccggattccaccccttataaatggccgcagagtgtcgttatagatggaatttatatccgctttagtcgaagtctttcacattgatgaccgcgagcagttcgccgctgtgcacctgccattcgtcgaacggtttgttcgatcccatgatcacgatggatgcgggcgaaagtcccaagttgagcaggtcgagtcgttcgccgtcggagtcggcggaggcgagccattgggcgctgatcgacacagtcggctcgtggcccactatcatgaacacgcggttcttggccttgacgtgggcgagctcgtcgaacaccgcctgcactcccccgtcatacaggctgatgcggtaatcgacgatcggcttgtcgccaaaggtcttgagcatgcggtccagtgtctggcgcgtgcgggtggcggacgagcaggagatctggtcgggcaccagtcccagcgactcgatgcccttgcccacggccttcgcctgtttcagacctttgtcggtgagctcgcgctccgagtcacccttgtcgccgaacggctcggccttggcatgcctcatgatgatgaggatatggtcgtattttttcgctgctttggcgactttgctcagcttgatgcccatccgtggctcccttcacgaaccgtctgcccggtgtggcggtgtggtgttgcttccagtatagaggtgtgtgagcgttcacaaactcatcgtcgggcggttattcatgcgtgttgccgagttctcccacctgacggtcgaggtcgcgcaacaccttacgtagtttgtggtcggagatgtcgcgcagttccagttcctcgatctgcgcctcacgctgttcgtcggtgagcgagtcgatgtcggtctgcgtgtccttggtcacgcgatcgcgctttctgagcgcctcgaatccggaggccatggcgcgcgagataacaaggaaaccggtatggccgatcatctggtggtcggggcgtacggcgaggccttgggccttccatgtgcgttcgaacgattcctggatctgcggctcggtccagcaaccggccgcgcgcagggcttcggccagtcgactcatctgcgtggtggtagttacgtaactgaccaacacgccgccgggggcaatcacgcggtatgcctgctcgagtctgttccacgggtcgagcatgtcgagcatgatacggtcgaaccagtgttcgggcagttcggcggccacggagtcgaagtcgccggttttgagatcccaccagctaggggcttcaccgtaatacagcgtggcgttggcctgagccactttggcgaattcggggcgcagctcgatcgtggtcagatggccgcgctcgcccacggcgtccagcagattcacgctcatcgcgcccgagccggcaccggactcaagcacgcgcatgccggagcggatgtcgccgagctggacaacctgggcgatgtccttcggatacatgatctgcgcgccgcgcggcatcgaaagcacataatcggccagtcgcgggcgcatcaccgcatactcccagccgccgatggcgcgcgacgatttccacggcttgttcttgtctttctcggggtagacctgattgacctgtgcctcgcgcttggcatgcacggtgaggatcacggtgccttcggtcttgccgatcacatcgtcatgcagaatcaggccatgctcggtctgcgtggagccgccggccacaagctgatcggtgatcttcttgcccttgcggtcggtgaactgcaccttctcgcctgcggtgagaggcccgcgcctcggctccataacttgctccttgtgtgctcggtgggtcaatcgctacaagtctaatgcatgtaagctcgttggtgaggtgatgacgatgcgaatgcagatgacaagccagatcgatgccggcggcaatgaccccattttcctgatgttccacggttacggcaacgacgaaagcgagatggtgcggattctcgacgccgtatatgcgccgacgcgagccgatgcggccccgtccgcaattgccgccgtacccagctatatctcgttccgtgccacctacgcgaggccctatatgggcggcaattactggtatcccgacggctgcggcgtggacgagcgccaacgcgaatgcgcggcggtcggggatgcggtggcttcactgctggatgcctcggcattcgcccatcgcaggaagatattgatcggtttctcccaaggcggttatctgtcgtatcgtctggtcaaggtgcatccgacgttgttcgatgccgcgatcctgcttagcccttcgttcatgggcgaggaacaggcggcgcttgactcccctacccgattcttcctggcgtatggcgcgcaggaccgcacgattccgatgcccgaccagcaaacggcccatcaggtccttgaacgggccgggcatctgacctatcgcgagtattccggcatggcccatgccatctgtgatgaggaaatcgccgatatccgggatttcctacgtgccatatgatgccggaatagcttcaatatggaatatctccgttcaaagaggtaccggtccaagtagaagcggctcaacaatggcggaatggcgttggccacgcccattcatcgcgcgatggttctgcgatcagctcaattcccctgccggctgatgccgcccttatgaccggtggccttgaatggcgtggcgcgtgccgtcaccttcggccccggcagattcgtactggtattggatcgaccgcggagcccggcagccggctgggactcggagcgtcgaccagtacccgtgatgttggtatgccgtttgccgtcgtgcgcccgtttctcaccagcaccttcaacctcgtcaatatcaatgcctttggcgcgcaaagcacgcgcccaccgctcatccatcgaactcctcacacatcccattcgggtttccacgtgtactgcatgtcgtaggcgctgggcgaatggcggcaggtggttcagagtgatcgggccgaatgcgacggcgtcaaaagtcatcgttgctcccttcgatggtgttggccaacaggttccaagggtcaggcacagcgcctttctcaacccgttcgccgccacgatggccggcagcttgcgttcacgggttcccctgcaatgcgcctcattatggcaacacgaaccgacaggtgccggctgcgcctaggatgggaaatcattgctacacgccgaaaagggaaggcgactgtcatgaggtatttcacgaccgacacgcatttcgggcatccactggtcacggtgttgcgagggttcacgacgttcgatccgacgcactcgcgctatgaggaggtgcggcgcgcatgatcgcaagaccgccgaggattgggccaaggaggagacgttcggcgcgggtctgacgtttcgtcaggtcgccgatacggatgcgcatgacaaggcgattgtggatcatatcaacgctgtggtcggcccggatgacgagctgtggattctgggtgatatcggtttccgcacatcgctgacccatctgaagaactgcctgcgagcgctcaattgcaagcatctgcatggtgtgatcggcaaccatgatgactggtggcgggaagaccgccccgcactcaacctgttcgaaagtttggagccgcacgatacggttgagattgagggactcggtacggtcaatctttcgcattacccgtatcgggaggatctgacatacagttggcccgatgatgtggcgaagttcagcggcaaggcgttgccgtttaacggccgcaggctgctgtatggacatacacatcagctttcgccagatggtgcacgcccggaggcactgaatgttggcattgacacagcattgaccgccgttgagatgtatgcacgctgaacacgcgcctcaacggcattggtctcgtcatctctcgctcacaccaacggattgccggcaagacgggtcaattcggcgttcagctcggggaaatgctcgttgccgacgaacggaccgtattccgtgccggattggaatgggcaccatgcctgaatggtcatatgcttcagccgtgaataaggcaggatgccaccggtgcaatcggctgcgggatcgctcgccatattgaattggatttcagcgtcgagcatctgtgtatgcattccgccgtgtcgaaatagtcgatgccggaatcatgggccacggccacggtacgtgccgcatcggcggcatccaacgcgtccatgcgcatcacgcccagcgccactcgtgacgcaatcatgccggattgtccgatttcctgagtcttcatagtgtctcatttctgttatcgcgaatcggcgaacgggcactgtccgcctcgttgccgggcagcaatctccattgccgcggcttatgtcaccttatcgcttgaagtgcacttgaaggcaactcgcaggcaggcagcgcgcgctgccgggcgcgtcttcgcgccttcatgtcttcgctgtgaccgagacatcgttgtgccgtaatcatgcctatttcttgtatgatgacctctatagcaacagagctagggggattccatgaacactaccgattcagccaaagtcaccgatgccaatgccggcgcaaacaatgccatccatatcccgcacaatcccacgcttgccggattggccacgctgacccgcaacgtggcgtacaagaccggggccgataacctggtgatggatatcatctcaccacaatccaccggcgatgacgatgaccgccgctaccccaccgtgatattcgtgcaaggcagcgcctggaccacgccgcatcgcgactacgagatcccgcagctctcggctttggcccgcgaaggctttgtggtggccacggtgaatcatcgcgatgcctcgagcgatcccca

SEQ ID NO: 728 - DNA, 5833 bp, Unknown
  R14_15m  MAG No. k141_47951
acccgttgggggcgtgtggatgagactttcggcgaagacccgatgctgatcggcgaactcgcctccgccatggtcaagggctatcaaggcggcgccaaggccggcgaggccctgccgaagaacgcgatcctggcctgcgccaaacatttcgccggctattccgaaacccaaggcggccgtgacgcctccgaagccgacctctcccaccgcaagctcgaatcctggttcctgccgccgttcgagcgcgtggccaaagaaggttgcggcacgttcatgctcggctacgagtccatcgaaggcgtgccggtcacgttcaacaaatggctgctgaccgacaagctgcgcggcgcatggcaatacaacggcacgctgatcaccgattgggacaacgtcggccgctcggtatgggagcagcatgtcaagcccgattacgtgcacgccgcagccgacgcggtcaaggccggcaacgacctggtcatgaccaccccacagttctatgagggagccatcgaagccgtaaaaaccggtctgctcgacgaatccctgatcgatgacgcagtagctcgcatcctagctctgaaattccgcctcggcttgttcgaagacccgcgtctgccggacgccgaacgtatcaaggcggtcatcggttcggccgaacaccagcaaatcaacctggagctcgcccgcgaatccgtcgccctgctgcgcaacgacggcgccctgccgttcgccgcaaacaaggccaagcgcatcgctgtggtaggcccgcttgccgacgacgcccagaaccagctcggcgactggaccggcaactccggtcaggtctcttggatgccggatggccagcctcgaggcatgattaccaccgtgctcgacggcctgacccagctcacctccgacgattgcgaagtggtctactcgcgcggcgcgaacgtcatcgacctcgtgcctgaccctgctggcgagttctacccggacggccagcctcgcccgaaaatcggcgtttccgccgccgtcgatcgagcaatgatcgacgaagccgtggccaacgcccgccagtccgatctgatcgtggccgtggtcggcgacgtggtccagctggtcggcgaaacctgctccaccgccacgctcgaactgctcggtggccagaacgccctgctcgacgcgctcgccgccgtctcgcgcgaaaccggcaagccgatggtcaccgtgctcatcagctccaagccgcaggtgttgcccgcctccatcgtgggggagtacggcgtgttcgccaagcgcgtcagcgaccctgaaaccggcaccggctccatcctgtgggcgccgaacccgggcatgcgcggcggtcaggccatcgccgaaataatcctgggcctgaccagcccgtcgggccgactgccgatcaccttcccgcgccacgcgggccagctgccagtctactacaaccagattcgcggccagcacggcgaccggtacgccgacctcacccaggatccggcgttcgcgttcggcgaaggcctgagctacacgacgttcgcatacggcgaaccgaccattacgggcggcgcaagcaacgccgacggcacattcgccgaaaccgacaccgtacgtgccgaaatcaccctcaccaacaccggcgagcgcgccggcgtggagatcgtgcaggcctacatcggcgacatcgtgacctcctacagctggaccgaccgcgaattgaaggcgttccagcgcgtcgcactggaacccggcgagaccaagaccgtcaccttcgagatcccggtggcgaactgcacgatcgtggacccggacgccaaccgcatcgtcgagcccggcgaatttgaactgctcatcggcccctcctcgcgccgtgaggacctgaagcgcaccacgttcaccgtggcgtgagtgagtctgacaatcgccggataataacaaagtgggatgaggctcgatgccccatcccacttgttggcttgttgtactgttgcgatgttgctggtcagcgtcagtcggacgtttcagtcggacgtggtgatgtgctccacatcccagcgcacgccgagcacttcgggcgcgcaactggcgttcgagccctatcagcgcgcccaatgccgtgccgagcacaatgcgtacggtgcagtcgagaatgatggccagagaaagcgtggtgaacatgaggattcacctcctgaaaagtagacgtcaggaacttcccgcacgccctacagcgccagcccgcctcccgcaactacgtcgccgcgttcgggtggttcgggctccgtgcggtgagtgggacgcggccgtatgatggaagcgcgggtggtccgggattggtccgggactgttggatgcggcgggaggtgtcatggttcctatcgagcacgtgtacgaccagattcgcgcgtttgccgctgatgccggcgctcgcaaggtcgtgctgttcggttctcgcgcaaagggcgtgaaccggcctaaaagcgatatcgatcttgccgtggccggttgtcccgatttcaatcgcttggagcagaaccttcaggacaatctgtggtcactgcttaaagttgatgtcatcaatctggatgagccgatttcttcatcgctgagggcggagattgagcgtagcggaaaggtgctgtatgaaaaagtatgagaattacgtttccgcattgaattcgctgcgcaaggctcccgaacaggatctcggcaatgatttcatccagagcggcattattgacaagttcgggttgcagttcgagcttggttggaaactgttcaaggcgctgctggcttatgagggagaccctgtttccgcttccggctctccgcgagatgtgctcaaaaccgcttttcaatactatgatttcatggacgaatcgttgtggctgcgcatgctgcgcgatcgcaatgattctgctcatatctatgatgaagaacgagctcggcgtcttgtggacgccatcatcgctgattacatccccgagtttgagcgtgcaaatcaggggttggtcgctcgctacggtgaagcattgaacgattagcgtgacaggtatggcatcgggcgcgctgggtgttggcgaacgaattaatggggtgaacctcggcaattggctggtgctggagcggtggatgaagccggggatttttgccgccagcggcgaggcggacgagatctggctgcatcgggctacgaagtcggctgagctggaggctttgctgacgcggcatcgcgacacgtatattaccgaggccgatttccggaacattgccgcacatggctgcaatctggtgcgtattccagtgccctatttcgtgttcggggatgtgcccggtcacccgggctgtaccgagtatctggacagagcgttcgactgggccgagcgggccgggctcaagattcttatcgacctgcacacggtgcccggctcgcagaacggattcgataacggcggcctcaccggcgtggtgcgctggcatcgtagcccgcgagcggtcgtctatgcgctggatgtgctggtccgtctggctcgccggtatcgcgaccacgcggcgctgttcggtatcgaagtgctgaatgagccgattgactggctgacgtatgccatgtcaccatcgagcaggcaggcgaaagaccggtccgaagcgcggggaagcgggcctattccgatggcgttcctcaagcgtttctaccgcgagacataccaccggttgcgcccgattctggcagggaatcaagtcatcgtgttccatgacggcttccgactgggccgttggcgggactggttcgtgcgcgagggcatgcggggcgtcatgctcgatacgcatgtctatctggttatggccgagcaattcccgctgttccgtctgatcccggatcggtggctgatgggctggtatcgcttgttcgtgcgctggaacgaacgccgcatccgccgggccgcgcgctatacgccggtgatcgtaggggagtggtgcgtggccaacaatctggtgaaccgaaccccttcagcgaggaatgccgtctatcgcgaggtcgccgccatgcagcgcaaagcgtggagcgcatctgccgggcagatctactggagctaccaactgcgcggcaatcgcgctttcctgcctaccatcgacccgcaatccgacacgtcacgcctcgacccctgggatctcactcacgtttggcacgccggttggatggcctgcagccgcaccaattagcgatatccctcccaaaggggcaaaggcatcagaacatcctcgcaatcggcccacatggtattgagatcttggccgggggcgcgcagccagcgcagctggaggccgtccatcatcgagaatccggcctgcagcacatgtccgacattgacgccttccggcacggcccagttgatgttgagcgccgtggtgaccgtgcggcgctcgcggtcggcaaaataatcgtgcgcggggtgggccgggtcgagcgcctcggcgctcagcgtggagaacatatgcaccaacgtgggccttttgttcctgggcctgccggaagccgcggaatccgagggcttcgaccgcgacaccctcgacatgcccgccaagcagatcgccctgctcgaacaggtcgccgccacgaaccagaacgtcgtggtcgtgctgtccaacggctccgtggtctccgtggccccgtgggccaagaacgccaagggcatcctcgaatcctggctgctcggccaagccggtggcctggcgctcgccgatgtgatcttcggccaggtcagcccgtccggcaagctcgcccagtcgattccgctggacatcaacgatgacccgagcatgctgaactggccgggcgaggagggccatgtcgactatggcgagggcgtgttcgtcggctaccgctactacgacacctacggcaagtctgtggactatccgttcggtgccaagatcgtggccgccgtggccgccgccggcgaggccggcgagctgacgaagctgctcgacaacgccatgatgcgcatgttcctcaactccatgccgatcaactcgctgtccaccctgctgggcgaaggcagcaagaagatcgccaagttcatggtcgacgagtacgccaagctcgcgaagtaagggctgaagcgaggcaatcgcacggcgtaagaaacccccgttgaggggaattttgtctgttaacgaattacactggaataccgtaaggcagggacaatggagggtctgtggacagaactatgccatacccccgtttaaggggagtattcacgggggggggcgttcccggcgacaacacccccggatcatcaacgacagggcaggaaagtcataccaggaccggcgacccggccccgaccatcgaggcggcctaccaaacatggtaatggggtggcagcatgaagtgcttttggtcggtaataccgatttcattaccaaacagtggattcagcatgcctttccccgagaccatgtggtgatagcggaacgagaaggcaccgtggacggcaatgaccgtctcagaatcgtcaacatgtctgacgccaacacccttgccgaaacccttaccacatacgaatttgatcgcatcgtattcttttccgaaaatctgaccccacgcagtgaccgagacggcgatctaggaacattgcgaagatttctgcatgccatttgcaacaggcaaacgcaaatactgatggtcagcggccccgaatccgaatttaccgatccggaaaacgccgacgtacgtgataccagcaaaagtctgatgtctcgagcgtcggaagaactctgcctgtattatgcgcgtacctaccgtctggaagcgaaaatcattcgaagcccg

SEQ ID NO: 729 - DNA, 10466 bp, Unknown
  R14_15m  MAG No. k141_48389
cagccacactcaccactcgtggcgctgataggcgattctggtggtgtcgaccggccggtcgagcagctggatcaggccgcaacgggcgaagccggagctttcgagcacgtgctgcatggccttgttattggggtgggtgtcggcgcgcacgttgccgtagtgcttcagggcccacctgatgcagtcgcgggccgcgtggcgcaccagaccggatgcggcgatgcggtggatggtcacataggtgtcgttgtccagccaggcgccgtcgattttggcgtaggtcggatccttgcccgggcacagggcgaactgggccagaatgcgttcgtggccattgcaggtgtcgaccagcagcatcgtacgctggttggcgatgtcgtcctcaatcaccgattcacgcggaaattcgttgccccactgggtggggttgccgttggcggccatcaacgcgcgtgcgcgtgcgtagattttctgcatctgcggcagatcgcgcatagtggcgtggcggaaacggcggcctgtcgccttgtttgcagcgttcgactgagtcacttctcacctctccgacatgccgggttgccggcacggtgaccggcgactaactgacggccaacctaccatgccgtaggcacaagaaatcccgtccgcgttgcatgacggacactaataaacaatgactcccgtccgcaggagccggacagtccagccgagttgaggacagccaccctcagtcggcttcgcccccggctcccgccagcgggagccgaatcagaattgaatcgaatcagacgaatcagacgaccttgcgctcgaacgggtcggagctgatgccttcctcaaggatctgcttggcccattccttggcggcgaacaggctgtggtcgcgatagttgccgcagctcttctcggtgatggcgggcacgtcatcccatgtggccttgtatgcgatgaactccaacgattccttcaacgccttggccacatcctcggtggagtgggtgccccaggtcagcaggtggaagccggtgcggcagccgaacggcgagcagtcgatgtagccgggaatgcgttcacgcagcagcacggcgatggtgtgttcgatggtgtgcaggccgccggtggggatggcctgctcgttcggctgggtcaggcgcagatcgtaattggagatcacgtcgccgtgagggcccgtttcggtgtcgatgtaacgcacgtacggcgccttgaccttggtgtgatcaagctggaatgattcgacgacgggcttttcggccttgtcttctgccatgctgttgcctttctacttgctgagtgttcggtcatgaagtatcgaacagtcatcgtagtcgcgccagcccaagaacgcccgcaaatactccgcggttcgctataggagattgttatgacgcactcccggcattgaacgaggcgatggtttgcatgaagcgctggccgtagaggtcgagcttgtgttgaccgacgccgttgaccgccagaaattgcgcgttggtaaccggcttgatgcgggccatgtcgcgcaaggtcttgtcggagaacacgatgtacggcggcttgccgatttcctgggcgatggtgcgtcgcagttcgcgtagcttctggaacagcgattcctcgtcatcgtccgggatatacgagcccagcgcatcgccgggaacattggcggaatcggcagtatcagccactcccccgctccgaccggaaccggccgccgccgacttgcgttccacccgtttgatctcatagtggaagtcgggagcggcggtttcggccgcccgcgcaccgaacatgacgattggcatacgcccttcggcgattgacaggtacccgtccgtggccatctggctcaacacgtcgcgcacgcgagcctcgttcacgtccttgagcatgccgaaggtgggcatccgctccgggttcagccatgccagatcctgtgcccgcgaaccgcgcaggatcttgacgatcttgccggaaccgacgcgctgccccacgtcatgcacgcaacggctgatcgcctgcgccacgcgggtcacgtcgatggtctcgaacgtgctttcgcagttcgagcaggcaccgcatctgccggactgcgaagagtccgccgcaatgtcttcacccgccgcggaaccagcattcggcgacaattcctgaccgaaataccgggtcatataccggtgcaggcagtcggtggtgcggcagtagccgaccataccgtccagcagccggcgcttggactggcgaacgatctcctgctcttcgggagtcaatcgctcgttctcataatcgttatccagcaaccgacgccgggtgacgatgtctgactcattccacagcagcgtgcatcggctgggctcgccgtcacggcccgcgcggccggcctcctgatagtaggcttcaatggattcgggtagattgtggtggatgacgtaacgcacgttggacttatcgatgcccatgccgaaggcgttggtggctacgaccaccggcaccttgtcggtgatgaagtcgcgctgggccacctcacgcgcgtccggcgacatgccgccatggtaggcgacggccggatgccccatctggttcagcgtgtcggcgagcgcttcggtggtcttgcgggtggcgcagtagacgatgccggattcgtccggatggtcggccacataccgcgccacccatgcggccttgtatttggtctccagtttgaccacatcaaaatacaggttcggccggtcgaatccggtgacggtgacggccggattccgcaatcccagcagtcccacgatgtcccgacgcacccgttcggtggcggtggcggtgaacgcacccaccggtggacgctgcggcagcccggcgatgaaatcgccgatacctaagtacgacgagcggaagtcctgaccccactgggagacgcagtgggcttcgtccacggcgatcagcgagatcggcgtacgggcggcaaagtcgcggaatcgcccggtttccaagcgttccggggccacgtacagcagtttgatctgcccggcggcggcttgggcgaacaccatcgcctgctcgtcgggagtttgagtggtgttgatgaacgcggccggcagaccgaggtcgttcagcgcatcgacctggtcgcgcatcagggaaatcaagggagatatgaccaaagtcgcacccgggctgagcgcggcgggaatctggtagcacacggacttgcctgcgccggtgggcatcacgcccaagacatcgcgtccggcaagcaaagcctcgacaattccttgctgtccgggcctaaacgagtcatagccgaagtatcgtgtgagcgcctccagcgccgcctgatgtgctgtcataaacgaccagtgtaggccgaccgcggatggatttcatcgtataacggaatacctcgtaacgatgtacgtagcccttccgtattattatgcgtcgaggaacgctattcccggcatatcacacgatatgccgctttgagagaactaagacggggcattttatggccaacaatacattttccttctcctctcctgacgatcaggagacggcggtgctgcagcctgtggccgccgatgggctgttcgcagccgcggccacaggtaccgccacgccacagcaaagcgacaatggcaccaataaccatgccgacaatacagcctatgtgggtgaacatgttatggcatctaccaccgctaaatcacatggcaaggccgcacggatcgccatcataaccatatttgcagtgttgcttgccgcattaatagcctatttcttcgtcggacgttggtacttccaagacaaggctgcgcccggtgttcatttgggcaatgtctctgtcatgggccagacccgcgaagaacttgcgaatactgtgaagcagcagctgaataacaccacagtgacgttcaccgccgaaggcaacagcgtcaaagcctcgctgaaggaccttggcgtcaccgtcgacacggataaaaccgtagatgcgctgttgaacgcgaagaccggcgacgtggccaagctcaatattttcgatcagccgcatatcgctctgaccgccaccagggacaaagagactgccgaacaattcgtcaccgccggcctggtcgatgaggccgaccgagcgcagattgccaccgttgtctacaacaagagcaccaagcagttcgattacaccgcgggtcaggatggcaagggcccggatatcaatgttgtcaatgctgcagtcaaggaggccgtcgcgaccccgggcgaaaatgcgacggtgccggtcaagctacagactgcaaagaatccgattgatgacgcgagcgcacagcaaacacagtttgacgccaatgccaagcttggcctcaaactgaccgtggacaacggcgtgaacaagagcgtcaccatcccggccgataccattgcctcattcctcaagcccacggtgaataaggcgggtggcaccatgagtctggtagtcgaccgcgatgccatcaccaagtacgtcaccagtgacagcgtaaccaaagaactgactgttcccaaggtgacacgcgaggtctacatcacgccgaaagacgaaggcggcgtggaaattggtgccgataagacactcggtgtggatggtattgaagtgactggtgccggggacgcccccgaacgtctggctaccgccatcgagcagaaccagtccactgattccactgtggctgtgaaagacagcccatatgatgtcaagcaggtcgaggtgcctcataacttcgatacggcaaatggcgataagtgggttcatgttgatctgacgaaccagactgccactgcatatcagggcaccacggtggtcaagaagttcaacatcgcttctggcaagcccaccgccgatggttccatgctgtccgataccggcacgttctacgtgtatctcaagtacgaatcgcagaccatggttggcgaaggctacaaccagccaggcacgccgtggatttcctactataacggcggcgaggccctgcacggtgttcctgcatacatgtggggcgagcaccccatctatgtgcagcagggtatcccaggctcgcacggctgcatcaacatgcaggtggccgacgccaagtggatgtacgactttgccaccatcggcactcgtgtggtcgttgatggcaccacaccgacttccggtcaggcgttgcgcccggctggtgcggatgccaccggatggcagggcggcaacgccagctgattcgatccatgtttaatcgattttttgtaggtaccaatcgatagcgagtccgccgataagcgtggtggcaccgtcaatacggtgacaccagtaccgtcagtacggtcagatacgatccaacgcctgcttgagatcggcgataaggtcgtcggcgttctcgataccgaccgaaatacgcaccagattggcgggcacctgcagggtggtgccggccacggaggcgtgggtcatggcggcgggcacctcgatgaggctttccacaccgccgagcgattcggccagtgtgaagatctgcgtgtggtccacgaagtgcttggccgcctcggcaccggccgcgagctgcacggagacgatgccgccgaagccgccgtgcatctggcgggcggcgatttcatgacccgggtgggactcgaggcccgggtaccagacgcgctcaatcacatcagagggctgggattcgagccattcggccaccttcagggcgttggcactgtggcgcttgacgcgcagatccagggtcttcaggccgcggatgtccagccaggagtcgaacggggagggcactgcgccggcggcgttctgcaggaaggcgaccttctcacgggtctcctcgtcgttgaccaccacggcaccgccgaccacgtcggagtggccgccgatgtacttggtggtggagtagaccaccacatcggcgccatcggccagcgggtgctgaagggcgggcgaggcgaaggtgttgtcgaccgcgaccttggtgccgtacttgtgggcaacttcggcggtggccgcgatgtcggtgatgttgagcagcgggttggacggggtctcgacccacacatactggtagtgcttggaggccaatgcggtttccacggctttcagatcggtgatgtccaccacgtcgaggcccacaccccacggcacgaacaccttggagagcaggcggtaggtgccaccgtacacatcgttgccgagcaggatgttgtcgccgggcttgatggtggagcgcagcagcacgtcgatggcggccaagcccgaggagaagctcagcgcgtacttgccgccttccacggcggcgagctgctcgtcgaagctggtgcgagtggggttgatggagcgagagtagtcgtggcctcccctgaggcccaacacgccatcctgcttgaaagtggaggtggcgaagatcggcgtgacgaccgcaccggtggtcgggtcgggctcctggccggcgtggatggcgcgagtggcgatgtcggtgttggcgaacttggcgttgtattcagcggacatgatattgggttcctttcgggattgttccgtattcgaaggtaaaacaggtgcggttagttagtattgattcttttgatagctagttatggagtccatccgcagctccctcatcagagggagttccgttaaggtactgctcggcgagggagggcttgctggtgtgttccacgatgtcgccgtagccgttggcacgcatccagtcgtcattgaagatcttctccagataactgcggccggaatcaggggcgagtaccaccacaatctggttctcgtccaaatcattggcaagcgcgtacttgatggcgctggccacggccatgccggacgagccgccgaccagcaacgcctcctcgccggccagacggcggttcatttcaaaggcttcggcgtcggatacgcgcacgatgtcgtcggtgatgttccggtcgaaagccttggggtagaagtcctcccccacgccctcgatgtcgtactggtggacttcgtcgcgtgaggaagcggagtagatggagccttccgggtcggagccgatgaccttgaccgcgccgttggaggcttccttgaggtacttgccggtgccggagatggtgccgccggtgccaatgccggccacgaagtgcgtgaccttgtggtccgtagcctcccagatctcggggccggtggtgtagtagtggctcagcgggccgttcgagttgtcgtactggttcgggcggaagccgccgggaatcgtgttggccagtcgttcggcgacctggtagtaggagcgcgggtcgtccgggccggcgtcggtcggtgtgacgatgacttcggcaccgtaggcgcgcagcaccgcgcgcttggattcggaaaccttgtccggcagggtgaaaatcgtgcggtagccgcgctgctgggcgaccagggccaggccgatgccggtgttgcccgaggtgggctcgacgatcacgccgccgggcttcagctggccggactgttcggcggcgtcgatgatgcgctcggcgatgcggtccttggaggagccgccggggttgaagtattcgactttgacggcgatggtggctttgacgccggccgcctgcgggatgtggttgagcttgacgagcggggtgttgccgatgagttctgcgaggctgttgtggatggtcatgtgaagtccttcgttgctggggttgtgggggttttgctgcgttgcgttcgtgaaccgacgttcccagacgaatggactgtggctttggtttgaaaatcgagtattcccgctcactgtacggtgaatccgaaaagtgaaccggtttttcatgttaaccacggctcacgcattacacgattacgcttgtgccatcggatacatgaaaagtatgcggcagattcgccgcgattcgaatgctccatctcaagttatgcgtcactgaccgctcgcccaggggcgtcggttagcgacaacaacatgagataatctgcatgcctcacaccatagcacaacccgcgacaagcgcgtgtcgccggcggactgaggggagtacgacggcacccgtaactcccctcagcctcactgcattcgacagctcccctcagggaggggagccaaaaagatctataacgaggctgcctcgatgagctgacgggtgtaatcggattgggggttgccgagcacttcggcggtgggacccgtctcttcgacgcgcccgtcgtgaagcacgaggatgcggttggcgatgtgctgcaccacgccgagatcgtgggagaccatgatgatggcggtgctcggccgggcctcacggatagcggcgaaggcgtcgaggatctggatgcgcgcggccacgtcgatggcgctcattggttcgtcggcgaggattaccttgggctcgttgatgatggcgcgggcgatgaccacgcgctgcgcctggccaccagacaggtcgattgggtaccggttcaggaagtccgccggttcaagacccgccatggtcagagccgcgaccacccgctcgtcgatatcggtgttgttcagatcacgtcgctgcagactcagcggttcagccaccgatttggcgacttgccaacgcgggtcgagtgatgagaacgggtcctggaacaccagtcccgattcgcggcgcagggtcgcgaatcccggcgattttcggccgccgacaatggattggctctcgtattccacgctgccggagtccgcggattccaagcccagcataatgcgggtcagcgtggatttgccggatccggagccgccgatcacggccagacattcgccggcgtggacgtcggcggagacgtcgaagaggacttggtggcgtgcggtgcgcggtccgaaggatttggtgatggagtgggcggagaggagtggcacactgctgttactcatgcgaatcctccttgggggtgtggagggtgagggtttgggcggcggcgaccaagcgttgggcttgcggcgtggtcggtgcagcaagcaggtcggcggtgggtccggattcgacgatgcggccggcgtccagcacgtagcagcgggtggtggcacgcgcgagtacggagaaatcatgggtgatgaacagcatggatgcgccggcgtcgtccaccaacgaggtcagcaggtccacgatctgacgttgcgtgatggagtcgagcgcggtggtgggttcgtccgcgatgatgaatcgcggtgaggtgatcagcgccgtggcgatgcccacgcgctgctgttggccgccggacagttcgtgcgggtatgtgccggccacgtcacggtccagtccgaccttgtccagcatggtattcactcgctcagcacgttcggccttggtcagatcgtagtgcagtctcaacggcaacgcaatctgctgcgccacggtcatcaccgggttcagcgcatgggccggattctggaataccgtacccacataccggccgcgcagatcggcaagcgtatgctcgtcggcgtacgcagcggaatcgtggcccgaggtggcaaccctgcgttcaccggcaacatggtgcctatctgccgcgccgcgttcttcgtcagatcctgagtcatcttcctgcccatgccgcgactcggcggtttctccggacaggatggcggtttctcccatcgtgatggtgccggacagcacggcctcgcgcggcaacaggccgagcaatgacttggcgatcatcgatttgccggagccggaggaaccgatcaggccgacccgttcgccgtccgcgatggacagatcggcatccgtgacaatcggtttgccgccgatagcaatattcagcccgtgaatttcaacgctcatcatccgtctccttcggcgctgccactgcggactgcgccgcagtgtcaccggctcccctagccaccggcacaaccgcaccgggcacagtcatctgccgcaacgcgggattagccaccgggtcggtggcgtcgcgcaacgcgtcgccgaacaggttcagcgcgaccaccaccagggtgacgatcagaccgggccacaccaccgtcaacggaaacacgttgatgagtttgaccgaggtggccagcgaatggccccagctcggcacccccgcgccgacgcccacgcccagataggtcaggcccgcctcggccagcaccgaggtgcccgccgacatcgacgattgcaccatcagcaccggcgtgatgttcggcacgatgtgtctgaccagtacgccgaacccgctggcaccgttcgcccgggccgactgcacgtatcccgagcgggcggcgagcagggcggccggacgggcgacgcgcgccagatgcagcccgtagccgatggagcatgcgccgatcaccacggccgcggatgcgccgaacggcacggcgagcagcagggcgatgagcacggtggggatggagatcagcgcgtcgaccacggcgaccgacgccgaagcgagcgccgaagaacgggcgaccatcagcccg

SEQ ID NO: 730 - DNA, 12573 bp, Unknown
  R14_15m  MAG No. k141_48490
accgtgttccgcgccgtccagattctggagaccagcatcgcggggctgccccttcgtcagttgcgcgatggcgtggagatcgtgccccaactgccgataatctcccgccccgaccccaaccgtcatcgcagcgagttcgtccgtctgaccgtgggcgacatggtggtgcggggcgaggcgttctggctgaaattgagaggcctggacggcaccgtgaaaggtctgcgcgtgctgcccgcctcgttggtgagcatcacggacctgagcggcgaccccgcgaacccgtggaagcaatacgggtacatgggcaacgtctaccgcgatgacgatatccttcacctgccgttcgtgagcattcccggcagactgcatggactgggacccgtggaggccggccgcgcggaaatcaacggtgccatggacgcgagggacgcgaaggccatgtggttcgacgagccagcccagccttccggcatcctctccacggacaagatgatcaacgacgaaatcgccaccaacaccaagcaacggttcgagaagaacatgaagggcgtcaaggtcatcggcgggggcatgacctacacgccgttgctgctcagcccgtccgacatgcagtatctggaaacccagaaattcgacaccaccctactttcccgactgttcggcatcccgcccaagctcatgctcgccgaatccggttcgagcctgacctacagcaacgtggaacaggaatggagccagttcgctgacttcaccctcaacgcctacgtgcagccgatgaaggacgcgctgagcatggtgataccacgcggccagaccatcgatttcggctgggactcgttccgccgttcggacacgaaaacccgcatggagacctacaaaatcgctatcgaggccggcgtgatgaccgtggacgaagcccgctcaagggagaacatgcccccgctcggaggctcacaggaaggaacaaacaccgatgaagcatgaaatcggattcaaggggcgaatgctcgcccgctccgaggacgacggcgacgggcgcaccatcgagggcgtggccgtgccgttcggcgacatcatcgacgtgtggggcgaacgcgagaccttcgaccccgacaccgtcttcgaggggctcgactccgcgaagctctactaccagcacgacacccttatcggctccatcacatccggcgagaaccgcgacgacggcctgcacatcaccgcgcgcatcgcggacacccagcaggggcgcgacgccgtggccctgctgggcgagggggccctggattcgctcagcgtgggcttcgtgcccatcgaggaccggaaggacaaggacggcgtgacccatcgcaggaaggtccggctcttggagaccagcctcgtgagctggccggcctatgaaaacgcgaaactcaccaaccatcgcaacaacaatcaggaggaaaccccaatgaccgaaccggacgagaaatggaccgaagccctggccaagctcaccaaccgccaggacgaacaggccgagattctgcgcggcatcgagaccacgctgaccagccgtctcaatccgcagcgcggcacgtcgccgctgggcgaataccacagccagggcgaactgctcaaggcgctggtgtccgacgacaccggcaaggccgaagcggctcgggaagcctacaatgcgctgctgtcccgtaactacaccggttccgtagtggcggacaccgacccgcaacccacctggatctccgaccgcatccgcattctggagcagaaacgcaagatcgccacgctgctcacccatcaggccctgccggcggagggaatgagcatgaactatctcgtgctcaaatccgacacgcacaccgtctccaagcagacgaaggaaggcgacccgctgcctttcggcaaggtcacgttcggcgacgaatccgccgtcatcgacacatacggcggctacggcgacctgagccgccagcgcatcgaacgcatgcccgtgggggacgtgagcttcgagatgcgttgcctgaccgcggcctacgcccgcgccaccgagaacgcggcccgaaccgcgctctacggttccatcgcagccattaacgacacggacaaactggccgtgagaaagaccgccgatgctctgaagcccaacgactggatcgatctcatcatcgacgcatcggccaagttcgacgacgtgaacgcaaccctggactacatcggcgtgagcccggacgtgttcaaggccatcgcgcacctgaccgacgagggcaaccgtttcctggacgtctccggccaaggctcggacacgctcggctcgctcgacccggcatcaatcagcggccgactgctccgccaggacgtgcgtatgctcgatggcgcgccgaacggcaccgtggtgttcatggacaagagcgccgtgaccatgtgggaatccaacggctccccgttccagctccaggccgacaacatcatcaacctgacccgccagttcagcatctacggctacgccgcgttcggcaccacgttcaagcagggcatcctgcccgtcaagttcgccaccgcctgaccatgagcgacaccgaacaggacccgctcaccaacagactggcctatctcgccggaaccatggacgatgacgacaggcccacgctatcggacatgctgaagaccgcgcgcgcatacctcgccccgcacatcgccggctacacactggcccaaccactgctcgatgacgtggtgcttggcatctccctcgacctatggcaggcgaaggacgcgcgcaacggcatcgtcggcctgaccgtggacggcgtggaaccgttcagaatcagcaccgacccgatgcgcagcgcatggccgaaactgcgcgccgccggcatacccgccggcatgggggtgtcatgagcgactacgacaacacggtcgccgaactgaccgaaaagctcacagggctcggcggcatcgtcacacaggtgaccgacgatcccacgctggtcaaaccctcaccgggcaaagccagcatctggatagaaccacctgatttcacatgggagggatggcacccctacccgccggaaatcaccatcaagctcatggtcacggccggcacccccaccacccagcagaaggccatccccctcatcatgcaggtgctcgaactcatgcaccaggagaacctgccactgcgcagcgccaccgcctcaggcttcaacctcgccgacgcgggcacgctcgccgcatacgaagtcactttgaacgccatctaacacgaaaggaaacaaccatggcagacaaaatccgcaccctaggccccggaagcctcgtgatcggcgccgacaccgacacctacaagctcgacgtggactgcacgaacgtggaactcgtgcccgacaattccagcgaggaccccgacaacttcctcgacgggcacgtggaaggaggcgagctgaccacctcgtggaaactgtcgggcagcatcggcgaggactattccatgagcggggcccaggtgtattgcctgaaccatgccggcgaaacgaaaaccgccaaattcatcccgaacaccaagggagcactccagctgggcatgagcgtggtcatcgcacccatcgcgttcggcggcgatgtgaagacccgcaacaagaaggatttcgagttcgccgccaccaatgtgaaggcctcggcatacaagcccgccgccgaaagcgtctgatggccgacaaagccctgtacgtgatcggccagaaacgtttcgtgtcaacgatgcgcaaggccggcgcggacatgaaggaactcaaacagatcaacagccaggccgctgaactggccgccccgtccgcacgaagccgcgccccacacggcaagagcggacggctggccggcagcatccgagcaggggccacgcagaaggccggcgtggtccgagccggccgcaagtcggtgccgtatgcgggcgtcatcaactacggatggcccaaaaggcacatcaaaccacgctcgttcgtcaacgacgccgtggccgccaccgaaccgcaatggacgaaactctacgagcagttcatcaaaaagacattgaaccaagtgcaaggagcatgacatgagcaaacgacccaccgcgaaagtcacctatacggacggacgcacggaagaggcgccattgacccctcgcgtcatcaccagcgtggaggaacacgcgcagaaggcaggatgggcgcccggagaaggcagcaagctgcggatgtcctactacatggcgtatctcgcgcagcgatacgccggcaacacccaaatcccctatgagcaatggctcgactccgtggacgaaatcgaggtggaaaccccggaaaaccctaccgaatagacgcctggccagacggttcgctgggccgtctctcgctgatcctgtccgccagattcggcggcagcccgtgggcatggagggagaaggccagcgagctcgactggggggcgggaatcgaactgcttatggaggaaatggaacgcatggaggaggtgaatcatggctaagagcgcgatcatgtcggtgcgcatcaccggcaattcggatgatgcggtcaaggccctatcgaaggtcaccggcaaggccgccgcgttcggttccttcatgggcggtgcggcgctgaaaggcgtgacggcgctctgggacacgctcaagggcttcacctccgacgtgatggccatgagtgattcgaccgacaagttcaagaacacgatgaacttcgccggcttcgattccaccgccatagacaaggcttccaaggcggcacgccaatacgccgacgaaaccgtctacgatctatcgaccatccagaacaccaccgcgcagttggcggcgaacggcatcggcgactataccggtctgaccgaagcggcgggaaacctgaacgccgtggcgggaggcaatgcggacacgttcaaaagtgtggccatgatgctcacccagaccgcaggcgccggcaagctgacaacggagaactggaaccagctgacggacgcgatccccggcgcttcgggcaagctccaggaggcgatgctcaaggccggcgcatacaccggaaacttccgtgacgcgatggccgacggtcagatcaccgccgacgagttcaaccaggcgctgatgcaattgggcatgagcgacgtggccaaggaggccgccaaatccacgcagaccatggaaggcgcgatgggcaacctcgaagccgccgtgacaggtggtctcacggatgcgttcgatctcatcaagcccaccatcacgtcggcgatgggcacggcggccgaaaaggtcaccgcattctccgacagagccgtcaccgcgatcaagggcgtcatctcgttcgtccgggacgggaatttcaccagcgagttcgcgcaggcgttcaatgtcagcgaggattccccggtggtggatttcctgtttacgatgcgggacacggccgtaggcgtgttcgacgcgatcaggtcccgcgccggcgccgtcaaggccgggttcaaccaggtcgtgcagggcatcggcgcggtgctgggccccgtcgtccagttcgccacggacgcgctgggcctgaccaacaacctcgatgccggagccaacgcttcacagacgttcggcgcgatcctcgatttcgtgtccacctccctccagtcggcgggccagtggttgcaggacaacgcgcagtggctcggcgcgctcgtggtcggcatcggcgcggtgctgggcgcctatcaggcgtggcagacggcgatggccctgtggcagacggccaccaagatcgccacgggcgtgcaagcggcgttcaatctggtgatgaacgcgaacccgatcatgctcgtgatcaccgccatcggagcattggtcgccgccctctcgtacttcttcacgcagaccgagaccggtcgtcggatatggtcgaatttcaccagctggctcggcgcttgcgtcaacaacatcatcggcttcttccaagcactgcccggccgtataggcgctttcttcagcaacgcggccaaaggcgcgaccgatacatggaacaacgtggtcagctggttcgccggtttgcccggacgcatactcggcgccatcggcaacgtcggcagcctgttgtggggtgcgggcaggagcatcatcgacgggttcctcggcggtctgaagtccgcatgggacagcgtgaccggcttcgtgggcggcatagccgactggatagcggagcacaagggcccggccagctacgacaaggtgctgctcgtcaaaaacggccgcctcatcatgcagggtcttgccaagggcatgagcaccggcttcgacaccgacgtgcggaacgccgtcaaacggatcaacaccggcatgggacgactcgcctttgaaccaccgtccgcatccatggcgcaacctgtcggcaacacatacaacatcaccgtgcaaaccggcatcggcgacaaatacgaaatcgggaaaaccgtggtcaaatgcatcaaggcatacgagggggcacgagcatgagcggccgtctcgcattgctgtacctcgaccgtggcaatggttgggagtgcctgaccccgcatgagaacgatcaggcgtctttggagtcgttgtcgattgattggggcacggattcgttggattcgcagcctgacgcgccggtcctgcgtttcaccatccgtgaccgtaccggcgtgctggccggtgatgtgctgtatctggccggggccaaagtctggctccagaagacggacgcggtgccgtggcaacgattcgacatctccggccagtggcaacaggtggcggaatcggtgtcgtgggccgagctggccgatctgaaaccgccggcgatcccatcgacgccggacagcgggctcgaaacaattttttacggtcgtgtcacggtgggtggcgaggtcacgcagcgcaagggccggaacgattggctggtgtcgttgtatgcgtcgggcatgagtgtgctgacgcgccgtcaggtcgcgcaggggccggagcagtccggggctctgacgggttatcactggccagtctcgccgtcggaacgcttggatgtattgcagtcgcggttggcggcgttgaatataccgttcgcggatacggcgttggagtggcttcgccggcatcttccgcccgctctggccccgtatggggatgactcgcaccccgatctgataaccctcgtgcgcaatctcgcgtcgagctcgccggattggccgctggtctacgaggcgtgcgagcaggggcggagcatgcctggtgtgatgacggtgtggttgccggggtctcccgcgtatgtggccatactgcccgacgggtcgctggcgacctcgtggcaggggcatgtgaccggaagcgtgcgcgcggagctggtcatggtggacgacaccactttggctttgcccgatcctgtcacccaggtcacgctcaggggcaagcgggtcacatgggatgcggaaaagcagtcgtatgggttcgaggattccgaattaacgttcaccgatcgcggcttggtgccggatactctcacggaatcgcagaagagcgtttcggtggagtcggacgcggtgatccgcgacgacaccggcggcaagtggactgccggcgtctacgcgccgtcggattccgaccgtttgcagcgcgcggccgtgatcctggccaacagcacccggttgcgtccgcaatcgttgcgcgtggattcacgcaaggtggacgacgtggagcacgccagccagttccacccgtggaccggcctgccattgacgttcatccataaccgttacacgccgttggtggcacgtgacggcacgccggccactgccggcgcgtggctgccaataggcggcacgctcacctaccggcatcgtgccggcgaggccacatggagcaacgagctcgacctgcacccgctgccgcgcgacccgaccctggcaccgttgcgctggattgatttgaagccgctgacgtgcaagtgggagcggctgccggccatgacatgggccgaactggcccagatcgacgttataaccaacgaacaggagttgaaaacatgaaacagacaccgaaacatcggatcaaatacccggaaggcaccgacatggtacgcaacgccgcgcagcagttcgaggccatggcacagtcgattgacgacaacatcgacgacctgcccgacaccatcacacagaaggtcaccgccgcgcagcaggcggcggaagcggcggcggccacggcagagaagttcggaggccaggcgcaggcattgcaggatgaggccgtgagcgcgctcatatcatcaagccagtcgctgaccagtcagagcctggccgatcttgtctatacgcgtcgcaatcgtatccgtcttctcgtattcggcgatagctggaccgcatactataaccagcagctgcccggcgtcatcgcgcagcgtctacatgcggactggtggaagtgttacggggtatcgggcgcgaccatgggcgatatggccggccagatcaagcaggccggagaagacaccagcttcgacaacgagaccataacgcacatcgtgatgatatgcggcacgaacaatattttcgatcctggccacgatggcgacctagaaggcgagaccaagcgggtggtggaggctttggccgcatattacccgcacgcgcaatgccattggttcccggataattcacgcaccgacaacggcggccgcacgcgaggatatgcaactatccttcacggtttccagcagtggagtccagtcgcctgtcacatggacttattgtggatactcgcctacaacaatttcgagttctaccgcaccgactccaccgacagggagaacctacagcatctgaccccgcacggatacgaatggctgggcggttggatagccggccagatcaacggtgacacgtccaccattcaggcggccgcgcactgtcgagtccagtactacgaggaggcgtggaaatggtataatggccagtccgacatcccgacgaaccagatcgcggaaatcagaacgaattggctgatagaggattacgcggataaaaacatcaccgccgtctacggtccgaactcattcgacctgggcttcgacttcggcgtactcaagccgaaccctgtatatcctcccaatacagcagaccgacgttcctatctcactctcgctgtcaggggagccagcgcgcaggcgcagacaccatacggccagtttcccagcctgctgttcatcccggagatagtggagacctacggaatcgcctacggaggaatcccgttcagggatcgccaatatccgggactcatctatatcaacccgataatcgatacccatggcaagccgactagcacaaaaatcacgattcagttcgataaaggcgacgagaccagcccatggatcaacccaacacgctgctggggccgcgtagcgggcatcccatacaaaaccaactaacgagaaaagaacctgacatgcaacagactgaaatctccgccctgtgcgtcgtgggcgtattgatcgtattggattatctgaccggcctgatgaaggccgccatgcgacacgacatcagcagcgagaaaatgcgactcggcctctggcacaaatcaggactcatcctggtcatgctgctggccgaggtggtcgaacgcggccaacagtacctcgacctcggctacgcggtgccgctcatcgtgcccgccgccgtctacatcgcggtcaccgagatcagcagcatcctggagaacctcggcgagatcaaccccgaaatcgccagcagcccgctcttgcggctgttccgcagcgggaaggacccgaacgatgaagacggcaagtcatgatcctcgccaccgcaatcctgtggataaccggcataacggtcgtcatgctgttcatgcatggcagcgaccatcgccgttgaacaccgccaccgactggctgctcgccatcggcgcgctcctcttcctcaccatcgtggccgtcgtattcggtatggccatcgcactgttcctgctcacgctcatctgaaaggaaaacaaccatgacaatgacaatcgaccaattcatccagacctacaacggcagggccgttgacgtcgacggggcctacggcggccagtgctgggatctgtggagccggtacgcgcaagacgtggccggcgtcccgcagtcggcgaccaacaccgtcaacggatacgccggcagcgtctacaccagcacatgggaccagcagcccgcattgcgcgacaagttcgaccgactccccgccggcaccactccgcgcaagggcgatgtcgcattctggggcaacgcccccgccaccccgtacacgcacgtggccatcgtcatcgccgaccagggcagcagcctcctatgcctgacccagaaccccggctccacacaccaggcaagcatcaccaagaacggactgctcggctacctacgacccaagaccgccacggctaccacaccatccaacggcatcgcgggcacatggcgcatcaacgtggccaagctcaatgtacgcacccagcccagcaccagcgcacagatcgtggcccagtattctgccggtcagaccgtcaacctcgacggctggaccacacgagcggacggctacgactggggccgctacatcggagcatcaagcggccaacaccgttacattgccctaggcccggccggcaccaccaactacctgaaacgctgaaccataaaccccggatcatacggccagcctgacagcatccatcgcgctgcgaagcctgctgtcgggcatggccacgtaaatctgcgtggtctccaccgaggcgtgaccgagcagacgcgcgaccagaaacaggtcatgcgtctgctcatacgtcttcgtggcgtaccggtgacgcaatgaatggcagccccacccgtccggcagcagacgggaaatatgccggttcacatacgactgttcgacgtggccgcaccatcttccgggaagcagccacccgccacattgctcgatggtctctgctaggtcgtcgggcaggggcacgatgcgctgcttgtcgcccttgccggtgattatcagtgatttgcccacgaggtcgtccatcacgtcgcggctgttgaccttggctatctcggcgcgccgcaggccgcattcggcggccaagcgcagcatgacacgctccaatggcgtcgccttatgcagcgcggcgatgatgtaccggtcggggcatgggcgcggcttgggcttcggccgtctgatcttgggcagttcgtcgctgggatcgtcggcacggcggcccgtcgtgcgcatccaggcgaagaagccgtgcacggtgttgcggtagcccttgcggctctcgggcttccagttctgcgaggccatccagtgcaccaggtcgtcgcctgtcacctgctggggcgtcttcgccaggtctcgcgcggccttggtcatcttgcatcggcggcagcgtatggtctcttcgctgagacccgccgccttcagggattcaagccagtcgttgatgtcgtccgcccatgacgccggcggtggcgttcgcttcatgctcatggttcaccatcgcaccaccgaaaccgctacgccgctagaataaacgccgataatcgggctgaatggatttgaaccatgttcctctggcacaccatgttgccagaggaacatggttcaaatccatgccccgctactgcgggcgaggccgtcacgattattcgtgacggcttttcgtttatccgccgtcgtgccctacggggccgcatatccgatcggggcgatgatgtcctgtgaaaaaacaacatccaagcccgctctgggcagaatcaatcaatctatggctcgactccctcaaggcggcgggctactcccccaacacgatcggcacgcgccgatgccagatgcccgcattgtcgagggcgcttaagggcgatctagggacgtggagggcgacgacctcgccctgctgatccgatccgccaacggctatctgttccccggccggtggagcggccacgcctcggtcgagaccacgcaacggtacatcgccatgcccgacgaccagctgcacgccgccgtggaagccacgcgcctcgccgcctaggaggatcacgatgttccgtttccccgactcgattgtggtactaaattgattatggtactaaattatggtaccataataagcatgatcgaatgtgaaccgtcagccttcaagcactggttcacacagccacagatcgactacatattccggcatccggtggccgtgttcgaggtgcagtcgagacacgccggcgacagggtcatggcgatcctcggacacccggacgagttcagggaacgccccgtggagctgctggtatcccagcgcacccgcaaggtgttccacgcgatggactgccgccgcgaatggctctacaagttcgacgactaaaaaacaccaaggaggacatcatgagcaacgaaacagactgggacgagctctcggacgaatacaccgagcacacccccgccatcatcggcgagaccatccgcccgcaaagggcgatcacgatggatgacatcgacgacatc

SEQ ID NO: 731 - DNA, 8931 bp, Unknown
  R14_15m  MAG No. k141_48557
cagccgggataccgtggcctgcgagaagcctgatttctgtgcgatttccttcatcgtgaccatagttgagccttccacgcctcagtacgtaacaatacgcagtatttcagtaaataactttactacatagtgtaactcacgcccgctgtctatttagaagtgcaacgcccttgttcgttggttaattccagcagttcgtcggcgaatgcctcggggattgttcatatacgcggcccctaatgcaatggcctcaaccagcacgaatatgacgtgctggttgaggccattgagagaaactaccgaaaaccggtcagggcacaaatagctcacgaatctgggcggcggaaccgtaagacgcttgggcacccagaccggtagccgcatatgcagaaacgaacgaagccagctgagccgcttcacgcagctcaaagcctgaggccagtcctgccagcacggcacccatgaacgagtcgccgcaaccggtggtgtccacggcttcgaccagaaccggtgcgatgcgggtcaccgaagcaacagcacatgatgcatccagcaccatcgagccatcaccgccgagcgtcacaatcgcccggtcgaacccgagctcccgcatacgatcggccgcagccagccagtcgaatccggaccagtcgccgtcttcgggttcggcgataccgaacatctgcgccatctcatgctcgttgacgagcaggatatcggcaagctgcaccagctcgtccggcagcaccggcgtaaacggtgaattgttgagcagtaccggtacaccggcttcatgcccgatacgcgcagccgcggtaacggtctcgatcgggctttccaagcacaggccaagcacattcgccgaagtcaattcaccgcgcatcgcctcgatataatcaacactgacctgcgcattggagcccggagagtagacaatcgtgttctctccgttcgcgtccacggtgatgaccgtggtaccgctggcccccggtacatgacgcacgtgctgggtatccacgccggcttctcgcaatgcaccaagcaggaactcggcattggcatcggaacccaccgctccaaacatgtaaacagtggcgccaatacgtgccgcagcagcagcctggttgccggatttgccgccgggcaacacttgcagcgggccgccggtgacagtctcccccggtccaggcagacgctcggtgaccacggtgtaatcggcattcatcgaaccgacgacgcaaaccgtgccttggattcgatcaagtgccgcaagaatgtcagatgctgtcatagcatttcctttcgttgtcgttgacgaatagagccaacgatcactcgccgatctttttgcggatgacgagatagtagatcacgccgataagcggcacacaaccggcgaatacatgaggccacagcccgtatagaacacacaggcgaacagcgtgagcaccacgaagcccgagttcacggtgaaacctgcgccaataaagccaatggccatcgaattgctggtcttcgggtccgcccacggatcggcggtcacagttgcggtattggttgacatgcgaagtccttttactcggcgtgctcagcgagcgcggtaatacgggtcatgaattcgttcagggacttccggatgatcgagcagttcggtgatggcgagcgcgttacgcacacctttggtcaagcggcacgttgccgtaagtaccagtgatgccgatgagttcgacttccgggctgttcagcgcataggcaatggcaagcgcgtcgtctacaccggtgtcgagatcgagaatgagtttgttcatggtgtctgccctttcttggcaactgtctgttctctccattgatgacatattcctgccagcgtcatctggcaggaatatggggggcagcagctgcgaaaacgactactggtcggctcgttcaagcttggggatggcgaacgaagccagcagagcaaggcccagaagcacggccgacgcgatcattgccgccgagtaaccggcaatgccgcccgagaagctcgcgaatgcgttcatcacggcatatagcactgcatagctcaagcctgcgccgaggttgaacgcgcccgcattgaggccgggcaagtatcctgggttgtcgtccggcgacagcacaatgcccaaaccgttgagcatgatgttcgccgtgcccgcgtatgccacaccaagcaccaccgagataaccagcaaggcccatacgctcgggaagtgtgcaacgtatacgccgaacagcacgccgaccaagctgaccagaatgcccacgcggagcatgcgatggtagccgaacttggaggcaagcacaccggcgaccacgccgaagaccagaccaaccaaagcatatggggtcagcgtggcgaacgacaccacgtcggctcccaatccggtgccgaacttaccgtcctgagccaaggccggcacaacgccattcatgatggcgaacacgccggtcatggtgagcaatgtggtgagcagcaggccccaggtgcgcggctgcttgagatagtgggtggtgaccatcggtgcgggattgcggttctcgaccttccagaagatcacgaaggcaaccgcagccgctaccacctcgatagcgacgagcacccaattcgcgtcgccgagtttctggatttcgttgatggctagatagactgccaggaaggagatgccaagaacgattgcaccggcccaatccatcttcggggtctctttggccgtgctttcatcggcgaacatcgacaccagcacgattgcgaccacggcgacaccgaccatcacccagaacacggaacggaagccgaacgtgccggcaagccagccgccgaggatggcgtcaacaccgccaataccgccgttcaccgaggtaagaatcgacatcagtcgcgcatatttggcatcctcagtcaccttggcgtgcagcatgatgagcgtcatcggcaccaccggtccgcatacgccctgcatcacgcgaccgaccatcagcatgggcacattcacggccaacgccgagaccacacagccgatggcggtgatgctcagcatgcccagcaatactttcttgcggcctgcgagatcgcccagtcgaggcaggaacagtgagaacagcgcacatgcggtgaagaagaccgtctgggtgaggctgatctgtgaactgctggtgttcagctcgcgctccatagtggtaagcgccggcgaaagcatggaagcgttgagctggaaagcgaagatcgccgccatcagcgcagccatcaaagcgacaatggacttgccgccctcatcaagcatttgttcggatttgactgtcgacatgactattcccttgtccttttacgcattcttcttcgtccgtcagccgatagcaacgatggcatcgacaatgagatcccagaacttatcgaagtcgagtttcaccgcgacctgcgtatggcattcctcggcggacggttccgggccacgcaggtcggcaacggtcatgcccagtgtcaggtcaccgtggatttcgacatccagcgggcaacggcgagtcgacaccacgctcggatcaatcagataggcgaccgtgcagggatcatgcaccggcggatcgatgaagtcctgattatcctgataggtcttgcggaagaagtccataagtccgctggcgaagtgcgacaaatcagtgccgatggcatcaatgcgatgctgaacctccggagtacacagcgcctgatgggtcagatcaaggccaaccatggttagcttccacggctcgttgaacacgatgtgcgcggcctcgggatccaccttgatgttgaattccgctacggcgctccaattgccgacgtggtatccgccgcccatcaggacgacttccttgacgcggtctacgatacgcggctccatacgggcggccatggcgatgttggtcagaggaccggtcggcacaagcgtgattgttcccggctcgctggccataatcgtatcgataatccagttcacggcatggccggaatccagaggacgggtgggaaccggcaattcaacgccatccaaaccggtctcgccgtgaatcgatgcggcgacctcctgcttgcggacaaggggcctatcgcaaccggcgtgcaccgggatgtccgtggccttcgccatttccagaacggaccgggcgttgtacgtcaccttttcaaggctctgattgccgcccaccgtggtcacacccactaggtcaattttggggttgcctacagcaagcatgatggccatggcatcatcatgaccgggatcgcaatccagaataatcttttccaccgaagtgctcctttgcttccataacagccgctgggtcatctctgactcccgatgatttaacgtttcatcatcggcttatctgaggataaaacgttaaatcactattgtcaatgcctcatctacctgcgtgtcaaaggtatccgcgcattcctctcgaagccgcttgaatcacacttccgctgattgattggcgacggacgcggaactaacctcacccacagattcgcgtttgatgaacatcgtgggcacggaatgcgtgatgccgccatccatggatcccgaacggatgcgttgcagcaatagctccacaccctgcttccccatcagatccgcctgttgggaaatcacggcgatgcgcggcgtcatcacggtaaacgccgaaatatcatcgaacgacaccaacgacatgcgttcgccaatcgccaccccgcggtcatgcagcagtccaatcaccgtgaacgcatccggcgaatatgcgcacaatattgcgctcacccctgcacccagcagcatctctaccgcagcggcacgcgattcataagtggagtcgcaagctgcgacaacgccatcgccgtcggcaagcaaatcggcggcagcctcccgaaacgcggtctctcgttcgtcaatactgaacgattcgagcgaaggatgagacatatagcccacacgtcgatggcccagacgcaccagttcttcaagagcctcacgaatgcccgtatatggatcagaaaccacaaacggcaccgactcgacaccgggaacgcgacgatcaacgaacaccaacggcaagtctcgttgtatcaacgattgcactccgggggatttcacaccctgcggtacgacgatagccccatcaatgcgttggcccaaaagattctcgataaacacatcctggcgttccacgctttccgaagacgtgccaatcagagtggagatcccatgccggtagagttcatcctccatcgaagcaaccaaatcggcgaaatacggattgcacaaatcaggaaccagcaagccaactgttttggtacccgacgaacgcatggaccgagcacgctggtccggcacataccccatttcttcgatcgttttcagaaccaattgccgggtctcatcagagaaacggcctttatcgtgaagaatctgggagacggcagcggctgatacaccagcccgctgcgcgacatccttcaacgtcacgaatgccatctcggcctcctccttgcgactcatatatcatcagaccacaatccaatgtacccttcccctcaccaatactcgcaattcccaccaagacttatgcttctcatgcacaacaaaagcggcatatgtcccctgagacatatgccgctttgtaatctcatcagcaaccaggcgaatttgccgtcaaactactccagctccaccgcgccggtgtagagctgatagtactcgcccttttgcgcgatcagctcgtcatgcgggccacgctcgatgatgttgccgtggtcgagcaccatgatcacgtcggagttgcgtacggtggacagacgatgggcgatgacgaagaccgtacggcccttcatcaggttatccatgccggcctgcacgacttcctcggtacgggtatcgatggaagacgtggcctcatcgagaatcagcgcgggcggatcggccaccgcggcgcgggcgatggaaatcagctggcgctgaccttgggacaggccggatccatcaccctcaagcaccgtgttgtatccctcgggcagcatacggatgaagctgtccgcattgaccagacgcgcggcctcaatgcattcctcatcagtggcgttcagacggccataacgaatgttgtccatcacggtaccggtgaacaggttcacgtcctgcaacacaatgcccaaagacctgcgcaaatcaggcttcttgatgccggccacggagatgccatcatacagaatctgaccgtgctgaatgtcgtagaaccggttgatgaggttggtcacggtggtcttgccggcaccggtggcgccgacgagcgcgatcttctggccgggcttggcgaaccaggtgatgtcgtgcagcaccggcttgtccgggttgtagccgaaggtcacgttggtgaagcgcacgtcgccgcgcagcagcgtataacgcccatcaggcgaggtgatcgcctgctccttggccttcatcgccacctcgcaggcggaaccgcgcagcttttcggcggccttcagagacctcgtaccatcgtcgccgatctcacgcttccacgcccagtggccggtctcatggtcgacttcggtcatggtgcggccgtccggcccaagttccacgttcacgagcgtcacggtgcccttgtcttcctcgatgggttcgtccatcaacttgaagatgcgggaggcgccggcgagcgccatcatcaccatggtcagctgctgggagacctggccgatcgggttgatgaacgagcgggacaaggtcagcagggagacgagcgtgccgagggtgagcggcttgacaccggtcagaccgatgtcattgacgccggccagcgaaacggcggcaccgacgatggcgagcaggatgtagagcagatagcccatattgccgacgaccggcatggtcacattgccccaagtgttcgcctcggcggacgcctcaaagagttcctcgttcttctcatcgaaggtcttctgagtggcatcctcatggttgaagaccttgatgaccttctgaccattgacggactcctccacgaaggcgttcacgtcgccgatccactgctgctgcttgacgaagtagcggccggaacggctcacgatcttgcgcacgatgaaatacagcagaacggtgaacacaatcacgaacgcagtgaacgggattgacagccacagcatggacagcaatgccgcaatcgcggagataatcgaggagaacatctgcgggaacgactgcgagatggcctggcgcagcgtatcggtgtcgttggtgtagtggctcatgatgtcgccgtgctcgtggctgtcgaagtagcggatcggcagcttctgttggtgggcgaacatatcgtcacgaatcttcttgagcgtgccctgttcaacggtgatgatcagccactgccaagcccaggatgccacgataccggccacatacaggcagcccatcagactgatggcgcgcagcaacggagcccagtcggggttcgattcccccaccatcggcaggatgtaggtgtcaatcagcgattggaggaacagcgcggatccggcctgcgcggcggcaccgatcaggatgcacactacgatggcgataacgcgcaatttgtattggaagatgtagctgaagatgcgcttgatggttccggggtcggctttgcccatgtcaggcttgcgattcttgaaactctggtcgttgctcatcgtgcttctccttccttggtatcggctgcattggtatcagctgcgctggtatcggccgtgggcatggtcactgtcaccgtcacggtttcggacggctcagcggtagatgactcagcagcctgtccggcagcggccagttctccggtcttagcctggttcttggtctgggattcgtaaatggaacggtattcgtcgcaagtggtgagcagttcctcgtgcgtgccggaggccatgatacggccggaatccatgacaagaatcatgtcggattcctgcacggaggccacgcgctgggcaatgatgattttcgtggtgtccgggatctcgttgtggaatgcggcgcggatcagcttgtccgtcttggtatcgacggcgctggtcgaatcgtcgagaatcagaatcttcggcttcttcagcagcgcacgggcgatgcacaggcgctggcgctgtccaccggacacattggtaccgccctgctcgatgtacgtgtcgtacttatcggggaattcctgaacgaatccatcggcctgcgcgagctgcgcggcatggcgaatctcctcatcggtggcgttcgggttgccccacctgaggttttcggcaatagtgccggagaacagcacgttcttctgcaacaccatggccacctgatcgcgcagcgcctcaatgtcatagtcgcgcacgtccacgccgccgaccttgagcgagccagagctcacgtcgtacagtcgcggcaccagctgtaccagagacgactttgccgaaccagtaccgccgacgatgccgatggtcatgccagaacgaatcttcaggttgatgtcgtcaagcacgggcttttcggaactgtcggagtagcggaaggtgacgtggtcgaattcgatggagccgtcggccatgtcagtcaccgggtgagccgggttctgcaccgtgctttcctcctgcagcacctggcagatacgctcggcagaagcctgagaaataatcaccatgacgaaaatcatggacagcatcatcatggccataagaatctgcatggcataggtgaccagcgaagtcagctcgccggtggacaggcccaacgccgcattattgccggaagcgacgatctgctgcgcgcccatccatgcgatgagaatcatcgaggcgtagacgcacaccatcatgatcggcatgttgaagctcatgatgcgctcagccttggtgaagtccttgaagatgcg

SEQ ID NO: 732 - DNA, 29260 bp, Unknown
  R14_15m  MAG No. k141_48811
aagccgaagggtccgctgagccaggaccagcagaccgaagtgaagaccacgctgtctcgcggcccgatgttctccgaagttcgctgatttataggaagagacttggcagacaacaaacgcaccggcctgtccgctctagccgacgccggcaatgaaggcgaggatttctccgtcatcgacgccatcggtggcccgcgtggcgtcatcgaatccatgctgcctggcgtggtgttcgtcgtactgttcgtggccacgagcaatctgaatctcaccattgcggtttcggccgtgttggcggtattgcaggttattgtgcgactgattcagcgccagtcggtaatgggcgcggtctctggtctggtggcggtaggcatctgcctgatttgggcatggcagactcatgaggcccgcaattactacatcttcggattcattaccaatgccggctatgccgcgttgcttgccgtgtcgctgattgcgcgcgtgcccggactgggtttggtcgtcgaattcatccgtagcctgcccaccgagcatttcaaggcatggttccatgactggatggacgacaaggccctgaaacgcgcctatatgattgtcaccggcctgtgggtcggtctgttcctgctgcggctggtggtgcaggtgccgctgtatctgaccaaccatgtggctgcactcggcgtgacccgcctgctcatgggcattccgttctgggcattggcgatttgggtgagttacctcattattgccacgccgatgcaccggcataaggtcgcggctaggaagatacagactgaagtcgctgttgatgccgaacttgaaccgagcgtaaccggaaaggacgatgatgcaagctgaagttcgtatcgaacgatacgccgaccaaggccgctgcgtggcccatatcgacggtcgtgtggtgttcgtccgcttcgccttgcccgacgaactcgtgcgagtcgaacttgacgagccccacgaccgggacgaccggttctggaccggcgaagtcgtcgaggttctcgagccgtccgaagaccgagtcaccccggcatggccacttgccggtcccttggcgatgggcgggggagtgggcggcgcggatctcgtgcacgtctctttgcccggccagctcaagtggaaggccatcaccgtctccgaacagatgagccgactcggccatatcgacgtggccgttcccatcgagcgcatgcccggcgacaaggcagccggcggcctcaattggcgtacccgcatcgaaatgattgccgacgacaacggcatgccatccatgcgccggcgcggcacacacaaccgcgtggccatcgacaccatgccgcttgccacgcgcacgctgctggacgtcgccaagcgcgaacacgtgtgggaaggcggctttgaacccggctcccagattcgtctttccgtgcccgaaccgcgcggcgagatcgtcgataccgcggcagcagacgacaattacgccgtacttgtggacggcgaactgcgcgccggctcccagctgctcaccgaacaggtgaccatcaacggcacgaccttcgactatcaggttgacgccaacggtttctggcaagtgcatcgccaagcgccgatcgccctcggtacgcacgtgatcaacctggtcaacgggcagctgcagtcagcggcggacgccgtaatctgggatttgtattccggttccggcctgttcaccctgccgctggccacaatgaccggtgaacgcacccgcatgctcagcgttgaaggcgcgcgtgtggccgtcaagaacgcccagcgcaatctgcgcgccatgaacctgaacgacgtggacgcccgcgcgggtgacgtctcgcgcacgctggaccatgtgccggcgcatctggccaagccgaatgtcgtagtgcttgatccgccgcgtgccggtgctcgtgccaaggtctgccgccagattgccgcggccgacgcatccagcgtggtctacatcgcctgtgatcccaccagcctcgcacgcgacaccgcgacactcatcggcgaaggctacgagctcaaagacatccgtgccttcgatatctacccgatgacccaccatgttgagacggtggccctgtttacccgctgacaggtgagcatatgacacgacgaattctcggattgctggcctgcatggcggctgtgttgtccctggccgcctgcacgccggccggtagggcggtcggcgatacccaagacagcatgccggaagtcgcccacgattccacacatcccacggatgtcacagtcggctttgtggggtcgactgacaccgccgcagacgagttcgtcatcaatgcgctgtctgatgacaaactcaatgtctactatgcctcgctcgaaacatccgcaagctcggcaaacgcaactgatggcgtatccggtgaaaccgaatcttctgacgccggcactaccagcgaaaacggtgccgatagtatggatgctcatactggcgtcgacaagaatgcggccaccgcacagcagggtgttgccgatttcgtagctcgcgcggtcaaaatcgtggttatcagcggcatcgacgttaccgacgccaaccgggagagctggaaccagacgttgaccaatgcgcgtgaagccggtattccagtcgctctcattgatccaaagcatgcgcccgaagatgaactgctgtacgccgtcatccttcacctcaacaccaacagtgccgattctggcgacactgccgataccaagccaatgactattactgacgccgtgctcaccatcacgcgcgacgaaccccacgaacgcgagatcaaagtcaccgtttcctgagccgaatcaggcccttgaagctgagaaagcaccctgaatcatccctgagccttagtggattgcgaaacaagacgcggtaggctggggaatatgagtgcaacaacagccgtggaaatgcctgaaatcggagtaaccggtcttacccccaaagaagtggtgcagcgtatcgaaagtggccaatcgaatgcggtgaaaacatccacctcgcgttcggttcaagatatcgtgcgagccaacgtattcacgctgttcaacggcatcatcttcgccgcgatggtactggtgctgatcaccggttcctggagggacgcggtgttcggtttcgtcatcatcatcaacacgggcatcggcatcgtcaccgaactcagggccaagcgcacgttggataagctttccatccttgtggcctccgaattcctcgtgcatcgtgacggcagggacgtggaggtgccccacaacgagatcgtgctcgacgacctgctgtggatccgtgccggcgaacaggtgccggccgacgggcagatcatccagacctggggactggaacttgacgaatccatgctcaccggcgaatctcgtaccgtgcgccacaaggtgggggagcaggtgtattccggtgccaccgcggtctccggcatggcattggtcaaggtcaatgcggtcggcagccattcctacgccgccacgctcaccgcgcaggccaaggtatacaagaaaaccgtgtccgacctgaacaagggcatcaacacgattctgaaattcatgaccttcctcgtggtaccgctgtgcattctgctgattctttcgcagattcatacggtcggcggttggggtacggcactctccaccggcgaatggcggcaagccgtggtttccgcggtcgccggcgtagtaggcatgattcccgaaggcttggtgctgctgacttcgctgaacttcgcggtggccgccatgcgtctcgcccgtcacaatacgctggtgcaggagcttgaatccgtggagacactggctcgcgtggacgcgctgaacctcgataaaaccggcacgatcaccgatggcggtatcgccttcaaccggctcgtgatgctcgattccgccaattcggctgcggaacaggcagccacgcaggccctctacgactgctgcaacgaagagcagcccaacggcaccggccaagccgtactcgccgggctcaaggcccaaggatatggggcaggtgcggttgagtctcgtgtcccgttctcttcggcgcgcaaatggagtgcggtgcgtaaatccggcgagacctggtacatgggagcgccggaggtgattatttctgcgcttgagggtgactattcgtcggtgttgcagcaggttaacgagtatgccaatgacggcaaccgtgtgttgcttgttgcgcggtctactgctcccctcagtccgcgaagcggactgaggggagcagttgagggagccaatgtctcggacggcccgcaactggatgtgcaggctgagccggtggcgttggtgttgtgctctgagaagattcgcgaggacgccgagcggacgctcgcttggttccgtgagcagggtgtgcgctgtcgtgtgatttccggtgacaatccagtgaccgtgggtgccatcgcccgcagagtgaaactgacaggcgaccatgagccggtggcgatggacgcgcgcgaactgcccgaggacgtgaacgaactggcccgcgtgctcgaaaacgtcgatgtgctcggccgcgtgctgcctgaccagaagaaggccatcgtgcaggcgttgcacacgcagaaccacgtggttgccatgaccggcgacggcgtcaacgacgcgctcgccatcaaggaggcggacctcggcatcgccatgggcaacgcggcgcccgccaccaaggccgtggcccaggtggtgctggtggattccaagttctcgcacctgccggacgtcgtggcgcggggccgtcaggtcatggccaatatggagcgcgtggccagcctgttcctcgtcaaaaccgtgtactccgcgctgatctcgctcggcgtagtgctgacgcaaatcccatacccatacctgccgcgccatatcacctatatcggcgctctcaccatcggcatgcccgcgttcatcctggcgctcgcgccgaacacgcgccgctatattccgggattcctcaagcgcgtggtcacgttcgcgctgccgggcggcatcgccaccgcgctgtcggtgctgctggccgcttgggtgctgccgccggtcatgggctggaacgtgaccggcgatgccgcggacctgtccgccctgcgcgccaccagcgccatcatcctgttcgcgatgggcgtgttcgtgctggcccgcgtggccagaccactcaacggttggcgtggcgtgctggtggcggtgttcgcggcggcgggcgtgatcggcgcgttcgtcccgttcgtggcgaacttcttcgccctgattctgccgaccggcgccacgatggtggccacgctgatcgcgttggccggttccgcgctgatcttcgcgctgtgcctgtggctggcgccgctcgtgcgcggactgacgggcaagctctcgcgtcggcattgagacggcggcgcgattgtctcatacttcaagccgacacgccagagcctcggtaacgtgcccgtaccatgtgtagcggataatcagcggcatcataagccgattcatgatttcggaggaagcatgtccttacgcgacgaccagctggctaccctcaaggcagccggcaaggacttcgattactacaacatcgccaatctcgacggcatcgatcatctgccgtactcgctgaaggtactggtcgagaatctggtgcgcaacatcgacggtgccaacatcaccgacgagcacgtcaagaccctgctcgactgggatccgaacgccgaacccagccacgaaatccagttcacgccgtcccgcgtgatcatgcaggacttcaccggcgtgccctgcatcgtggacctcgccaccatgcgtggcgcggtcaaggacctcggcggcgacccggaggtcatcaacccgcaggtccagtccgatatggtcatcgaccactctgtgcagatcgacaagtacggcatcgccgacgcggtccagcaaaacatggacatcgaataccagcgcaacggcgaacgctaccagttcctgcgctggggtcagcaggcattcaagaacttccgcgtggtgccgccgggaaccggcattatccaccaggtcaacatcgaatacttggccaaggtggtcatgagcaaggccgaggtcaacggcaacgcgctcgcctacctcgactcctgcgtgggcaccgactcgcacaccaccaccgaaaacggtctgggcgtgctcggctggggcgtcggcggcattgaagccgaggccgccatgctcggccagccgatctccatgctcgtcccgcgcgtggtcggtttcaagctcaccggctccatcccggagggcgttaccgccaccgatgtggtcctgaccatcaccgacatgctccgcaagcacggcgtggtcggtaagttcgtggaattctacggcgaaggcatcgcctccgtgccgctggccaaccgcgccaccatcggcaacatgggccccgagttcggctccacctgcggcatcttcccgattgacaatgtcacgctcgactacctgcgcctgaccggccgctccgaagagcaggtcgcgttggtcgaagcctacgccaaggccaacaagctgtggggcgacgcttccgacccggattacgtggaaccgcagtactccgaatacgaggaactcgacctcggtaccgtggtgccgtccatcgctggcccgaagcgcccgcaggaccgcattctgctgtccgaagccaagagcatgttcgagaagaccgcccccgcctacgagaccgagaagaccgtcaaggatccggtggccgtgtccaccgacttccgtggcgatttcgacatcgaaaacggcgacgtggccatcgcctcgatcacctcatgcaccaacacctccaacccgtccgtgatgatcgccgccggcctgatcgcccgcaacgcacatgccaggggccttaagcccaagccctgggtcaagacctcgctggctcccggctcgcaggtcgtggccgactacctcaaggccgcggggctgcaggacgacctcgatgcactcggctaccagctcgtcggcttcggctgcgccacctgcatcggcaactccggcccgctgctgcccgagatttccgaggcgatcaacgccaacgacctgaccgtcaccgccgtgctttccggcaaccgcaacttcgaaggccgcatcagcccggacgtcaagatgaactacctggcctccccgccgctggtcatcgcctacgcgctcgccggcacgatggacttcgacttcgagacccagccgctcggcaccgacgcggacggcaacgacgtgtacttgaaggacatctggcccaccaatgccgaggtcgccgccgtggtcgacggcagcgtgagccgcgagatgttcctcaaggactacgcctccgtgttcgacggcgaccaccgctggaagggcctcgacgtgccggaaggcgagctgttcgcgtggaacgacaagtccacctatgtgcgcaagcagaccttcttcgacggcatgaaggccacgccggacccggtcgccgatatccacggcgcccgtgtgctggccctcctgggcgactcggtcaccaccgaccacatctctccggcaggcgcgttcaaggcctccagcccggccggcaagtacctgaccgagcgcggcgtggagccgaagaacttcaactcttacggttctcgccgaggcaaccacgagatcatggtgcgcggcacgttcggcaacatccgtctgcgcaaccagctgctcgcctccgtgggcgaggaggtgacgcctggcggcttcacctacgacttcctcgccaagaagccgaccacgatcttcgaagcctcccgcgactacatcgacaacaaggtgccgctcgtggtgctcgccggcaaggaatacggcaccggctcctcgcgcgactgggccgccaagggcacggtgatgctcggcgtcaaggccgtgatcaccgaaagcttcgagcgcatccaccgctccaacctgatcggcatgggcgtgctgccgctgcagttcccggcaggcgaatcctatgagtccctgggcctcaacggcaccgagacctacgatatcgccggcgtcgagaagctcaacgagggcgtgacccccaagacggtccacgtcaccgccacccacgaggacggctccaagaccgagttcgacgcggtggtccgcatcgacacgcccggtgaggccgactactaccgtaacggcggcatcctccagtacgtgctgcgcaacctcatgaagtaaccaccttcttggctcccctctcttgaggggagctgtcagcgaagctgactgaggggagcaaggccggtatccgccaacggataccggccttttccatgcatgccaaaatgctatactgtatagcatcttcgaaatggaggttgccatgaccatggtccaaatgaacgttcgcattgatgcgaaactgaagaacgaggtcgaagaagtcctcaagggcaaaggcgtatcggtgagtgacgtaatccggtcgctgtggttgtacatcgccgaccgcaaggaagtgccggcattggaaacgaccgccgaagagcaagcccgcgaggaggaaaagcagcgcaagctgaaactgattcgagaaggtgccggatacgtgcacaaggaactggtcaaggccggactgatctcagaagacaccgacctcatggaaggccttacctacaagcagttccgcgacaaaatgtacgacgagcaacttgatgcgtattacaacatgaagagggccgattgatgaccgacgtttccatgcagcgtattttgcttgataccaacgtactgttggactatttgctccatcgcgatgatcacgccaagatggcggaagcggttatggaacttggcgcgaagaacaacgttacgttgttgtgcgcgtcactgtcgctgaaggatatcgcatacctatcatcatcggcgattcgtagcgaattcaaaccgaatgaatcggaagtggagaatttcactcgcggctttctgtcgtcacgggtgccatggcgttgtatcgagcaggtgaaggagatgtgtgacatcgtcgctgtcgatgagtcgacatgtgatagggctttttccctgcaaaaacggcatcgggattttgaagatgatctgatcatcgttgccgcgcaacaatccggtgccaactgtgtggtcacatcggataccgaattaatcagtcattttcccgaatattgcaaaacaccggctgaaatcgtggcggcactggaataaatgagcgtgtggctcccctcacggaggggagccaacaatgatgtgccggcttactgtagactactgcgcctgtaagcggaactgcttccagatgtcgctgagcttctgaccgttgcgcgtgcgcttccacacgtccagaccaccgccgcgacgtcctccggcggcggcacgggccgcggcggtcggagtcggatattcggagccgtcatccagacggagacgaccgttttcggtgaccgtggcgaaccagcgctcacccttgcgcggccgctcccacaccagacgctcgcccggcaccagcagaccagcgtcaatcacctgccggatcgtgacgcgccgcgaactatgagacggccgtggagaggtcttcgacaactcatcgacattctgcttggtcagatcacgggcgtccttgtcataccggatgccccagtattccacgatgagtcggaccgactcttcctgccgcgcctccagcagggcaggtgtgcagtcagcgaaatccttcaactgattggtcagcgggaaacggcgcgaatccgcgcgcaacagcatgcggtcgcgacgtgccggatattcactcaacctgtccaactgatcctcagggccctgcaccagcgccatattgccgagtcggtacatccagaaatcatgctgatcctgcggccagtccgcaaacgatttcgaccgttcgatatccaacggcataatcggcagcgcactgaaccggcgtggtcgatccaactgcatgccggccttctgctcgttggcgcgaatcagcagcagacggaccaaatcgccgtcaccctgcatctcgccatgcaaacggaccaatgcgccttcacggtcgccgtccgagacatgcaacccgttcacgcgctggaccaaatagcccttgtcaagatcacggatggcggcgttcgcataaccgcgccgctccaacgctccagtgcgattcagcgtgcggatgccggtcacctgttccaatgcggtcagaatttccagcagccgacgctcgtcatgggcgcccaacgattccaacgtggccgtggttctggcgatacgcgaggcacgaaccacgaacggcgacaaatcggcgtcgcccagcccgcgatacgaattgaccaacgcccacatggccacgggcttccactcgtggctgcggtaatcgtccaatccctcaagccggctacgcacctcggcgggcagtacggtatcgctggggcgcgcgatgatccgccacgccatcgcgtagggtgccagcacctggttgatgaacgtgggcaccgtgcctttgtcgatgtacggttgcagcacgtcggccaggaaatcctcgatgagcttgtcggtggccggcttgtgcgtgagcacgagatgcagataggcgaagaattcctcacagtcatgcggatcgtcgccaagcgggtcaatgatgtcatcccagcgggcggcgtacacgtcaagttcggcggccgacaggctggccgtggcgcgcgccttgaacacgtcggacggggtgagcggcaggccgcgcatgttcatcacgtcgaagatgcgatgcgcgccgtcgagatcgtcggtggtcacgatgacgagcgtcacctcgttgaccagatactgcgcgaattgctggcgttcggatgccgaccaattggagatctcgtcgtacgtcttgcggatgttggcgacgatgttgcgttgcgcagcggtcgccagatcgtcgtcgttcatgtcgaacacggattcgaggttgtcctcctgcacgtgttcgcggaagaacgccgcgtcgcgctcgcgcaacgtgaggcgaggctcggtgacgatgccgcgcagcttgtcgccgggctccaccagcagcgcgtcgagttggcgcatgaggtccgggtctcgctccagatcgcgcagcacggcgatgatgatcgacagggataccagccgctgctgcccatcgatcacgtcataacggttgtcgccctcgcgcaccagaatcagcgagccgaggaagtacggggtgccgggtgacttgcaggcgtcgtccaagtcgcttaccagttgcaggatgttctcggccttccatatgtaggcccgctggaatgaggggattgtgaaccggaaatccggggtgaacactttcccgagtggtagttccttcgcgctgattgccatgtcaatcccttcgtcgccggcctctggacggtatgccgacgtgccgactgtgctcaagcctaccagtgttcgcccggcggcgggcgcatcacgccggctcgggcaccgacccctcgtacaagtagaacgaagatgggttttctcccggcccggatgcgggcagtgactgctcgcacacctgcgtcaggccgcgatgtacatagaatccgacatcgcacgtggtatccgtgaataggaagtactgacgtatgccggctgcgcggaatgcgctcatcatcgtctcgaacatgcgccggcccagaccgtgaccgcgcgccgccggatcaagtacgaacagcaccacttcagccgaatactcatggccaatgttcgccgcctgcttacgcagttgcctatcgacatgaagagtcccgagaatctcgctcgcagctgccatgccgtcgtgggcaaacgccagttgcaatagcttgcgcaacgaatgacgccggtgcatgttcagcgggctgcgatggtcgagctcgtcgatacgccccacaatcaatgcgacgggtttatcttccagctccgcgacaaaggccgtggtcacacgtgccagacagttctcccaatcggcctcggctgccagcaagccggtccgctcatcatattcggcgtaccaagtgcggcgcaccaggtcgatcagcgccggataatcgtctttacgtaacgttcgaataatcgcttcactcatgttctccattatgactgatatggctcgataacccgacgtgttacagtcgcgccggcaaatcggcccgctccaccagcctcgccatctgtacgcggcccatattgagcttgtccgccgcggaggagagatgcgccttggccgtacgctccgagataaacatacgggaggcgatttcggcgttgggctatgtgctgcaagacgattcgccgattacggtgtatgtcacttcgttcctatcaacggatcaagacaccaaggtgacgcatgccttcacgttgcagtgaatcgcgcggcggtccaagctgcggtcgaatgccaatcgaatctcaagtgcatgccacgcgcatggtggaaacgcccgttacgctttgcgatgagcagaacgagccgatcgatcctattcatggaatgttcagctttgttcctctaagattggtactggaacaaacgctaaaggagcgattatgacattcggtcagcagccccagaacaacgggcaatacaacccgcaatacaacacgcctgattacaacgccgcccaacagtctggatatggccagcaatacgcacagtccggttacggccagaactactatgcccagccgcagggcgcccccacctaccagtacgcgccgcaggatgcggccggtgccggcgcgggtgccgccaccatcaacacgacgatgacctacaactacgaggaggcccgccgcgtctccgtagccaaggtgtacggcgagatgaccatcggcatcctcgtcaccgccgtggtcgccgtgctcggccagatcaccggagcctactacagcttcctcatggccaccggcatggtgggcctcatcggcctgtgcgtggtgcagattgccctggccgtggtgctcggcatgcgcgtcaccaagatgaagtcggccactgcgcgcgtcatgttctatgtgtacgccgcattgatgggcttcaccttgagctcgatcttcatggtctacgacctcggctcgatcggcgtggcgctcggtgtcaccgccgcgttcttcttcgcgctgaccatgttcggcatgactaccaagttcgacatgctcaaggccggcccgatcctgatgatcggcctgatcgtgctcatcatctcgcagatcgtgctcgccttcgtgcaggtcgacggcatgaccaagatcgtctgcgccatcggcctgatcctgttcgccggcatggccatctacgacgcgcagtccacgcgcgcgctgctgaccgaatacgaggcccagggcccggaaatggtcaagaagatctccatcctgtgtgccctgaacctgtacctcgacttcgtgaacatgttcctgtacatcctgcagctgctcggcaacagggactagcctcgccagccgattggtgggcggcatgtagcctgctcgtcaaacgtcacagcccgaccacattgtggccgggctttttcatgtctgtcacattcgcacgttaggctgtctccccgtgaaaagacaagaactcgtaggcatgctgagcctgttgttgaccgcgctgatctggggttttgcgttcgtggcgcaggtccagggcatggatttgatgtcgccgatgttcttcaacgccacgcgcttcacgctgggagcactgtctttggtgccgattctgctgtggcagcgtggccgggggagcgcggataagggcgatacagccggggtcgatgtcgttgggaccgaggcatccagggccgtctccacagatgccgcatcgaacggtgcatccgacgtcgttaccatcaccggtgccaagctgaatgcgaacaagcccgattcggccgtggcgcgattgctcgccaacccggtggtcatttccgtgatctgcggcatcgtgctgttcaccgccagcaccttgcagcagtatggcattctgtacggcaaatcggccggccgcgcgggattcctgaccgccatgtacatcgtgatggtgccgttgctggcctgcgtgttcctgcgccggcgcatcggcatgctggtgttcgtggccgtggtgctgtccatcgccggcttctatctgctgtgcatcaccgatggtttcggttcgatcggcctggcggatatcctgctcgtgttcacggccgtgctgttcgccgtgcatattctggtgatcgatactttgggcggcaccgtggacgccatcaagctttcattcggccagttctgcaccaccgccgtgctgagctgggcgggttcgctgatcgaaggctcggtcgactgggccggcgctgctcattcctggattccgattctgtacgccggcatcggctcggtgggcatcgcgtacaccttgcaggtggtcggccagcaatgggtgccgccgacgcgagccagcctgctgatgagcctcgaatcgttcttctcggcggtaggcggtgcgttgcttctcggtgaagtgatgaccccgcgcggttacctcggctgcgccctcatcttcctcggcaccctgctggcccaagcgccggccaggctgccgaagtggctgcaacggtgaatgaatcggacgcaggccgattccatagcacctcagtccgtggtcttaggcgcttcacccacttgcggcgcgccgttgatgtcgcggtggatgttctgcatttgcacttcgatgttctgcagcgaacgggcgcagtcgagcagtgtctgtgaatgttcgctgagcttgttgtccggcaaatcggtcttgtagcgcagcgcatgctccagcgacgcccaataatccatggcgatggtacggaactgcacctccaccggcgtgtaatgcgcgcccgaggagagaaacacgggcaccgcgtagattacgtgcaatgaacgatacccgttctgtttcgggttcttgatgtaatccttgacgcgcagcacctgaatatcggactgcgacgacagatagttggacacggaatacacgtcgtcgcggtaattacagatcacgcggatgccggccacatcgaacagattgtccttaatcgaattgacactgattggcagattcttgcgctccagcttgccaatgatcgaactcaccgacttcagacggcgttccatatgatgtatcgggtcatggctgaaccgcacctggaactcgtcgtcgagaatctccagcttggtgctgatctcgtacatcgcgccttcatacacctgcatgaggtcaacgaatttaacgacctgttcgggagtgaaggtgcctcccggaagatccaacgctttgagacgggcctgtagatcggaggttttgagtcggctatgtcggtcaagtatcacgtccaccaatatactcggcggattccagacaatctggatgttcgcggggaatctttccaagaacccatatttaagatcgtgacaaccaatggcatacgtgaccggagcatgacgaaccccgccgatagaatcggtcgttatgaatgaagacatgatgaccgaggcagagcgtgcctcgattgcagccgatggaaccgatagcttgctgggggagcgcggcaagggcgtattccatatccacacgctcggctgccagatgaacgtgcacgattccgagcgcatcgccggcgtgctggaggccaatggctacgtgcctgcaaccgaggaccagatcaatgacaatgacctcgatctgctggtgctcaatacctgtgcggtacgcgagaacgcagccgaacgcatgtatggcaccatcggccgattcaatcgcgtcaaactggttcggccgaacctgcagatcgccgttggcggctgcatggcccagcttgaccgcaagaagatcgcggatactgcgccatgggtttccgcggtgttcggtaccaagaacatcgaagatctgcccaagctattggatcagaatcgtgcgaccggcaaggcgcaggtccaggtcactgaacaattgcggcagttcccgagccagcttcccgccgcccgcgcctcccgcatcagctcgtgggtggcgatttccgtgggctgcaataacacctgcacgttctgtattgtgcccaccacgcgaggcaaggaaaaggaccgccgccccggtgacattcttgatgagattcgccaatgtgtggccgatggtgccaaggaggtcacgcttctcggccagaacgtgaactcgtttggttatggtattggcgatcgatacgctttcagcaagctgttgcgcgcctgtggaaccatcgacggtctcgaacgtgtgcgcttcacttcgccgcacccggccgccttcaccgatgatgtgattgcagccatggccgaaacgccgaatatcatgcatcaactgcacttcccgctgcagtccggttccgaccgcatcctgcgcgcgatgcgccgctcctacaggtccgccaagttcctcgatatcttgggccgcatccgcgaggccatgcccgacgcacagatttccaccgatatcatcgtcggattccccggcgaaaccgaggaggacttccagcagaccatggacgtggtgcgccaggcgcgcttctcctcggcgttcacgttcatctactcgccacgccccggcacgccggccgccgcaatggaacagattccgcgcgacgtggtgcaggaccggttcgaccgactggtggcgttgcaggagcagatcaccgaagagaacctcgccacattcgagggccgcgacgtcgaagtgatgatcaccggcaaactcggcaagaaggacaccgacacccaccgtgtcaccggccgcgagaaaaccggcgtgctggtgcacatcggcgtgcctgaaggcgaaccggtacctgaaatcggcgatttcgtcacggtcaccgtcacacacgccggccgccataatctgcttgccgaccccgatgtggccgctggacagacctattccgtgcggcactgagggggcgtatatgacgcaacgagtcgtctccatcgtcggtcccaccgcgtcaggcaagacggggttgggcatcgccatcgcccggcgtctggccgaagcgggggagcgggccgaaatcgtgaacgcggacgcctaccagatgtaccgtggcatggatatcggcaccgccaaacccaccgccgaagaacaggcggccgtgccgcatcatctcatcgacatcatcgaccccgaagacacgatgagcgtggcccgattccagcagcttgcgcgcgagaccatcgccgacctgcaatcacgtggcatccggccgattctcgtcggcggctccggcttgtacgccagagcggccatcgatgacatcaccttccccggcaccgatcccgacgtgcgcacacgtcttgaggaacgcgagaaaaccgagggtgccggtgctttgttcgacgagctgcgggccaaagaccccgaagccgccgcgcgcatggacccacgcaacccacgccgcaccatccgtgcgctggaagtcatcgagcttaccggcaaaccgtattcggccagcctgccgcgctaccggtacgtgattccgtccgtacagatcggactcgacctggaccgcccggatttggaccatcgcatcgacctgcgcaccaagcagatgtatgacgatggattcatcgaagaagtcgaacggctgcgcccgcatctgggtgccaccgccgtacgcgcgctcggctatcagcagatcatcgacctgctggacggtatatgggatgtgaacgacgccttcgcggacatcgcacagaaaaccaagcgactcgcccgcaaacagatgggatggttcggccgtgacccgcgcatccactggctgcaggccctgaacccgaaactggtcgacaacgcgatggccattatcgcgcacgccgacgccggcgactacgactcgatcgacgcccgagccaacgaatacacccagcatcatctgggcgatatcacggcgtaggaatcagccaaaggccggtgcaatcacccgcaatcagtgtgcaggcccctgattccagccggcgatcaagaacacgcgcgtcggattcgccgggcgtagtatcgcgtcgaacatcgtctccagtgcagacgtgtcgccccgatatgccgagtgcttggcggagcgatactcctcgcgcgtcactgagccccagtcgagatcccagccggcgtcatgcgccaagcgtgaaccgaatatacgcagcaccatcgcattgccgccacggaacggatgcagataaccgagctcatcataaatagaagcgaacgcgtgaacgaacacgtcgcgatccaacgcatgcaggttgcgcttgtccgccaactccatcgcgatgttgtgcgcgccggtctcaatgagcccagccgggaagaacgcctccggattcgcggcccgagcccggtcgttcgtcacctcgcgtgtggtgtttgaggtacgcaacttgcccgcatcctcgaacacgccttcgaacagccccttatgaatggcggtcaactcgtccaagtcgccagacggattccaccgacgttccgccaacaatacggtacgtgcgaacaccgcatccgcgcgatccgtggcatgatcatccagactgccggcagccagacgatcctttccggcagggtcggcggcggcgcgcagacgcatggcggtctgctcgtccgccacgtcgatgagatgggtcacgggctccaagccacgttcgtaggcaaccgcggcgcgcatcgttgcctcgcccggcgtcatcgcttccagtgcgcagttcttgagtgcaaatgcgactgcgctcgcacgctctgcgggtgtcatgcaacccatgataaggcatattcgcgctccagcggggaatcgactcggacgaacctcgacgaaccgcggcgaatcggctgtcgggattcgtcaatcgaccatatcgtcacggtgtcgtcaccaaccatgcacccccgtactagtagaatcagacccgatatggcacgaacagcatcctccaacagcaccaaaccccgtaaatccaaagacaacgggtctacccatgatggcgacaccaaggtccagcccgagcttgacctcgaacctgagccgttgtggaagaagatcctgctcgcgattccgcgcgcgttcggctccggcgtacgcgccgtcaccggcgtcggcgaatacgacccagcctaccgtcgtgacggtttgtgcttcctgctgctcgtgctcgccgtactgttctgcgcgtccgaatggttccgtgtcagcggtccattcggccagctgcttcacgccatcgcggccggtgtgcttggtctgatgagcgtcgtgctgccggtgttgctcgccgccgtggccttccgactcatgcgcaattccggtaaagggtccaataacccgcgtgtggtcaccggttgggtgctgctcatgtggtcgatttgttcgatcatcgacgtggcgatcgccgccgaccacaccggattcgacatcacgattctgcaatccgccggcggcctgttcggcttcttcctcggctcaccgctcgcctggggcctttccaacgtgttcgccatcatcattttcgtggtcgtcggcctgttctccttgctgatgattaccggcacccacgtcaccgatttgccggaggatgcgcgcaaaatcgcagctaaaatccagcgcaaaccgtatgtgccgatgggccaggaggccgacggaagcgccagccagttccccaacgaggtccgtgtgggagataccacactcgcctttgccgacggtgttccctcgcatgacggcaacgacgacggcaacgacaacgatcaggccggcgatgcacggcccagcctgttcgcacgactgttcggccgcaaatccaagaccgaagacgacaaaacccttgacaagtatgctgccgacgatccgttcgaccgtgccgccagccagcatggtgccaccgccgaaaccccggtggtcgatccgatgaccggcgagattaccggtgcgcgaaccattgcatcgtcttcgtacgacggtcgtccgcacctatccagccctgcgcctgctgccgatgcggatgatggcgacgcttcccgaacccgcgtcatcaccagtggccagaccatcgccatgcccggtgggggagcggtagacgatccgtgggcacccagtgccgcccaggccggtactgtcgcgctcgcaggggcatccggggcgatgggagcggccggggccgccggtgccgcggccgcggcagccgcgaccggagcctacgcaggcgccgatgcggatggcagcggagtcggccagggcgtgcccaatacggacggacagccgaatgccgccgccggcaacggtacagatgacgacgccaataggccgtatcagttgcccgacctgaacctgctgaccaaaggtcagccccatgcgatgcgcaccccggccaacgatcgcgtgatccgggcactgacttccaccttcgaacagttcaacgtggacgccaaagtcgtcggcttcctgcgtggcccttcggtcacccaatatgaggtcgagcttggccccggcgtcaaggtggagaaagtcaccaacctgcagcgcaacatcgcctacgcggtggccagttcggatgtgcgcatcctttcaccgattcccggcaagtccgctatcggcatcgaaatcccgaacgaggatcgcgaaatcgtgcacttgggcgacgtattgcgctccgacaaggccgtgggcgacccgaacccgatgctctccggcatcggcaaggacgtcgaaggccacttcgtgaccgctgacctgaccaagatgccgcacctgctggtggcaggtgccaccggttccggtaagtcgagttttatcaactcgatgctcacttcgatcatcatgcgtgccacgcccgaacaggtgcgtctgatcatggtggaccccaagcgcgtggaactgtccgcctacgcaggcatcccgcacctgctgaccccgatcatcaccgatccgaagaaggccgcacaggccctcgaatgggtggtcaaggagatggatgcacgctactccgacctcgaattcttcggattccgccacgtcaaggacttcaacgaggccgtgcgcgccggcaaggtgcatgcgcccgccggctcccagcgcaaggtggccccctatccgtacatcctcgtggtggtcgacgagatggccgaccttatgatggtggccaagaacgatgtggaaagctccatccagcgcatcacccagctggcacgagccgccggtgtgcatctggtgctcgccacccagcgtccgtccgtggacgtggtcaccggtctgatcaaggccaacattccatcccgactggcgttcgccacctcgtccgccaccgattcgcgagtcattctcgacacggtcggtgccgagaccctgattggtcagggcgatgcgctgttcctgccgatgggttccgccaagccgattcgtgtgcagggctcgtgggtgtccgaatccgagattcgcaaggccgtggagttcgtgcgcacccagcgcaagccgaagtaccgcgaagacatcgaacagatggccaaggaagccgaaaagaaagacagcatggagcccgacgaggagatcggcgacgacatggacgtgctgctgcaggccgccgaactcgtggtcaccagccaattcggctccacctcgatgctgcagcgcaagctcagggtcggcttcgccaaggccggccgactcatggacttgctcgaatcgcgcggcgtggtcgggccgtccgaaggctcgaaggcccgcgaggtgcttgttcagccgcaggacctgccgcaggtgctcgccttcatccgaggcgaaaccagctcgctcgaagccagcgccccgcaacaacccgaactcggcgaataattcacccatcgacctccctctgatgagggaggtgcccgaaggggcggagggagagaagcgcggacagcatcagcacgaaacctgattcccgaataatagcagtcaatatccagccaccactcactcaaggtaggagtatgggggtaacgtgaacactatggatgagaacacaatggacaagcagtcatcgcccaaatcatcgctgttcgacggatggaacgcgccgccgaacctggtcacctactcgcgcatcgtactcgtggtgattttcctgacactcgacattctcgccggttcctggggtaagaacaacctgatcatgcgttgggtcgccgcggtactgttcatcatcgccgcgtccaccgataaaatcgacggttggatggcccgcaaatacaatcaggtcaccgaaatgggcaagctcatggatccgatcgcggacaagctgctcacttgcggcgcaatgattgtatgctccgcgttcggcgagctcggctggtgggtgaccatcctgttcctgattcgcgaaatcggcatcaccgttatgcgcttcttcgtcatggagcgtccgggcggcaaggtcatcgccgccgcatggcccggcaagctcaagaccgtattccagtgcgtgggtctgtccatgctgctgctgccgttctggtcattgggtaacggacaggccacgccgttctggatgaccgcttactacttcctgacctacgccatcatctacgtggcattggtcctgtgcctctactcgggtgccgtgtacctgtacaacacgttcgtcgccccgaagcggaagtgacggatattccaatgcaggaattgtgcgacagtctcgcggccggcatcctcaagatctgcgaggcgaacaatacgaaaatctcctgcgctgaatccctgaccggtggcctgctcgccgatgcgttcgtgcgtattcccggtgcctccaacgtgttgctgggctccgctgtcacctacgacatcaatgccaaggcctcgatcctacacgtggacaaggccctattggatcgagaaggcgccgtacaccccgaagtcgcccggcagatggccatcggtgccgctcgcctatacagccagccggaatacggcgaccgaatcatcggcctttccaccaccggcgtggccggccccggtccggacggtgataagccggccggactggtgtatgtgggcctgcgcatccccgcaagcctcaccgcggaccatgtcgaagtgctcaaagccgtcgaactccatcttgatggcatgcgcgaagaggttcgtcgcctcaccgtattccacgttctgcaaaacttgagtctattcacagcaagttttaaggaataaaaccgcgggaccgtcgtgttgtacatagtggaaacactgaaccgaccttggaaggggcgatggcgatggaaacgatgacccgagtgaacgaacagatggatgtggccgccaagaagccgatggctgtgcagccgggtgtcgcccgtatgcgtgaactgactccggcccagcgccgtgcggtgatgttcgcccagcagcaggtgctcaaggcgcaggctgccaagaaggccaaggatcagcgtcaagccgttcgtgaacgtatgtgggatgaggattcgccgtcgtacaagccgactgccgccgccgagcccgtggtggttgaggaggagcctcgcgaggtttcgctgcgtggtgctatcggctacgtgctgcgcgaactgcgtacgcgcgatcgccgcacgttgcgtgaggtctccgagaaggcgggcgtttcgctgggctatctttccgaagtcgaacgtgggcagaaggaagccagctccgaactgctgagctccatcgccgatgcgctcggagtctccacttcgcgcatgctgcgcatggtggccgattatctcgactcggtcgagggctgatcggttggcggtgtgaagccgcatcccgtaatctatgtctagctgtgaacccgtatcgcttgtggcgatgcgggtttttgctgtcctgcgggtggtggcacactggcgtgtatgcgtgaacgggaattctgggaattacttgaagaggtgttcggtcggacctacggtcgttcgctgtcgcgtgatcaacggatgtccaaattgacgaatatgactgtggtcgaggcgctggacgcgggggaggagccacgcgtggtctggaatgtgctctgtgaccaaatggaggttccggactccaagcgttggggccacgatcataacgcgccgcccatgcccgccgtctgacactgcgggattacggagtcgctgaatcgtgaaattggcgatttcggcgtgttgcacgccaaattcgaacaaatgttcgtgtgtgtggttatagttattcacagtgacaagaagccgcatacgtgtgcacagggtgcttgtcatccgccataagccttaccgcagtaggtcttagggaggtcagatggccgagctcgggcaagctggaaccacaatggttggtttggattgcctcacatggcatgtccgtcatacggtggaggcatccgattcgcgcacgacttcgacaaggagaagatcatggcacttgagaccaagccggccaaggacccggcagccgaggacaagcacgagctcgatcccaagcgcaaggcggcgctggacaccgcgctggcgcaggttgagaagagctttggcaaaggttccgcaatgcgactgggcgaccagcccgagcagaacgtcgaggtgattcccaccggttcgttggccctcgatatggcgctcggcatcggcggcctgcccaagggccgcatcgtggagatctacggccccgaatcatccggtaagaccacgctcgcattgcatgtggtggccaatgcccagaagaagggcggcgtggcggcctacatcgatgccgaacacgcactcgacccggcctacgcccgcaagctcggcgtggacaccgactcactcatcgtctcccagccggataacggcgagcaggccctcgaaatcgccgacatgctgattcgctccggtgcacttgacgtcatcgtcatcgactcggtcgccgccctagtgccgaaggccgaaatcgaaggcgaaatgggagacagccatgttggtttgcaggcccgactcatgagtcaggcgctgcgcaagatgaccggcgcgttggctcaggccggcaccaccgccatcttcatcaaccagctgcgtgaaaagatcggcgtgttcttcggcaatcccgaaaccaccaccggcggcaaggccctgaagttctatgcctccgtgcgtctcgacattcgtcgtattcaaaccctgaagaatggcgacgaagcggtgggcaaccgcacgcgcgtcaaggtggtcaagaacaagatggccccgcctttcaagtccgccgaattcgacatgctctacggtgaaggcatttcccgtgagggctcggtaatcgacatggctcagcaggttggcgtggtcaagaagtccggttcgtggttcacctatgagggtgatcagctcggtcagggacgcgagaaggttcgtcagttccttaaggacaacccggccatcaccgaggagattgagaataaggtcaaggccgagttcggtctgatcggttccgccgaccagttcgcggaagatggcgaagccgcagcagcggccgctgtcagcgaggccgccgctgccgacgtggccaaggacagcaaggccgcagcggcgcctgctgccaaaacgacccgtgccaaggccggcgcagctaaggcctgaacatgattagtgccgaagcattcttgcggcgcaatcctgttgcgtcgcaagacatgcccattgccgagcagcgtgttcagccgaaaccgccgggacgtttttctcgacgggggagagacgttgccgttgtcgaagatcccaatgatttggacgcttgccgcgaggctgcattgcgtttgctggacgcggccccgcgtgcatccggcgcgttgcgcgaacgattgctcagcaaaggctatggcgaggcgattgtggacgaggtcatcgaacggctgattcgcgtgcaactgattgacgaccgcgcttatgccgaatcggccgtacgctattgtgccggtcgcatgatgggtcgtcgtggtgcggtcctggaacttgctcgcaaaggcgtggaccgcaaactggctgaacaggtgtgtggcgaagctgagcaaaatggcatctttgaagatgccgcatgggaattgggccgccaaatagcccgcaaaacccatggcctcgatcgtcaggtccgtcagcgtcggttttggtccgcaggcggccgcaaaggacacagccccgaaaccctccgccgagtcgccgccgaattgttggtgtagccaagaaaaaaatgagacctcttataccccgggttctgtcgtgccgtgcgcgaacgcacggcacggatggccatccatctcgacctgacgttgccgccaggctctagcagcctacccgatgacacgggcgagcagcccttaccgccatctgcttggccttgctcccgatgaggcttgccatgcgacctactgttaccagaggcccggtggtctcttacaccgccgtttcacccttacccgtcgaggacgggcggtctgttctctgttgcgctatctctcaggtcaccctgggcggacgttatccgccatcgtgctctatggagcccggaagttcctcagccgatcccaatgaagatcacggccgcggccatcaagaggtctcaagcctgcaattatacataaggtgcggaaaaggcggcatcccgccctgcggtgaggccatgacgttgcccagttatcctgttttctccatagttgggcatagttgggcgattcgtgaacgacgcgccgaatatcggatggggcgtgtcgggcgtgttgtggcgtgtcgtatggagacgaatcaaatctgtaagagcttggtatgtgcgagaaagagcaagaaaacgctgcctatccattgcagtatttaccatgacgaacaaacgagccagcctgataaaccggtatcaaatcttcttataggagactgctgccaaaaccccagtatatacatcgtttcattgcagagaaaagcccgggaataaacatatattctctgggcgagtttccggccgttcacccattgttcgtctacaatgaaacatacccggtcggtgatgatgccgttcggaacacatatagcgggttacaccgcttgagttagaggaggtcaacatggaaatcgtcgttaccggacgccacacgcaggtcaagcaaaggttccgtgatgtggtcgagaccaagatgaatcgtgtgaccgctatcgccccagatgctcagcgcgcgcagatcgtgctgacccatgagggcaacccgcgtcaggccgataccgccaagcgcgtggaaatcaccgttatcgccggacgtactgtggtgcgtgcggaggcttccagcaccgatgaattcagtgcgctggacatggcgctggataagttgacgctgcgtctgcgtcgtactcgtgaccgtcgcaaggatcaccgtcgtggttacgcgaacccggtcccggtggatctgggtgttatcgccccggagcccgagccggaggtgtcggaggaagagccgaacaacagcccgcaggctgcggtcgcctccgatcttggccctggcgaatccgtggaggtgcaggttggggatacgccgattgtcatccgtcgcaagctgcacatcgccgagcctatgagcatcgacgaggcgctgtacgagatggaactgatcggacacgacttcttcctgttcgtgaacaaggagaccggacgcccgtccgtcgtctaccaccgtcacggttggagctacggcgtgttcgaaatcgatactccggagaacgtcaagaaggcctgaagataaggcctgctgacacgatcagctgataccgcatggaccgcttccaatatggaagcggtccattttttcgtaaaaaggtcgaaaaattcgattgctgacggtgcgaggcgctattctggtacgcggacaccaccacttatcagtcaagggagaacccagtggtcgatattgttgacaaagccctgcgaatgggtgaaggccaccagctcaagaagctggagaacgtggccaaggccgtgaacgccctggaggacgagatttccgccctctccgacgaggacctgaaggcccaaaccccgaagttcaagcaggaaatcgaaaacggcaagagtctggacgagatcatgcccgaggcgttcgccaccgtgcgcgaggtctccaagcgcaccctcggccagcgtcacttcgacgtgcagctcatgggcggtgccgccctgcactggggcaacatcgccgaaatgaagaccggtgaaggcaagaccctggtcgccaccctgcctacctacctgaacgctctcgaaggcaagggcgtgcacgtggtcaccgtcaacgactacctcgccagctaccagagcgagctgatgggccgtatctaccgcttcctcggcatgaacgtcggctgcatcatcaccgagcagaagccgccggagcgccgcaagcagtacaacgccgacatcacctacggcaccaacaacgagttcggcttcgactacctgcgtgacaacatggcctgggagaaggccgacctcgtgcaacgcggccaccactacgccatcgtcgatgaggtcgactccatcctcatcgatgaggcccgtaccccgcttatcatctccggcccggccgaaggcgacgtgacccgctggtaccgtcagttcgccaagctggtgctgaagctcacccgcgacgaggactacgacgtcgacgagaagaagaaggtcgtcggcatcctcgacccgggcatcaccaaggtcgaggacttcctcggcatcgacaacctgtacgagccggccaacaccgccctgatcggctacctcaacaacgccatcaaggccaaggaactgttcctgcgtgacaaggactacgtcgtcacccagggcgaggtgctcatcgtcgacgagcacaccggtcgtatcctgccgggtcgccgctacaacgagggcctgcatcaggccatcgaagccaaggaaggcgtggaggtcaaggccgagaaccagaccttcgccaccatcaccctgcagaactacttccgcatgtacgacaagctcgccggcatgaccggtacggccgagaccgaggccgccgagttcatgaacacctacaagctgggcgtgctgccgatcaagaccaacaagccgatgatccgcaaggaccaggacgacctcatcttccgcaccaagaaggagaagctggccgccatcgtcaaggacgt

SEQ ID NO: 733 - DNA, 4141 bp, Unknown
  R14_15m  MAG No. k141_48891
ctcttccagaaggccacggtcttcgttggtcatcgaatcctcgtccagcggcggaatctcgccgaagttcttgttgatgaggttggccacgcggttcaccaggttgccccacgaggaggcgagctcctcgttgttgtggcgcacgaactcggcccaggtgaagtcggaatcagaggattcggggccggccacggaaatgtagtagcgcacggcgtccacggggtagcgggcgaggatgtccttgacgtagatcacgatgccgcgggaggaactgaacttcttgccttccatggtcatgaactcgctggccaccacctgctcaggcaggttgagcggacccatcgggccggtttcgccgcccttggagcccttgccgttgtacgccagcatttcggacggccagatctgggagtggaaggtgatgttgtcctttcccatgaagtagtaggccgggcagctcggatcgttccaccattcacgccacttctccgggtcgccctggcggcgggcccattcgatggaggccgacaggtagccgatcacggcgtcgaaccacacgtacagcttcttgttcgggttgtcgatccagcccttcaccggcaccgggataccccagtcgatgtcacgggtgatggcgcgcggcttgacctccttgaacaggcccagcgagaagttgatgacgttggtgcgccagcccttgcgggtctccagccatgccttgttggcttcggcgagcgccggcaggtcgaggaagtagtgctcggtctgctcgaagcgcggggtttcgccgttaatcttggagacggggttgatgagctcgtccgggtcgagctcgttgccgcaggcgtcgcactggtcgccacgcgcaccttcggcgtggcaaatcgggcactcgccctcgatgtagcggtcgggcagggtacggccggtggacgggctaatcgccacctgctgggtgcccttgtagatgtagccgttctccaagcactgcttgaacatctcctgcaccacgtgctcgtggttaccggtggtggtgcgggtgaacaggtcgtagctcaggccgaggtcgcacagatccttggcgatcacgcggttgtaacggttggccagttcctgggcagtgaggccttccttctccgcctcgacgagaatcggggtgccgtgctcgtcggtgccggacaccatgagcacgtcattgcccttcatgcgctcgtagcgcgcgtagacgtcggagggcacaccaaatcctgcaacgtgaccgatatgacgggggccgtttgcatacggccaagcaacattcaccaaaacatgactcataaggcttgattatccggcgcggcggggacacgcccggatagctgccgcgccgccatcctcatcccactcacctatccgcccgtaacttcccccacatacttatccgtacaccgcttgcgcgcttatccgcatacgcattcgcacacgtatccgtacgtgcatccgtacacacgtccacgcacccatccgtacgcacgtccacgcacatccgcacacacttccgcctgtcgatatccaccgagttatccacatcattcgcgcacctagtgaagttatgcacttatccaccgttttcgcttatccggtggcgcgcaagccgtacttctgcatattgttcggtcatggatatcacagcaggtccgatgacggacatcacaacagtcacctcgccggcaaccgcgcagcccgcggtgccgccgatactgtttaccaaggatctgccgggaccgctcagccttaaccgtctggccgccttcggcgcgttacgtaagctcgacgattccgccggctactggatcgagcattcgggcacactgtatggtcgcgcaaaaatcgtcgcggaggtcgccccgtttggcactgtggtgtgttcgatgaccgccgcttgggtatggctgggaggccccgactttccgagcaccatagacgtgatctccacatcgcacttccgctcggcatccgtcagccgccgcatccgcgtattcaaaagattgacgttgccggagcaaatcatcaagctcggcgggctgcctgtcaccacgccagcccgtacggcttgcgacctggtgatgagtcctgaagacatccccgatccttccaccgtcaacgcactggtgtgtcagctgatgtccgcgtaccagtttcggccaaacgactgtctacaaatcgtcaaggagcatcggcatcacaagtatgccggacgcgcacgcatgttttttgaatcggtgcagaaggagattgacgaaccggctttggagcaatgcgcatgacgaggggattcattgccagaggccatcgcagaggccgccatgccgctcaccgtttacggcatttgcggcaggcgcaacggttgcctcgccacgcggcggcggcacactcatccgaatccgcatcgcgcgcaatctcggatatgaccgcgccgcctgaaccacccatcagacttacgcccgcggtggcatgttcgcccgatacggatgttgccgtgctctggcacatcgcatatcacgtgcccgaactgcgtaaatggctggttgccaatcccaaagccgacgcgcctttgctggaattggtctcgcagcgtggtgggcccggggtccggcaggcgttggaaatattgttcgagtcgatggaagcgtaacggggagataatcgccggctgctgcgctatcccttgattttcagcacagccgcatacacctgcttgcgattggccaacgatccgtcagccagtggatgctcctgcaccacttgcgcgatggcgtccttgatacgcaggccgtcctccaaagcacggtcgatggccagcacggccatgtcatccacgctcaacgtactgggcgcggccgcttcggcctcctcgttggacgcgccgccgacgaccagcaccatctcgccacggggcggatcatcaatcacactttggcgaatctcgccaatcgggccgcgacgaatctgctcataatccttggtgagttcgcggcacagggccatcgggcgattcgggccgaacgcgtccagcagatcgtccatcgaatcggcaatgcgatgaggcgtctcgtagaacacgatggtgcggcgttcgggcaacagcgtgcgcagatactgcacgcgctcggaatgctttcgcggtaggaagccctcgtagcagaaacggtcggtgggcaggccggagagggcgagcgcgtcgagcacagcggaggggccgggcgcgcaggtgacgggcaggccgcgttcgatggcacggcgcacgatggccaagccggggtcgttgatggtgggcatgccggcgtcggacacgacgagcacgatggcgccggtttcgacctgatcgagcaggccatcggccttgtcgcgctcgttgtggtcgtgataggcgatgacgcgaccgttcacatagacgccgaggcgacgggcgagatcgtagaggcggcgcgtgtcttcggcggccacgatatcggcccgctccaagagggccaccagacgggcggaggcgtcgccgacgttgccgatcggggttgcggcgagcaccacggtgccggcggggatggtcacggccgattcgcgggattgggtggcggcggattcgccggcatgaacttcatcattgcgttcaggcacttgcgtcacgctaccgtcagcgtcatactgctcattcaactcatctgcgcttgtcatactcccagtattgcccataccacagagcaatccacgacaatccatggcggaatcgaggcattctccctttgcaggggctgatttcacatgttccggaagtctacttccgtttcaaggggctcctcatccggtgaagcaccagtacaaacggctttgacgcaacgctattccgccattttggcggcgtatctacttgaccatcagcccctcgaaacgcaagtagacctccggcaaaccccaaatcagccccttgaaacgcgagatggcagaatttcaacgaagacaaataaaaagaccctctgcggtggaatgaatgcagagggtctcgtggagctgacggtagtcgaaaccgcgacctcttcgatgcgaacgaagcgctctaccaactgagctacagccccttggatgttactttgctccgcaaagcaac

SEQ ID NO: 734 - DNA, 9709 bp, Unknown
  R14_15m  MAG No. k141_49901
gcagcaggtcggtgctccgaccgagctgtatgatcgtccggccaacgtcttcgtcgccggcttcatcggctccccgtcgatgaacctgaacacccacccggtggtcaacggcaaggcgaagatcggtgaggacaccgtggacctgccggctgaggccgtcaacaagctcaccgccgaagacaacggccagatcgtggtcggcttccgtcctgaggacgctggcctggccccggctgacgacccgaacgccttctccctgaaggttgtgaacgtcgaggatctgggctccgatggctacatctacggcaacatcgtcaccgatggctccgccgctgaggcttcccaggtcatgtccgaccagaacaagctcaccacgattcgtgtgaatccgcgtgcgctgccgaaggttggcgcgaccgtcaagatcaagatcgacccggccaagatgcacctgttcgctccgtcgactgagctgcgtctgaactaatagatacttggcgaggtctaatcgcttcgtcaaccattaaacgaggttattctcttcctctcttatggcctcgttggaaaagccctgcatagctgcggggcttttcttttgcccagaaagacatacgctaaccggcccccgcaaatgaacgttttttgttcttttgtcaacttcttcctagagaggtgatatgatcgtatgcagtaacctcccgaaaaggggattgcaaatctatgaggggaaacgatgggctcgaaattaaagctcggccgttgcggatttaacggaggagcagaacaggaacctggacagcatcgccatgtcttgcggcgctgccttgcttcggttattgctgtttccctgtctactgtgtgcatggtgcctgcggcatatgcccaggacgtagatgatgtaaatggttcctctaactccgtaattcttggggggggggaataatactgtcgtagctgctccttctgctcgcaatgtcaatgttgacgataagacgtcagaagagggcaatacatcaaacggtgcgccagcaccttctgaaacgaatcagggcgcgcagcaagattcatcttcttcatcttctactactggtggttcttccgaatcctcaaatggtgaggcaggcaacaaggcggatgccgcagcaggggctactgtcggcaatcccgctaatgacggagcccaaacgcaggctccgactgatacttctaaggcaccttctcaaaatgccaagaacgattcttcgactgaggcggatcaatcgccggcgaaggccaatgtgcaggtcgccgcgacggcgcttggcggccgtgactttgaaggccaggtcaccaaggaaatcaacggcaagacctacattctgattggcaacgagcagcagctgcgtgcgattggttccggcaagaaggttattggccgcatcaacaaggtcacgcagacttgcacgaaacaaggactcttcggttctcctcagtgggtggacggcacgccgtcttctgaatacgccggtgacgccgatctctccggttcagataccttgcgccatgctgatgcctccgaccacgacgacagtccactgctgggatgcacgatagcaaacgtcggaaggacccgcttcaagtattacggcgtgggtgctggtggtacgcaaacggactactccgctgccaacaccggcctgacctattccgcagacgccaactacctgatcttccgtgacatcgacctgtccaagaacgcggccggtaccaacaacaccgagtggactccactcatgttctccggcaccatgctcggcgcggtctccaacagcgcagacgctgtggctagcctgtggaaggctgtcggcaccgatggcgcaagcgtggagcataccacagcagctcggccggtcatcagccatgtggtcgtcaatcaaccgggcaagcagctggacgtcagcaagcagcagggcatcggcttcttcgcctcgatcacgaacaagaccaagatgaacaacaaaagtctgggcagcgccggtacggccgtggtgtcgaacctcaagctgcaggatgtgtcggtaacgaatcaggcaagcgagtcatatattccgccgaccttgctcagtacgctcacttcggcagtgggtggacttttggatcttctgcttaaggcgttgaaactgctgacattcggacaagtaaatcttgacctcaatcttcgaggtctgctcaccctgcacaaagccaatccctccaatctcgccactggtgcatttgccggccgtatctacggggacaccaaggttacggactgcgaggtagcagatgtttcggtatccagcgtaagccgtatgaccggtggtttcgtgggatatgttgagggtgcgacccgatacgatgcagtctccggcatcgtaggagcgctcaccaagttactctcggggattctgaacatcatcccgttcctcgggctgggcgatttggtggactggctgctgtccggcacgctcggactgaatgccttggttccggtcggctactacaacccggtcatctcgaacagttcggtgaacgggttcaaagaaaacgtggtgatcggcaacaagaataatccgcaggccggtggcttcgtcggtgcgcagattggcgcaatcgtcgagaactcctcggtgacgagcacgaacggtttcaccgtgcaggcaacgcaatacgccggtggcttcgccggagtaagccgcaacggcaacgtgggtggtctgctcgattcgcttggtattgatttgctgtctgcgctgcgtccgcagagcctcatcgagaacagcaacctgaccgtcgacggcgatggcaaggtcactgtatctgccacggactatgccggtggatttagcggcgcgatggccaatgcctacgcggtcaataatacgatttcagccacggctgccgtgtctactgataaatcccatgccggcggattcaccggatttgcctccgtgggatggggcctggaactcggcacggacgatgccgcgaacgcatcgctgctgaaacaactcaccaaggctgtggccaaattgctgagcggcagcggtagtggtgcgggagaactgctgtccatcgtcggtgtgaatccctccgtgattctcggcacgcagatgaagggctccctcaccgttaaggctggtggcgattacgcgggcggtctcgtgggcgaaggatcgggcacggtgatcggcgactcctcacaggatcatctcaagaaccttacgttctggaagtacaacaatcctcgtgacttccctcagcagcgctccaccaccatagaaggccttgaatcggtcacggccacgggctcctacgcgggtggcatcgccggcaatctgcaaccgacaacggtagctgggttgctcaacagtgtggtgaaaattggcgatatcgccacgctcaagaagttcgaccagtttgctgcgttcaccgtggagaacatgtctgtcaccgctccggcatccggcctgacagtgacggctggttcatattatgcgggcggtgccatcggatgcgccaccggcggcgacgtgacccacacgaaccttaccaatctggccacggtctcggccaagggagaagccggcggttttatcggcttctccggaccaggcgacgccatcggcgctggcggtctcaatgtgctcgggcttatcaagctttccggtctgctatcggttgcccaatattcttcggttgcagtcactgcatcgaacgtgaacggcatctctggcggattcacggttgcggcaaccggcaagaacaagaacaacgaaacaaccgattacgctgcaggcggtttctatggtcaggccaacagcaccaaaacccgggaaagccatgtgacaaacctcaaatcggtcacagccgataccagcacgtccgatggtgtggcaggcggtttcgtgggcttctccaccaccggcggcctcgccgacgcgctcagcaacgcaaaagattccagcgtattggatggcctgatccaaggcggcctgctgtccgtgaacgacctgctcggtgccgtaccgtatctgattccaagttatacggataccaccgtgacgtacgtcaacggcggttacgtcgaaggcgatatcgcgggaggctatgcgggaaacttccaaagcggcaaagtcaaccagttctccgaaaccgatctcgagaacgactcaacgctggcagacgtgcagtcccgcgttcaagctaaccccgtggccgttgtcaacctcgaccatgtgaccggcggcgcatacgcaggcggtttcggcggcaaggtcgtttccggcgcactcgcttcggctggcaacggcggcctgagcctgctcggcaaaatcggtacggtggatctcgccaacctgctgcaggtggtgcagggctatgtgccgttcatctcctacgcgggcgtgcattccgatgccaccaccgtggagaccaccagcggcaacaagatttccgacccggacgatcccggcttcaccgtctccgccacccgacttgaccaatccgatacgcaatccggttccgccggcggctacatcggctacggttccggcgtgcaggtatcccattccagcgtgacccaactgcgccacaccgacgtcaaggcaccgaagaatctggaaaccgccggatcaatcgatggcacctatctgagcaaagacagcacatatgcagtcaccgctgcgcgatacgccggcggttacatcggcaaaatggacatcggctcggcggcagctgtgggcggtggcctgagcctgctcggccagaaagtcaatctcaacgatgtactcagtgtgctggatgtcgtcgtctcgacgattgaacactccgatgtgactggcggcatcggcggatactccgttctggccagcgccgcagatcataggaatgccaacaatgagcccgatccactgggtgtggctggtggtttcgccggagacatcgaaggcggccacattcaggactcgagctctcatgagttcgtatacatcatcggccaggtttcggccggcggttacgtgggtaccatgcagccgggagccgtggcgaacgtgcttggtgacggcagcgtgctcaagaagcttgccaacctcgacgacctgctctcgctcgtgcaggacttcgtgccgacgattcgcaacagctcgaccgatgccgcagtgtgcggcggcgcggtgcgtgcccaggcggcatcggatacgaccacacgccgtggcatggccggcggctatgcaggtcgtaatcgtggcggtcatatctggggcaacaacacagcagcgtggaagcaggagaataccgacggcaaatacaacgggccgcagcgcgtagcctacgccgcgcgcatccgcagcgtatacggtgccgaaatcgccggcggctacaccggcttcatggaagcggccgataccgctgaaggcggttcgctctccttgctcggcggtctcatcaaggccggcaacctcgccggcgtgctgtccgtggtctacccgaccgaggagcacacgaaggtcaccggtccgctgcgcaatatgagctacgaccagtggaagacgtgggtcgacaacatcggcaagtacggtgcgtatggcaaggaattcaccgatgtgaccacggctgatggtgcgggctctgttaccgaccaggattccctggacaagttcctcgaatcctacatcttcggattcaacgtcgtcgcaggacgtgcggagtatcggaccggcgcgaacctgcatgattccggcgccgccggcggacacgtcggcctgatgcgcaccggtacgatcaccgatggccagtcgatggacgtcaagaccgtctccgccatgcgtgcggcaggtggctacgcgggcacgatggaatccggctcggcatcctcgttcggctccatccaactattcggcgacaaaggcatcaaacttgatctgggtcagatgctcgacgtggcacaggtattcgtgccagtcatcaaatcctcgagcgtggccggctaccgcaagggtatgaaggtcgtggccaccggcgaagacatcacgcacggcaccggcaacgccggtggctacgtgggtctcgcggtcggcggccagatctggggcgatctcgaccagaacggccagaagcttgccgatggggccactgctgacaaggcagccggtgccaacgtctccaacctgcgcaaggtggaagggcgcaacaatgtcggcggattcatcggcgtggccactgccggtgcggttgcggatgtggacaccaatgcgtccgagggattcctgcaaggaatcctcgactcgctggtctcgaccccggcaagtctggtcagcgtattgcaggccacggttacgacgattcgcggtgcacatgtgagctcggatgacccggcatggggatacacggtcaatggcgcatatgagagcaaggacgataagggtaataccacaaccaagtatgccctgaacgccggcggtttcgctggttcgttgcaggccgcgatcctcggtgacaaggattccgccaaaggcaccggcagtgaagcagatccgaacaatgacccggcttctcttactgttaacgggctgcgcgctgttgaaggcgggcaatacgccggtggcttctttggccttgctgatatatccagcgtcgcttccgtcggcggcggcgaggccggcgataagcagaataccaacctgctgctcaaactgctcaaggtcggcaacgtgggcgtgctcgaagcattccgcaccttcatctatgacggtcaggtcaacggtgtgagcgacggcatccagattgtcgcccatgattccactacgaagggcatgctcgactcgaagcgttacaccggtgcggccggtggcttcggcggtgggctgatcaatggctccgtcaagcagtccaacgtcaccaacctcaacagtgtgaccggcgtgaactacgtgggcggcttcatcgggcacctcggcaaatccggcacggtcgccgccgacaacgcacaactcggcacggatgcgctcaatctgcttggtgccacggccggcgtacttgacatctggggctcgcacgttggcgattcgcgcgtcaccggcatcccggacggttataccgtcaccgccacacaccatggcgacaattacggcaaagccaccgacaaggctaccggacgcgaggtcgcaggcggttttgttggatacgcggatttggccagagtgaagggctgcgcgtctgacaatctcaagaaggtcaccagcggcgagatcgccggcggattcgtcggcgaaaccagccgcgcctatctggttgatgcgcaggtcaactctgtacttgtggaactgctgctgcatgtggtgaacgcgctggtcaagctcctgtacctcgacaaggcgcagcaggtcggcgtcatcgacttgggcaagtggttcccgtctatcttcggcaaggtgttcgacctcaaggtgctttcggaaggcaacgtgctgtacgtgaacctgttcgggctgaaggtgagcgtcgccctgtccaaggccgacgccgaaaaccagcagcagaccgacgtggcgattgtcaccatcggcgacagcgtcatcaaactgccctgcagcaagaacggcatcgacatgggtggatcaggcagcaacctgaccgtccaactcatcaagggcaaccgcacccgcgtggaacagtccaccgtgacgggcatcgccagcggctatgacgtgttcggtggtggggcgactcaggacaccgacggcgtgaaggatctcaccaccggctacgcgggcggtttcgccggactgaacgacgagggcgtgctggcggacgaccacatggtctacgccgacacgatccgcggcaccagcggactggtcgacccgttctcgaacaccaaactcaagtccgtatgggacttcaacaccatgagcgacatcctcggaccggtcgatgacggcaacggcggcaaggcatacaacacctatcgcatctaccgcaaggcggtcgcgaacgccggtgaggcccgcacctccgcacaggacggcaacaagatcttctcgcagaagaacacggcagacgatgcgctgaacaccggactcgatcgttgggaagtgaagctgttcgacgtggtcaacacatacgacagcggcgctgtgcacagtggtgcatccggcgacgccggcaccacatgggtcggcatcaaggacgccgtgactgtggctggtggcagcagcacaaagctcgatgcctaccagtccccggccaaggccgtgctcatgcttgacgtgcccgtatccgacaacaacggcggactcacccccgaaccggacgacggccaggacccgtgcggcaaggacggttgccggagcgttgacctgaccgtccagaaggtatggaaggacggcaacctcgaacggccgcagtcggtcgaactgaagatcgccgcgcactataccgatggcagtggcaatacggtgacgccgcagacgattcaatgcttcggcgcggattgcacaaccgtgacgcagaagaatccatggacggtgacgttggactcctccgatgcctcttcctggagcaacacctggcgcaaggtgattcaaggactgccggtcgcattcgtggatggacaggatgccaacggcaaggacatcgtgcgttactacacgtacaccgtggaagaaaccgccgtgacctataaggacggcgataccaccaagaccatcaagcccgcggaggccggataccaagtatcggtctcctacaacaccaaggaacgcgtggccattgttaccaatgcggcgttgcttccggatacgggaggcgcgggcacgatgtggttcctgatgttcggcttgctgcttatgggagctggcgtggtctggtacgtgcgtaatcaacgcgttcaatccggcacagtccgctcgggctccagccgtatacgaaagcgaggtgcccatgcctcgtgacgaccacatagacaaaccgtacctgccaaacagaaaagatttccatctagagaaaggaacagtaatgaaatcactgatgaaaaaggttttcgctgccgccgcggcgattgccaccgtatttggattggctgcgacgacagtcgccacggccaacgcagcggataatgccacgctgacggtcagcactactgacgcgaagttcgccggtaagaccgtgaacgcctacaagatgttctccgccaccgtgagcggtgacggcaaggctgtctcccacacgttgactgacgagtggaagccgttcttcaaggactccactgcttccggactaaatggtgctaccgacgcgaacgtcaacgataaagcaaacgactacgtatccaagctgactggaaaagacttggttgctttcgctaccaaggcatcgaactgggtgcaggccaaggccaacatcaaggctgccgcgaccgctacggtatctaccggtgccacgaacggtaattacactgcgacgttcaatggtctcgactacggctactacgtggtcgctgtgccgggtgcgactttggccaacgccagtggtcaatacgccgcgctagttcccgttcatagcaccagtgtggatgccagcattaagggcgccctgcctaccgtcgtcaagaaggtaaatggtgagagcgccaccagcgcgaagatcggtgatcccctgaccttcaccctgacttccaccattccggaca

SEQ ID NO: 735 - DNA, 12934 bp, Unknown
  R14_15m  MAG No. k141_50223
ccgaacacgccgtcattgtgggtcttgcggtacttggtgaagatcttcttgatctccggatccggctccttgccggcttccttgatggcctgctcgaccatacgccagccgccgttcggcatcatggcgcgcttgcagggcacgtcggtctgcaagccgacgatcacgttgtcgacttccggggagtcgatgtagccggccgggaaggcatcgatgccagccggggtgtgggtgtccacgtcgtagacgcgctgcttgcgctccacggccaggtagttgtcgtcgaggtacttccacaggtgcttggtcttctcggtggcaggagccaggaatgtctcgtcgccctcgtacggggtgtagttcttctggatgaagtcgcggacgtcaatatccttctgccagttgccctcggtgaagccagcccacgccttggcgtcgagctcctcctgggagacagctgcattttctactgcggtcatgtcactccttaaatggggttgtaggtttcgcatcttcacggaacccttggttcaacagtgtagttggcacttgcttgggaaaagccgaaattgggagtgagctatctcacattgttttttgtgaacgctaccattccaatggtttctaggtattgatggggctattgcacgtctccagatatgggaaaccgctcatactgtgatgttcgtatgagcggcttggtgagcggttcggtcttgagattgacagcagaaccgtatccgtctgttttggccgtcagtcttcatcgttcgcttgcgcggatttcacaccgtagttcttccagcgccagttctcctcctcccatctggcgttgcggtccaccacgatgtcccaggcgtgttcggcatcttccttggtcttgtacggacccatgcgctgttcaatcggtgagaccatgcccagctcggcctgcttcttgacggtgttgaaataccactgcttcttgttatcgtctgtcattggtacctcctcaacggtattacttgctcccgctggcgggagcaatatatgtttattccctgaacgcgttggtgacgggcagtcggcggtcgcggccgaacgcgagggccgtgacctttggtcccaacgggtattggcggcgcttccattcggcgcggtccaccaatcgcatcacagtgtccacggtggcctggtcgaagccgtcggccaacaggtcggcgcggccgtgcgcgtgctcgatgtatgcagcgagcaccttgtcgagcagcgcgtattcgggcagggagtcggagtccttctgcccggggcgcaactcggccgagggagccttctcgatggatgagaccggaatcatcacgccgttcttcaacgggatgccggcgttgccgtcctcgttgcccacgatcttgagcccgccgataccgacgcctgcggccgcggccttgttacgccaacggctgatctcccagacacgggtcttgagcaggtccttgatgggtgcgtagccgccgaccgcatcgccgtagatggttgagtagccgcaggcgagctctgacttgttgccggtggccacggcgagcaggccgcgagaattggaactggccatcacgatcacaccgcggatgcgggcctgcaggttctcggcggagacgccatcaaggtcaagttgctgttggtaggcgttgaacaatggctcaataggctggacctcgtaatgggcaccgatgttggaggccaggtcagcggcgtcgtctttggaaccatcggaggagtacatggagggcatggagatgccccagacgttctcgccgccgcatgcgtcggccgccatggcggctaccagtgcggagtcgatgcctcctgagaggcccagcgtcacgccggtgaagtggttcttggccatgtagtccttgaggccgagcacgcaggcagtgtatacctcttcgtccgggtcgagttccggaacgatctcggccttgacctgatgttcggcggtggaatcgaagtcccagaacgtcaggttttccatgaacatcgggccgcgttcgataagcgtgccgtcggcatcgaccacgaagctgccaccgtcgaagaccaggtcgtcctgaccgccgacctgattcaggtagatgaccggggcgttgacttcggcggcacgacgctgggcgagctcgaaacgggtgttggtcttgccttcctcatacggcgagccgttgatggtgagcagcaggtcgatgttcttggtggccaggtcggccaccgggccaccatcctgccagatgtcctcgcagatggccacgccgatggtggcaccatccacgtcgagggtcacggaacggtcgccggcggagaagatacggaattcgtcgaacacgccgtagttgggcaggaagtgcttgtcgtagccggcccagaccacgccctgatgcaataccaccagtcggttgcgcggcttggaggtcttacgatcagtgcccacggtgccaaccaccacgaacagattgccgaggccgtcgtcgttgagctgggcggcgagttcgttggccttgtcccatgcggcttggcggaaggtgcggcgcagggccagatcttcgatggggtatccggtgagggtcatttccgggaaaacaaccacttgggcattccctgcggcggctttacgggagtagtcgagcactttggcggcgttggcatcgagcgcgccgacgcaggtgtcgatctgggcgagtgcgaagcgaagctgtgtcatagcttcttagtgtagccgcgtatggcgtcggatgcctgttcttccggcttggcgtcattcattaggtcgtttttgcgttcattaggtcactgcaatgcgatatcagtcgttgcaatggcgcgattccaacaaccagtatcgccgttcaccgacctaatggacgatgaatcgacctaatgaacgaatgccactcccctcagtcagcttcgctgatagctcgtcctgcacttatggacgggcgaggcccgcgcatatctggttcggctgtcgcctcaccttcggctgcagacagcccattgggctgtctgcctaacgcctcagcctccagaggggagccaaaaaaggatttacctcagctcgttgagcacgcgcagggcggcgttgacgtagaagttgacgaaggtgggaatggattcgtcgagacccacgaaatgcgggctatgccagtcggcgcaaccttcctggccgtttgacccgacgaacgcgaacaccggcaacgtcaccttggcgaattcgcagaagtcctcccccgccatcgactgacgtatcggttcgagctgcgcgtagtcgttgacatccgccgccacggccttggcaagacctggatcggagaccagcgggtcttggaaatcatcccagaccacatcggcgctgataccgtatgcctcggcggtgtgttccaccacttccttgaatcggcggccgaccagattgccatccgacttgtggaaatagcgcacagtcccttggaatccggcttcggcgggcaccacgttccacacatggccgccgtgcacttcggtaacggacagcaccagcgggtggaagggcgtgacgttgcggctcacgatggtctgcaggctcagaataatactggcgagcgcttcgatgggcccggtgcccttgtacgggtagccggcgtgggtgccttgggcgtggagggtcacgcggaatttcacgcagccggccatcatcggctcgacgccgatggccagctggccggacgcatagttggggttgttgtgcgtgccgataatggcttcgacgtcatccacgagtccggcgtcgatcatggcgcgagcgccttggccggtctcctcactcggctggaacagaatcttgattgagccggcgaacttgtcacggtgctcggcgagccagaaggcggcaccgagcagaccggtcatgtgcaggtcgtggccgcagccgtgcatcacgccttcattgacggagctgaactccagtccggagtcttccacgatgggcaggccgtcgatgtcggcgcgcagcccgatacgcggcccgggaccggcctcgccctgaatgagccccacaacaccagtctccagcgggttgtgcaggatctcgatgccgtgcgccttgagctggtcggtcagatagatgctggtgtcgaattcacggaaactacgctccggatgggcgtgcaggtagtggcggatggtgatgagttcgtggtcgatgtcgatatgttcactcatggttcccgattctagtagcgcgaagaatatattgcggccctcgcttcatattggcgagggccgcgatctatggggtcagtatgccttgttattgctggcgtttgagcagtcgtttggcgatggcgttggcgatgccctgcaccacctggaccagtacgatcatgatgatcacggccgtccaggtgacggtctggtcgaacttctggtagccgtaggcgatggcgaagttaccgagaccgccaccgccgatgtagccggccatggcagacatgtcaagcacgccgatgaacaggaaggcgtaggccaggatcagcggtgccagggcttcggggatgagtacggtgcggatgatggtgagcttgccggcacccatcgaacgcgcggcctcgattactcccgggtcgaccggcacgagattctgttcgaccagacgagaagtggcgaaggtgcacatgaccaccatcgggaagatggcggccacggtgccgatggacgtgccgaccacgacgatggtgagcggctgcatggctgccaggaaaatgatgaacggaatcgggcgcacgatgttgacgatgatgtcaaggatgcggtagacgaccgcgttctcgaacaggttgccggggcgggtgccatagagcaccacgccgaggatcaggccgaggaatccgccgatgacaagggtgacgagcaccatggtcagggtctggccgatggattcgaacaatagtgggcgcagcacgttccagtcgctacgcgagttggcgaggatgatcatgcgttgtctccttcatgtgcggcggcggatacagcgggcgcggtggcagtatcggccgccagtgggtcatgggcgcggtcttcggcgtaggaggcatgtccggcaactgcgtcggcgtaagccacgggctttgcggcggtgccgaagtcaatgacgtcgctattggcggcgagctcgcgcaggaattcgtccacgtgccagccgggcccgttgaattcgtaggtgatggcaccgatggcggtccccttgaccgtgtcgatgccgccgtagagcaggctggattcgacgccgtatttggcgatgagttcggagatgttctgtccggatgccttgagttcgtggccatggctgccggaaacgtccttttggcggatgagcacggtgacgatgcggcccgaccattcgtggtgcaatcgctcgacccggtcttcctcgggcaggccggacagggcggtggcgatgaatcgcttggtcaccggctgctggggcgcggcgaacacgtcgtatacgtcgccggattcgaccacgcgtccggcgctcattacggccacgcggccagcaatctgctggaccacgttcatctgatgggtgataagcacaatggtgatgccgaattcctcgttcacacgcttgagcaaggccagcacttcggtggtggtttccgggtcgagcgcgctggtggcttcgtcggcgagcagaatctccggattagtggccagtgcgcgggcgatgccgacgcgctgcttctggccgccggacagctgcgaggggtatttgtttgcgtgctcactaaggcccacgaattcgagaagttcgttgacgcgacgatcctgatagtccttgcgccagtgatcgagttgcagcgggtaggcgatgttctgcgccacggttttggtggagaacaggttgaactgctggaaaatcatgccgattttctggcggatgggccgcagcttggtctcactcaaagaggtgatatcggtgccgagcacggtcacggtgccggaggtgggtcgttcgagcgcgttgataagccggaccagtgtggatttgcctgcaccggaatagccgatgatgccgaagatgtcgccgcgatcgatggtcaggctgacgtcatccacggctcgtgcgatgttcgcgccgcgtccgcgtgttttgaattccttcacgacatggtcgaaggtgatgatggggtcgctcatagtgctccctgatgctggttgttgatgtccggtcacggaagcggagcgaatcccgattgttggctcgggtactcgctccgcttggtggtaatggctatggacaggttagtcgtgcactcgtatcagccacggctcactgctgggctttggcgtccttctcaatgtcggacaggaagccttgcagctcgctggcgctgaacttgtcggcgaacaccgcggtaccgccggagttctcctgcagggcgtcgagcacatccttctgctggtagatggaaacgagcttcttgtaggtctcgttgttcacgtccgccttgcgggccacccacacgttgatgtaggggcgagcttcttcggattcggcgtcatcctggtagatggcgtccttcgggttgagaccggcgtcggccacgtagtcgttgttgatcacaccagcggcgatggtcgggtccttcagggtggtggccacctgttcggccttgagcggggtgaccttgaccttgctcttggcttcgtcgatgtcggccggagtggagaaggcggtccagtcgcccttgagcgtcacgagaccggcggccttgagcacgccgatagcgcgggcctggttggtttcgtcgttcggaatggtgacggtgtcgccctgcttcaggtccttgatgtccttgaccttggtggagtacacgccgagcgggtagatggcggtgccgccgatgggctgcaggtccttcttgttgctcacgttgtagttggccaagtagagcaggtgctggaattcgttgaggtccagctcgccggagtcaagggccgggttttcggaggtgtagtcctggaagtcgacgatgtcgacgtagatgccggccttctcggcgtcctgcttgaacttgacccattcggggttggtagcgccgaccacgccgatcttgaccgggttgcccttgctgcccttggcggacgactcgttggcaccggcaaacgcgcggtagccgaagaacgcggccacggcgataatcgccacgaccacgatggtgatgatgacgttgcggacggtgtggttcacacgcaccggctcgttattgttaggagcggccggagttgccgactgggttgctgctgtcattggatttcctctctccaaaattgatgtcgggtaacaccataacgcgcttgaaccgcgaaagtgacggaaaatggccgattgccgtataggtgtcttttatggcgcgcatgcaatggccggaattcgtgcgtttgataacccgctataggcgtgccgaacacgccggaaagcacgtcgagaggggctttgacaatggaagctatgactaccgatactgccaatgccgatatccgagccgtattcttcgatatcgatggcacgctcaccagtttcacgacccatacggtgccggattccacaatcgaggcgattcaccggctgcaggccgcaggcgtcaaggtgctgatttgcacgggccgcgcgccttcacagatgcacgtggtgctggataccatgccggtgacgttcgatggcgtggtggcgttcaatgggcagtattgctttgatgacaccggcttctttgcctcgcaggccttggatactgctgatattgaggtgattctcgactggctggaccgtcaccccgatgtggtgtgcaatttcggcgagaaggattacgtgtacttcaaccagtccaatgatctgcttcgcgccacgtggagcaaactgggcaaaaccgcaccgacccggtattttgaggacccgcgcacccgcgcgctggatcatgagactttccagatcagtccctttgtcggacccgagttggaggccgaactggtgggactgtgcagcaatgtgcgcggggtgcgttggcatccggatttcacggatctgattccggccgatggcggcaagccgcgcggcatccagcggttcatggcgcattacggcatcacgcgcgggcagaccatggccttcggcgatggcggcaatgacacggatatgctcgcctacgccggcatcggggtcgcgatgggcaatgcgaccgccgagccaaaggccgccgccgattacatcaccgacgacgtggaccacgacggtgtgcgcaatgccctactgcatttcggggtgctacgcgattattgatgccgtagcgcctcgaccgggtcgagctttgccgcgcacctagctggatagtagccgaaaatcacgccgacagcgatgcagatgcccactgccagtccgatggactgcacggaaactgctggcgcgatactcatgccaccggcgatgcctgacaccaatccagcggcgcccaacgacagcaagtagccgatcaacgtgccgataagacctccaagcactgtgattgcaatggattcggcgaggaactgcgcggtcacgtcacgccgagtggcacccaatgcccggcgcaggccaatttcgcggatgcgttcggtaacgttggtgagcatcatgttcataatgccgatgccgcccaccagcaacgagaccccggccaccgaacccgccagcacctggaatgcgctcatgaagctggaaagctggtcgatggaggattgggcgcttacgaccgacagattctggtcgatctgttcggttgggatacgcatgatgcgagcgacaacggtcttcgtctgttccgtgagctggtcgatatcaaccccgtccttggccagtccgtagatctgcatgtatcccatgttcgaggacgcaaaccgcagcgccacagtggtggcaggcatatagatattcacgctgtcgccgcccatgccgcccatcaatccagacgactcgaccacacccacaacggttgcttcattgccgtcaagcgtgacggttctgccgatggcgtcaatgtccgcgctgccgaacagcttctgcacgccctgcccgtcgagaatcaccaccattgcaccactcgttgcttcactcgatgtgaaggcccgtccacgaccaatcgtcactccggatacatcgaagaaatgctcgtcgacaccggtgatgctcgccgacaccttgtcggtggtaccgggcgcggcgattgacgaggcggcaccatagttcgtcggcgagaagtactcgtagtcggtcagttcctcgcgcatcgcagtgatctgttcgtcgtcaagggtgccgacgtccgtgtaaatcgaaatcgtgcgcgccgcgttcatacccagttcgccgaccagagagtctcgaatgccaccgatcagtgaggtcatggtaatcaccgcggcaatgccgatgacgatgccgagaatggtcagtgcgcttttgcctttgttcgccctcagtgcggagccggtttccgccagcagatcccgtgttctcatcggtacatcccttcacgcagtacgccgtcacgcatgtgcaggcatcggtcggcgcgttcggccacttcggggctgtgggtgatgagcacgatggttttgccttgctgcttgagctgttcgaacgtgtgcatcaccgcatcgccggttttggagtccaggttgccggtcggctcgtcgccgagaatcagcggcgggtcctgtaccaacgctctggcgatggccacgcgctgcatctgaccaccggagagttcattggttttgcggtcgaacagttccggactcaacgccactgattggagtgctttgatggcacgcccttcccgttcacgcaccgggcagtcggaataggccaggggcagcatcacgttgcgcagcacgctggtgcgcggcagcagattgaaggattggaacacgaagccgatgagccacccgcgcagttcggagcgttcgtcatcactcagattctgcacgtccatgccgcacaggcggtaggtgccggatgatgggcggtcgagcaggcccagcgtgttcatcagcgtggatttgccggaaccggatggtcccatgatggcgaggaactcgccttggcgcacgttcatggtgatgcctttgagcacatgggtgtaggtgtcgcctgtctcgaagatgcggttgatgttttcaacctcgatgacgttggctgtggcggtgggcacggcaatggtctcattacgccgtttgccgcgatttgcccggctcgcgtcggaacgaaacgggaacatatcagcgtgccctttcgtccgaagccgcggtttgcgaggtggaagaagcagcatcgccagtattgtcggcagccgaagcgccatcaagcatgatgacatcgcccttgctcacattgccttccacaacggctttggtgttgttcttggctttgaccgtgactcgcacccgcttgaactcatgggtttcggcgttggtctcgagcatgaccgcgctgctctccttaccctcatccacgatggcggcgagcggcaccatcaaagcgttgtcaatgctctgcatggtgattttcacactggccgtcatgcccggcttcagtttcggatcaggggcgggaatgatgagacgcacggcgtatcccacgccgccgttgccactctgcccgcctgccgaggaatcagccaactgcgacgtggtgctggcgatggtatccaccttggcatcgagcgtcagtcccggcaccgcggagaacgtgactttggcgctctggtccttggccactttagtgatatccagctcattgatgttgacattgaccttcatctgactcaggtcggcgatctgacacaatggtttaccgtctgcgccggcggaagtggatgagccatcggaggaagctccgatggcggcaccgggcaccgcgctcatggtcagcaccgtgcccgagaccggagcagtgaccgtacgcttgttggcttgggcgaccgcctcgtcgtaggtggcttgtgcttgctgaacggcgacctgcgcgctctccacgccgctttgtgcagcgggcagctgtccggccgcatcatcggcaacggcttggccttcctcaccatcctgattacgtgcctgacctatggtcgcattgatttggttcacctgctgctgggcggcattaaggtttgagttcgctgctcgcagagccagatcggcctgattcacgtcgctatcgagcttgtcgttgttgatggtaaacagtacgtcgccggcgttgacggttgcgccttcctgcaccttgacttcgccgatggtgccgtcgatctgcggggcgacgacggtggagttgatgggttctatggaaccggtggagctgacttggtcgacgaaatggccacgttccaccgttgccgtggataccggagacacgaccccatctgacggggtaataatcgcgtgcaccaccataaagccgataatcagtaccgccacgacggcgacggcgatgatgcgatgcaccacgcgctttttcttgcgcgtctcacgttcgcgcattaatcggttgaattcggcgacttccgcgttctccgcctcgccttgggcaagggcgtcgacacttgattccacggtgtcggtagcgtccaacggttgtatgattgcggtctgctgctgatccttctgcatgtgctctcccccatggctggctccgagcctcgcgcccggatactggttccaagcctatggaggaatggcgtggtttccatcatgcgcaggattgaattgatggggagttgtcatccttaaggattaattggggtggggaatttatgggctgttttcagtcttggctctcgccttcgcttccgcttttctctcccccagtcatgcttcgcatgacagcctcctcgtcagagggggcttatgaataagcaaagggctcgggacgaatcccgagccctttggcgttagcgaactaacaacaccgtggaggtgttatcactcgttgtcgccagcggtagcggcggtagcggtgacggcacccttcttgtcggtgttcacgccggagtacacccagtcggtgtagtccgggtggtcgtagcccttgtcgacggcgaactggaaggcctcatcacggaacttctcgagctcgtcgatcttgtcggcgtacttgtcggcgtcgatcatgcgcagggcctcagcggtcagctcgtagcggtcgatgcggttgacacgaaccatgtcgtacggggtggtggtggagccctcctcctcgtagccgtggacgttgaagttgtcgtggttcggacggtcgtagatcaggccgcgcacgtcgtgagcgtaggagtggtacgcgaacagcaccggcttgtcggcggtgaagatgtcggcgaactcctcgtcggtcagagcctcgtcgttctccttggcggactgcagggagagcaggtcggcaacgttcacaaccttgaacttgacgcccagttccttcagcttgtcggaagcagccatgatctcctgagtcggaacatcgccggcggcggcaagcacgacctcggcctcatcgttgttcttggcggtggaagcccaatcccaagcggcggcacccttctcgagctcggcacgagcctcgtccagggtcagccaggtggcagcaggctgcttgccggcgatgatggcgttgatcttgttggtggacttgtagcacttctcggcgatggccagcagcatgttcgcatcggtggcgaagtagatgccgatgacgtggtcattgtggaagcacttgttcagcaggacggaggtgacacccgggtcctggtgggagaagccgttgtggtcctgacgccaaacgtgggaggagaccagcaggttcatggaggcgatcggcttgcgccacggaatctcgcggacg

SEQ ID NO: 736 - DNA, 17013 bp, Unknown
  R14_15m  MAG No. k141_50760
ttcaagctcatcacgtcccgcaagcccgctgatttggactacttcgtggacgcaatcaaggatgcgctgaagtaactaccgctccttagcggccaactgcccgcaggcaccgtcaatgtcctggccgcgggtgtcacgcagtgtggcggtgatgcccgcgcggtgcaggatctccaggaaccgctgttcgtctcccggcttggaggcggtccacttcgagccctcgatggggttgagcggaatcgggttgacgtgggcccagttgtcgccgtaatggttaagcctcttggccagcaactgcgcatgctcggcctggtcgttgatgccgcgcatcagcgcgtattcgatactgacgcggcgcttggaggccagccaataatcgtgcgcggcatccaacacctgcgtggtgttgaaacgcttgttcatcggcaccagctcgtcacgcagttcgtcgctgggggcatgcagggaaacggccagacgcacgggaatgccttcggcagtgagcttcttgatgccgggcaccacgcccaccgtggatacggtgatgttgcgcgcggaaatgccgaagccttcgggaggcatgacggaaatctgtcgtacggcggacagcacggagttgtagttgcccatcggctcgcccatgcccatgaacacgatgttgctcaggcggccctctcccccggccacttcgccgtcacgcatcattttggcggccacacgcacctgttcgattatttcaccggtggacatgttacgggtcaggccaagcttgccggtggcgcagaacgggcagcccatgccgcagccgacctgcgaggaaatgcacagcgtggtgcgggtcgggtatcgcataagcaccgattcgatgagggagccgtcgaacagcttccacaaggtcttgatggtggtgccttcgtccgccacttggcgggtcacctcggtgatgagctgcgggaagaacgcggcggcggcctcgctgcgcttggctgccggaaaatcagtgaattcggcggcattcacatcgaaatggccaaagtaatggttggcgagctgcttgactcggaacttcggcaatccgagttcggccgctttctcgatgcgctgctcgggcgtcatatccacaaagtgcagcggcggcttgccacggcgggcatggtccttggatagcacgtcacggaaggcacctgatgtgccgccgggagtaatgccggtttccggagtgtcaggatgctgtgtggtcatgatgggttcgcttcgctctcaatatcagaaaatagtcaaacatgcaatagaaatatcagaatccaccatacggcgtgccgcatacgaatcagatggcccatgtcttagcccatggcgaacgcatattgaacgatgatttcccccatatatgacatgtggcaccgtgcgatatacacacgatgccacattgttcatgcacgaggcatgcgaatcacagtccggtgacccacagcaaggcgcaggtgaacggtgcactcatcaaaatggaatccacacgatccatcacaccgccgtgtcccttgagcagatggcccatgtctttgatgccgatatcgcgcttgagcatggaagcacacaaatcaccgaacgtgcccacggcgccgatgagaatacccgccacgatcggcacccaccaacgagtggcccatttcgaggcatcatacgtgcatgcgaatacggcgaatgcgccagccatggcgaagagcatcgagccgatcaggccctcaacggacttcttcggcgagatacgcgggctgagcttgtgcttgccgagccaggcaccggcaaacaaaccacccgtatcggagagggcgggcaggaacaccagcatgatggcgtgtgcaatcggatgcccattgaaagtcagcgagatgatgatgcagctggccagcaacggaatgtacaacacggtaagcacggacacagccacatggctgagccgggaatgatgctgttccccgccctcatgattgaacgaggattcgaggcgcgcgctggcatccgtgttggacagtttgccggcaaccgccagagataggcggttgccgacgctgatttttgcgctggccgcgatggcgaccagaataatcgacacgatgatactcagcgacatcgtgatgagatggtacggggaataataggtggcgatgagggtgaaggacgcgcacagccacagcatgaacaccgggatgtgcaggcctacggtggcgaagtccaccctgagctcccacagcgccagaatcatgaacacgactaccagcagcacgaagaggtcgacgctgagcagcaggcacgcgacaataaggatgaccagtgccgcgcctgtggcgatggcctgcggcatgttgcggccggtcttcttgttgatccggtcgagcgtctcctcggcctcttcatggagttgttcgttgcgttccataattctccggacctggtctgaatcagacctccatgatctccttctgcttggtctccagcagagtatcgatctcgtcggtaacggacttggtgaccttgtcaagatccttcagcaggcgatcgccttcgtcctcacccatctcgccgtccttgacggccttgtcgatggtttccttggtcttacggcgaatgttgcgcacggcgaccttgccgtcctcggccttgcccttggcgagcttgacgtactccttacgacggtcctcggtgagttccggcatggtcaggcggatgacgttgccatcacggttcgggctgatgccgaggtcggagttgcgcagggccttttcgacggcaccggcctgggaagcgtcaaacggggtgacggacagggtgcgcggttcgggaacgccgatggaggcgacggccttaatcggggtgggggcaccatagtagtccacggtgatgccgttgagcagggccgggtttgcgcgaccggtgcggatgccggagaagttttccttggtgttttccacggtcctggccatctgttccttggcctggtcgataagagacatattcactccttgtgtgttggtgttcgtctgtgttgttcgtctatgaacgtttgattcgattgtaggcgtttgcggcttactcggccacgcgcgattcggcggtggagaccagcgtaccgatttcatcgccgacgagggcgcgggtcacgttgcccggctcttcgaggccgaagacgcggatgcgcttcttgttgtcgcgggccatggacagtgcggaggcgtccatgactgccagattgtccacgagggcgcgattgtagctcagggtttcaaaacgcttggcgttctcgtccctgcgcgggtcggcggtgtagacgccgtcgacgccgttcttacccataagcacttcgtcgcagtggatttcgagggaacgctggatggaaaccgtgtcggtggagaagtacggcatgccggcaccggcgccgaaaatcaccacgcgacccttttcaaggtgacggatggccttgagcggaatatacggctcggcgacctgtcccatggtgatggcggtctgcacgcgggtggcctgaccctcctgctccaggaagtcctgcagggcgaggcagttcatcaccgtgccgagcatacccatgtagtcgccgcgggaacgatcgataccggcctgctgcagttcggcaccgcggaagaagttgccgccgccgaccacgatggccacctgcacaccctgttgtacggccggaacgatttcctcggcaatgcgacgaatcacatgggtatcgatgccgaccttgccaccaccgaatgcttcgccggacaacttgagcagaactctgcgcggcttgtcgctatcagtcatatcatgcctttctcaaaaccgaaagtgcgaaattatccgtagacaagcgtatcggtttacgacgacaccccctagcaacgacacccttggaatagcgaaacgccatccgattattgaataaccggatggcgtttcgttgaaattacgctaagcgcgtggagtaagccttaggctcactcctcttcgcccttgccgacctcgacacgagcgaatgcggtggcgttgccaccgacttccttgaacaggtcgccgacggtcttggacgggtccttgacgaacggctgctcgagcagcacgacttccttgaagaaagcgttgagacggccttcgacgatcttcggaacgatcttctccggcttgccctcggccagggacttctcggtggccacgcgacgctcggactcgaccacatcggccggaacgtcctcgcgggtcagccacttagcgcccatggcggagatctgcagagcagcttcgtgagccacggcggcgccggccttgtcggtggcgatcatggcgacgatgctcggcggcatctcggcggacttcttgtgagcgtagacttcgacgtgctcgccggagatcttggcgaactggccgaccttgacatgctcaccgaacagggcggcggcctcctcgacagccagcttgacggtggtgtcgccagccttggcctcgagcagctcgtcagcggagttggcgtcggcgtccacggcgtagccgagaacttcctcggtgaactcgacgaacttcggggtcttggccacgaagtcagtctcggagttcagctcgacggcgtagccggtctcgccattggcggtctcgacgaccttggaggcgatggtgccttcctgagccttacggccttcacgcttgccggctgcggcgatacccttggcgcggatgatttccttggcgcgggcgacgtcgccttcggcttcggtcagagccttcttgacgtcgagcatgccggcgccggtgtcttcacgaacctgcttgatcagtgcggcggtaattgctgccattgattattctccttgagaaattttgcttacccatgaacgatgggaagcgcttattcaggcacttcccatcgtagagcatcactcggccttgggggcctcggcggtttcgccctcggcggcagccggagcggcggcttcagcggaagcctcggcaggagcctcgttggtcaggagttccttctcccaagcggccatcggctgctcggcggcttcgccctcggccttgttggcgccggagcgctccagcagaccttcggcgacggcgtcagccatcaggctggtcagcagttcgatgccgcggatggcgtcatcgttggccgggatcgggtactcaacggtgtccgggtcggcgttggtgtcgacgatggcgacaaccgggatacccagcttgtgagcttcctcaacagccaaggcctccttggtgatgtcgacgacgaacatcgcggacggggtgcggttcatgttgcggataccgcccagctgcctgttgagcttgtccttctcgcgctcgagcaggaggagctccttcttggtcaggccggagccgtgcacgtcggtgaagtccatttcctcaagttccttgaggcggttgacgcgcttggagacggtctggaagttggtcagcatgccgccgagccaacgctcggagacgtaaggcatgttcacgcgggtggcctggttggcgatagcttcctgagcctgcttcttggtgccgacgaagagcacggtgccgttgtgggccacggtggtcttgatgaagtcgtacgccttgtcgatcatgtcgagcgacttgaacaggttgatgatgtggatgccgttgcgctgggtgaggatgaactgcttcatcttcgggttccaacgacgggtctggtggccgaagtgcaggccagccttcagcatatcgctcatagtgatctgagccatggtattactacctttcattgtcggttcttgcctggccatgcgcacctgcgtgcagctgctcccccggtttcacgagttgtgcagccgaccgacacaggccgtcgcgagcatgacgcgaatttgttgtgtgccggttgacaatattgggtggttccggacgccagcgactgcgtccgttgccgggtggcacacaagtttcaaggatagcacggagccggtactaagaaaaacaggctcccctctctgaggggagcctgtcgccgtaggcgactgaggggagttacgggcggtaccggcagaaccaccctcagtctcactacgttcggcggctcccgccagcgggagccgggtatggactacttcgcctgacgattgcgcatgtaccgcagggcttcgcggcgttcttccttttccaggcgatccaaatacacgtggccgtcgagatggtcgcattcgtgctgaagcatacggcccatcagcccggagccctcgagcacgacctcgttgccgtccaggtcgatgccacgcacgcgagcgtagtcggcccgacgggtcttgtaccacaagccgggcacggacagacaaccttcatcgccatactgctcgccggacttctcctcgagtacggggttcagaacgtagccgaccttgccgtcgatgttgtaggagaaggccctcaggctcacgccgatctggttggcggacaggcccgctcggcccggatcgtccacggtttccagcaggtcgtcaaccaggcggcgcacggccggggtgatttccttgatctcatcgcagggggtgcgtaggactgggtcgggcacgaccctgatctcacggatggccacttctcgttactcctcgttcttctcgtcagccggccggtccggcttgctgccggtgtcagcggcattgtcggcattgtcggcggaatcgccggtctcgccctcttcgggttcggccttcgacttcttgatcttctccgacacgctagcaatcgaatcagacacgctggttttcatctgttccgaggcctgtttgacctgttcggacgcctgcttgaccgattcggaggatttcttgacggtctccagcgtgctgtcgatgatcttggctgtggcgggcagcggtttgttggatggcttgggcgcatacagatcctcttcgatgacggtggcgtagcgctgcaataccttgggacgcaccactttcatgctcggggtgagcgtgccgtgctcctgactgaattcctcatccagcaccgcgaatttgcgcacggactcagcgcgggagacattggcgttggcctggtcgatgtactgctggataaaggcacgcaccgcgtcgttgtcgctggcctcggcgagtgtcatgtcggcattgaggccctgaccttccagccaggaatgcagcatttcggggtcgagctcgataagtgcggacacgaacggcttgccgtcgccgactactactgcatgagccacgatcgggcaggtgtcgatgacatcctccatcggggcggggctgatgttcttgccgccggcggtgatgatgatgtccttcttgcgtccggtaatgaaggtgaagccgcggtcgtcgatacgacccagatcgccggttttgatccagccgtcggcagtcatcgtctgtgcggtgagttcgggctgcttgtagtagccaaggaacacgttcgggccggtcagctcaatttcatcgtcttcgccaagacgcacgcccatgccaggcccaggcttgccgaccgaaccgacctcgttgtcgtcctcccaattgacgagcatcggagcggcggtttcggtcatgccataaccctggatgaaggtgatgtcatccatgccgttgaagaagtgggccaaatccacgttgagcggcgcaccaccgcaggccagccatttgaggttcggtccgagagcggaacgaatggatttgcccaccgtggccatgtagaacgaatggcgcatgcgctcgatgaacgaatggccgcggccggcctgctcatccttgctccacttgacgaagtgcttgaccgactgggcgaagatatgcccctggatgccggcaccagccttctgcgaggccgcgttatacaccttctcgaacacacgtggcacgcccagcaggtaggtgggcttgaagctgcggatatcggcgagcagtcgcttggcgtcgggaatgtatccgaccacgccgcagccaccgatgcacacgtactggatgtagcgggcgaagcagtgcgccagtggcaggaacagcagcagacggttgtcgtcgtacagcatgccacgcagaatctcgtagccgttaagcacgatgtgcgtgtaattgcggttggagagcatcgcgcccttgggcttgccggtggaaccggaggtgtagaccacggtaagcagatcatcggctttgatacgagcgatagccgcatccaacgtctcatcggatacgccatgcccgaagtcagcgacagcgtcaaggccatcggccttgaaattgaacacgtatttcatgcccggatgattgacacggatctgctcaagcgtctgtgcgcgctggaagtcgccggcaaaggcgatggcgggatcgacttcctcgacgatgcccgcggtctgacgggcggaatcggtctcatagacgggcacaaccacagcgccgattgccgcgcaagcgaaatcagccacaccccactcatagcaggtaggcgagtaaatcagcaccatggtgccggctttgacgccaagtcccaacaggcccttggccacctcgcgtacgcgggacagcatttcagtagctgtggcgccgcgccattggtgggtgttgtcatcctgccattccgcgatgatgtcatccggcgtgcgagctgctcgtttggccagcagcgagtagacggtgtcgtcatcggtggtgacatatctgggttcttctacatgttcacgcatggtcactactataggcgaaccagcctatgacacggcagaaccgtcttccgctgccagcgtaggaatcggtgtgagggaggggccgtctggtcagcccagatcggcatagatgcacatccatcgagaaccgatgaacttcagtttgaggttgactcgcagattttcctggccgatggtcatgaataccgccatttccagcgtgtccttgccggtgatcatgccgtcgatcaatgtggggacagtgggcagatagcagaatttcgctttgagctccggatgagtgaccatgtgggtgccgagcaggtattgcatggtttgcagccgttccaggcatggttttgtcatggctctgttgagatgtgcgacgctgagtctgccacgtatcgcgtccgccgatgtgcaggcgatgcggcatgcagccatggccatggaatgacattccttcgcattcagcccgcctatgaatgtgggttggatatgataccgcaccgggcgatccgacagctccacaacgatgaatccgtcataactcggcaacggcccgtactgatatgtgccgtggaaaaatcccgaatactccatgatgaccccttcaagcccccttgcaactcaccatcatcggcgagcgtttgtactacaacatcacgaaaggcgcgccaagtcaaacgacttgagcgcgccttagggcaagctaagcctcctgcatggagggcaaacccccattttcagggggggtaatcgggattatcgtgcggaatacgggttgaccaccatgccgcaacgctggaagttcttcacgtcgacgtagccggtggaggccatagcgcgcttgagggcgccgatgaagttggtcttgccgtccgcctggtggctcggtccgaacagcacctgttcgagcgggccgaccgtgccgaccgtggtgcggtagccgcgcggcagcgtctggtggcgggcttcggaaccccagtgggtgcccttgccgggggcctcggtggcgcgggccagcggcgcgccgagcatgaccgcgtcggcgccgagggccagggccttgacgaagctgccggagtcgcccatgccgccgtcggcgatgacctgcacgtagcggccgccggattcgtccatgtagtcgcggcgggcctcggccacgtcggcgatggcggtggccatcggggcctgcacgccgatggtctggcgggtggcggagaccgcgccgccgccgaagccgacgagcacgccggccgcgccggtgcgcatcaggtgcagggcagcggtgtagttggatgcgccgccgacgatgacgggcacgtcaaggtcgtagatgaacttcttgaggttcagcggttcctgaccggaggagacgtgctcggcggagaccacagtgccgcggatcacgaacaggtccacgcccgcgtccaccacggtggagtagaactgctgggtgcgctgcggggagagcgcgccggccacggtgacaccggcggcgcgaatctcgtgcagacgttgcgtgatgagctccggcttgaccggctcggcatagatctgctggatacgctcggtggcctgatcggccggcagcccggcgatttcgtccagcagcggggtcgggtcctcgtaacgggtccacagaccttccaaatcgagcacgccgagcgcgcccatcttacccatggcgatggcggtggccgggctggtcaccgaatccataggggcgccgatcaccggcacatcgaactcataggcgtcgatctgccaagaggtggagacgtcctcggggtcgcgggtgcgacgggaggggacgatcgccacatcgtcgagtgcgtagccgagacggccctttttgcccaaaccgatttcaatttcctgagacatggttgtaagcctattgcccgggtgggacgccaacaaggtcgtttcccacggaccggacgattgcttcaagtcgttacaaacatgcgctatgactaaatcatcttcacaccatctatcaggaggaagcatggccaaaatcaaggtcgaaggcactgtcgtcgaactcgacggcgacgagatgacccgcgtgatctggaaggacatcaaggatcgcctgatcctgccgtacctcgacgtgaacctcgactactacgatctgggcatcgagcaccgcgacgagaccgatgaccaggtgaccatcgacgccgcccacgccatccagaagcaccatgtcggcgtcaagtgcgccaccatcacccccgatgaggcccgagtcaaggaattcggtctcaagaagatgtggaagtcccccaacggcaccattcgcaacatcctgggcggcacgatcttccgcgagcctatcgtgatgagcaacgtgcctcgtctggtgcccggctggaccaagccgatcgtcgtggcccgtcacgcattcggcgaccagtccaaggccaccgatttccaggttccgggcgccggccagctgaccgtccccttcactccggacgatggctccgagccgattcagcacgtggtctacaactacggcgaagacggcggcgtggcccaggtgcagtacaacgtcaacgattcgatccgcggtttcgctcgtgcctgcttcaactacggcctgatgcgtcattacccggtgtacctgtccaccaagaacacgattttgaaggcctacgacggccaattcaaggacatcttcgctgaggtgttcgagaccgaatacaaggacaagtacgccgaggccggcctgacttacgagcaccgcctgatcgacgacatggtggccagctccctgaagtggcacggcggttacatctgggcctgcaagaactacgatggcgatgtgcagtccgactccgtggcccagggcttcggttcgctgggcctcatgacctccgtgctcatgaccccggacggccagaccgtcgaggccgaagcggcgcacggcaccgtgacccgtcactaccgccgctggaagaagggcgagaagacctccaccaacccgatcgcctccatcttcgcgtggaccggcggcctcaagcaccgcgccgatctggacggcacgcccgaagtccgtcacttcgccgagacgctggaaaaggtcatcgtcgacaccgttgaaggtggtcagatgaccaaggatctggccatgctcatcggcccggacgaaccgtggctcgacaccgacggcttcatgaacgcgctggacgagaacctggccaaggctctggccgagtaaatcatcgaacacatcgtgcggacctacatgggtcatgtcatgtcgccaactgtcatgattgtcgtgcttcatctggaatgttcctcagcacgacaatcatgacagttgttcgatacacgcgcgaaatacccctaattgttcccggatatgtggcgatttgtccactggtccgggactttttcgtatacggcctactagaatcgtgattcagtttgttttcacgcccgcttgaggaggtttcgccgcttatggtgttcgcacgccgctcaaccaccctgctcgccgccattgtcgcatcctgcgcgatggtgctgtcactgaccgcgtgcacctcagacaataagaccgttgtagatggtcaaaccacggtgacgtccaattctgccggcggcgtggccgtgttcacgccttcggacggcattacgctgaatcagcagacgccactgaacaaatgggcgaagctggtgcccgacctaaccaaggccctggtcgacgccggtttcaagaaaggcgatatcgatcatacgacgtccgactcgttggacaagcaaagccgcgccatccaagactttgtggtcgatcatctttcgaataacaccacggacgattccggcattgccatcgcgcccgacaacatgacattgctcgtggctccagtagtcgaggccgacgcttccactcgccaatacggcgattacatcagccagaacctgagcaccaacgatgccacggatgagggagctacttctgacggtgattcttccgaagacagctcttccaaagatgactcgtccaacactgagagcgacggcactgcatcggacgagcaggcgcaggccgtggaccggctggtctcatcgctcaagctggccaaggaatccggcatgcatgtggtattgctcggcaacagcatcgaggggtataggccggacgccttcgtcaagttctcggacgcccagaccatcggcaagctacaggcggaaaagatggtgtccaaactcaagttggataaggccagtaaagacaaccccaaatacattgaggtgctgctgccatacaccgccgtggacgaaaaaggcaacgccaacgattccacgttcgcccaagaggcgttccgtggtatctggcaggtactgggctcctactatcagaagggcgttgtggaaagcccttcaggcaccttggacggcaaatccacggaaaacgattggcaagccgtggcctacgatgccgccaaggaaggctccactgcgaaagtgcttgacaagcgtctggcaaaaaccgacgggcagtccacactcacccgtattgacggcatcatcacgatgaacgactatatcgcctccgaggtcgtcaaggaattggacgatctgggatacaccggctctgccgccgatatcaatccgcagatcaccatctcgggcattgtcggcaatatcaccggcaagaaggatctcagccgcgacgcagtgccggacccgatcaaatcccctgaaaacgacaacgcaaacgactcatccagttccgatgacgatgcggataaggacacctccgcttccgacaaggaccgtgactcgcaatggcctctggtgaccggatacggcgcgtacgtctcgaacatcccatccatcgtcaatggcaagcaatggatgaccggcatggaagacagacagaccatcgccacggatatcgctcaggcctgcgccaggctcaacaagaacgaagcgctgaattccatgccttcaatcaggaactccgaggtaggcggcgtgaagaagatcccgaccatcaacgaaccgttgctggctgtcagcgccagcaatctcaagtccgcgctgatcgcccccggatatatctccttggccgatgccggtctgtgattcatactcgtcacgccgctagccgcctgcgatgcctcttccgtacagccctgttccggccgacaaacattgctgaatcatgacggcttcagtacgatttttcgactccccgcatattgctgtgggtcaagatagtcggccgttcctcgcttgaggccccaatgcaggcaacggtcttcgcaatggtccgagttgccctcaacgatgcctacgggctgtctgcgggagatcgtatcccccaccgagagctcggtaacagccggttcgaatgtcgacgtgacacctccacgatgccgtacactcaccacatctttgccagctactttgccagcaaaactcacggtccctgcctgtggtgacagaatcacggtaccttgctccgcagcaagatccacgccacgatgacctggtgcccacgggttgatcggccgctcgaactgttgttcgacctgtggatcgtcgaccggccagtcgaaccgggattcgcactgattgccattgcgccacgccagatcagacatatcggtgaaatcctccaccgtgtatgccgcatctccggtcaccgcagtatccgcatgcgcaacatgctgaggcgtggatgccagtcccactcccaaggcaagcagcaggccgataacggcggccaacgcgattatggcatccatacgccgttgccgttcctgagcccgctgacgcgcctgctgacgccgcctgccggcacgtcgggcttcgtcgcgacgccaatcaaacaacaatggtgcattcatgagattcctccccatagtgtgagtgtgatgtgattccggcttctttgccggtgatacccaccttgaggggtccgaaacaggatgtccagccagaacgacctatgtggttccagcttccgaagttatccacaatgaaatttcgcgtgacagtatcgccgcatcgtcatcatgttgtatgagtgggtattcgatgagtccgattctgcggaattcggcgcgacatgccctacacgcatgtaatttgctttttcgtggcaagcatgtaagatatgtgacttgtgcgcgagagaaatctcaaacacagcagacattcctgcgtagctcagttggcagagcatccgactgttaatcggacggtcactggttcaagcccagtcgcaggagctcacctgaacgggtaactccggacgggatgaaaattgaatattcctgcgtagctcagttggcagagcatccgactgttaatcggacggtcactggttcaagcccagtcgcaggagccatcgaaagcctcggttctccgaggcttttttattttcatcgcattggtgaccagacatgacaccccatcatcaaccgggaaatccatggcgaagacctcaccactactcacatcaggcagacaggtcactgtcaattcaccgatgagaggcacggtattcccagtatcagtctgggaataccgtgcaaatcttacatcgagaccttggtcaggggcatggcggagtcgatcgggaagtcgggggcgctgggggccacgccggcttcgaccaggttcacgccgagcatggcgaccatggcaccgttgtcggtgcagagcttgatttgcgggatacggacgtcgacgccgtagttctcgccgaattcgagcagtttggcgcgcagctgcgagttggcggagaagccgccgcccacgatcagcgtgttggaatcgtactgccggcagccgcgcatggccttacgggctagcacggtggccacggagtcggccagggatgcgcacacgtcgtccaccggaatctcatggccggcggcctgctcgctttccacccaacgggccacggcggtcttgacaccggagaaactgaaatcatacgggtgcgcggcaccggccttgccttgggtcagacccatcggcaccttgatggcgtgcgggtcgccgttttgtccgtggcggtcgatgtgcgggccgcccggatacgggaagccgagcagacgggcgactttgtcgaagcactcccccgccgcgtcatccagcgtggtgcccaccacatcgatcttgcgcggcatgtcctccacatgcagcagcgaggtgtggccgccggagacaatcagagccagcgtgtccttggggaacgggccgaactgcagctgagtgacggcgatgtgcccgatcacatggttgatgccgtaaatcggcttgttcgcagcccaggccagcgccttggcgccggacacgcccacggccaggcaaccggccagtccaggaccggcggacacggcgatggcgtccacatccgccaacgtcatgttcgcgtcggcgagcgccttggacacgcatggcacgaaggcctcagcgtgcgcacgggaggcgatttcggggatcacgccgccgtatcgcgcgtgttcctccatggatgaggccacgacgttggagagcagttcgcggccgcgtacgatggcagccgcggtttcgtcgcaggtggattcaatgcccagtacaaccggttcgctcatcgtgcttctccgttcttctccgtttgcttgccagtgatgtcttcagtgtccgccgatgccgtctgcggggcggcaaagcccacgaccctaggtttcaggtccaagctcatggtgtatgcgtcgatgccttcaggctggtagtagcgtttgcgcaaacccatgcgttcgaatccgaaccggtgatacagggccagcgcagggtcgttatccacacgcacttcgagcagcatgcgcgaggcgccctgacgcttcgcctcgtcgaccagtgcctgaagcaacgcaacggcgatgccttgccgctggtatgccttgcccacgccgatggtcatgagctcggcgtcctcgccgtcgtaccagaagccggcgtagccgcgaacaacagtctgttccgtctcgccaaacacgtcgagcagatatgtgcgggtgggtgcatccagttcctcgcgcaccatgttctcgttccacgcgccacgaccgaacagttcgccttccaactgtgcgatggagtgaaccgcaagatcacgacttacggcagtgatatcaacaatcatcgaatcaacccgtctcacgccttatcggcgccggcatggccgagcacgtgcttcagcgggttcggcacttcggcgtccggccggcgcaggtacaacggttcgaccggcgtatcgggattacggttggcaa

SEQ ID NO: 737 - DNA, 10892 bp, Unknown
  R14_15m  MAG No. k141_50972
cgagcaggcatggaccgcgttcatccagtgcaagcgcgtcaagaccggcgaacacatcgccaaccggttcgacgaaacactcaacggcaccagccgcccgtccaaccaggtcgagacgcacacgcccgacatgaccccgagcctgaagatcgagaaatgggacgaggcctccggctggccgaccggcgaccgcgaccaggtcaaggacgcattggccatgcagggcgacacgcgcatcgtgttcaccatcaccaacaccagcaccaccgaccccgacaccaagcagggcgcatggtaccgaaccaaggacctgaacctcaaggaccaactggtcgccggcgacggccgggtgaccgatctcgaatatcccgccgattgggacagccgtgtcctcaagcccggcgagagcgtcgaggtcaagggcatcctcaagggcgtgaccgatcatcacaccgaccgcgccacggtcaccggcacgccgctggtcgaatgcgtcgtctccgacccggatccgttcgacggcaaggacgagacgtccgcacccgatgacgcggtcacgatcgacggcaggctcgtctgccccgacaccgaagtggtcagcaacaccgacgactggaacggctaccggaccgggctcgcccataccggcgccgccatccagggcgtgatcgcagcggcaatcaccctgctcgccgtcggcgtgggactggtcgccgcccgccggttcagacacgggaacagtgctggcggccgtcactcagaatcggcgcagtccagcgatatcgcggataccgatgaggatgtcgccgagactacggatgagattccttacgaatcgtccgtgatctgacccggacgtcggacctgcttcccgtcatgatagttcttccagtcggagtatcttacgattggaagaactatcatgtattcatcaaattattacggattacaattgatgtttcttttggcgcgacgaaagaaggaaacattctattagaatagagtcatttacattaaataattgcgcagttacgattcgaacgacttgagtggtgggtgggttgtcatctatagatgacaacccacccaaggtctttttgtttgtagttggatttcttactgcttgtcggtttcctcggaggcgaggcgcgcttcgagctgttcgacgatgtggtcgtgcatgttctcgtcgatcttgacggtcaggaggaagacgacgaggctggcgacgatgccggcgagcggcaggtagtaggcgcaggtcttgaacgtgcggatgtcctcgggatagtcatgtgtgcccatgatgctgcccacgccgccgagaaacgcgatgcgtctacggcccgccgcaatcatcgcgtccagggcgtccaacatcgtctgcgacagatcgggccgtacggagtcgaacaggtgcggtgccggattcgtgtcgatgcacacgccatgcgggagtgccgcatgcagggcgcgcaggtccgcttcaggaaacaccgtggcatccacggtgatgaacccatcgaactccgccgcgcgttccgtcagctcgcgtatggaccggatgaacgtgggctggtccaattccatcgactccgcacactccgcaagaaccttccgcagatcggagaagtatgcgtcctgcagcttctccccggatggaggagcgtccagcacagcaatcgcgggacggaacacgttgcggtatcccagctcctcgcatacgcgcagcacgcgccgtcgcgtctcctccttgatggagaacgatgggtcgttcagcaagcgcgacaccgtgctctgtgacaccccggcccgttccgcgacctccttgagcgtggccatgacatcctccccgcaaactttagtaaaggttttactacagcataacccgggatttgcaagatgacggattctcctactcaggaaatgacctacaactgataaacttcaagcgtcccgacaaaggggcaatgcatagagggcgggcgtgtcattgaaaaacatgctcgccctttaatcaaggcttatggcagtctgaactggcacccctcatgctcattgtctgtttttgaagaagacgaagagttggttgtcgtgtatggcggtgatggcgatggcagctccgatttgcgcggcgatgagggctgcggtgagtgcgggaagctggatggtggtcagggtgagtgcgttggcgtgtccgctggtccagcgtgccgtggtgtaggtgatggcggtggcggtgaggatggcgggcagggtccatgcgagggtttcgagcgcgttggtggcgaggatgccttggcggggcatgcccatgtgcaggtcgtcggctatttcgatgcgtcgcgcgcgcgtggccatgatggcgatggcgaacgcggcgatgggggtgatggcgagcatgctgcgggtggttcgctgccggtagcgggtgtcgaggtcggggttggtgccgagcatggtgttggcttgtttggtttgggtggcgggcgcggctccgggtatggcggtcgcggtggtgttgagcaggtcttcggcgtcggggtttgcggggttgatggtggcccagcattcgtcccattgctggccggcgttgatgggtgtgggggtgatgatcgcgtaggcgagtcgttggtcgcggctgtcgtcggcccaggggaagaccgcgctgatgtgcatggtgccctgggttgtgggcaggtcgtctccttcgcgcgcgtggagggtggcggcgagttggctggagatccatacgccgggttgggtttgctctcttgctccaacgccgagcacgttagcgagtcccggtgtcgcctgccaggcgtccagtggggccgcgggcatggcggtcagggtgatttccccgttgcttttgagcgcaccggccgcttggatgggattcgtggtggtgccgcctgtggtgccggtggtttgggtgaggtttgcgcaggtggtcgggtcgatctgcttgctgccggagatgatgtggatggcggcggcgctggtggcccattgccgtgattcgtgttggagggaagtaatggcggtcaggtcgaatacggcggttcctgctgcgatgagggtgaggatgccggcgcaggcgagggcacgtgtagtgccggtggcgacgttgcgccatacttcggacaggatggcggtcggtttcatcgtgtgtcgtccttggtgtcgatgttggggttcggattgtgccacgcgaggtcgatgacgcgggtgcacgcggcccgggtgttggagtcgtgggtggctatgacgacgatcgcgtcgccttgcgcgagtccggtgagggtggaatcgatgtcgttggcggtgcgctggtcgagttgggcggtgggttcgtccacgaggaggaggtcgggtttgctggcgatggcacgggcgagcatgagacgctgtgcttcgcctccggatagttcccggaactcgcgtgcggcgactttggtcaggtggaacgtgctcatgatggcgatggcttcgtcttcggcctgcgtgcggtcgatgccctggccgaggagtggttggacgacgtggtcgatggcggtgcgccgtggcatgccgtgggggttctggaacacccagcgcacgcggttgacccggctgcgtcggatggttccttcggcgggcggctcgaagccggcgatgatggacaggagggtggatttgccagagccggacggcccgcacaggccgacggcctcgccggtcgtgagggtgaagtcaaggtcgcggaacagccaggggccgtccgcgaaccggtggcccacgtgctcgcccgtgaccgacggtattccgccggccgcgggccgcgcggagtcgattggccgtgtcggcacggggtccgcgaccgtttcgaggggcaggatgctggtgctcatgcgcgtcctccttgtgtcagtgctgcattgcggcggggcattggatgtcgtcgagtttgtggccgagggcgactttgccgattgtcgcgtcggcttgttcgggttggatgagcgtggcgccgagggcggagccgatgacggtgacggggatagcctgtttgccgtcgggcgagacacaggcgcgggtgccgttctggccggtgatggcggagggcgggaccttgatcgcgtcgatgggttgttcgagcgcgagggtggcggttggtttcttgccgccttggtcggcgagggtggtcttgtagccgtcgctggcctggatctggtcgaggaatttctggtcgctgatcctgccgtcggtcttgtcgaggctggtcttgacgccgaagagcgtgaacgtgcgtttgccttctctcaggttcgccggcgtggggaaggtgatggccgtcagttggccgccggtcttcatgatttcggcaccgtccgtcaggttggtgttcagtccggccgtgcattgggttggtgtggcggtggtctggggcagccatgccacgtcggtcggtccgatcctgccgtcggggttgcgatcgccggcctgcgagagcagctggttgacgccgtccttggtgcgccacccgtaggtgccgttgccttcggcgttgtagccgaggcgggcgagttcctgttgcagggcgagcacgtcgggcccggtgtcgccggtgccgatctcgcggtagaggggcgtgtcggtgtgcagggcgatgacgggtttgccgtccacggacagcagtcgtttgccggattcgaccgcttggccgggcatgcacagggtttcgctgacggtgccggcggcgcgcgaggtgagcgattgttccgcgctggtctcgaacgaggcctcgacggtccgttcgtcgtcgaactgctggcggctggccgtgacggtgtcggggctcgtggccgcggacagtccgtcgggtgtgggcgtggggatgacgagcgcggtgacgagcacgcccgcggacagcatccccaggccggtcaggatcagcggggtcaggattcgtgttttcatgtggtcgtttcctttcgtcggatgcttgttcgtcagccgatgttgacggcaaggccggctccggtgaagcatgactgggcggcgtccgacgaggcgtcgaacggcagtcctttggacgctccgtccccgttcaacgcgttttcgagtttgcgtccggtgtaggcgtcatcgacgaggctgcttttcttcaggcattccacggcggtctcgtacgggtcggccaggaggcccgggttgccctgctggagctggtagagggattcgatgatcttgctggtaccctcggagcaggtgttggatgcctccatgtacttgttcacttcggcgtcggtcgatggcaccggcgtcacaccggtggtctggtagagtccgttggacagtttgcgggtctgttcctgccacccgttctcggccatgcacgcggtctgtttgtcgtgcgcggtctcgtagtcctcggcgctgatcttgccggtcttcttggcccgttggagcacgtcgcgctcgaactggctgagtgtgtccttggcgaggtactggtcgaacagggcgctcatgctcggcgcgattctggtgccggatgtctgcgcgtcgtcggccgtgttctggttccagggcgttgagcatgccgtcagcgagacgagcagtcccatgcaggacagcagcgcggcggccctgcgcagcgtttcttggcggaggatggatgatgtgctggtggtcatggtggtttccccttccatcggctggtgcggtctgtttacttggtgttgaagtcgggatcgtggtagtcgggcaccttggcttggcattccttgatggccttgtcccggtcaccgtccgtggaccccgaggacaccgagccggagccgtcgccggtccattggagcacgacccagttgccgtccatgatctgcgcgggcactcccgccgccgtgagacagtcgcggtatcgttcggcggcctgtttcgaggccgggttcgatccctgcggcgcgtcgccgccctggctgtcggtcttcggcgccgcgtcctgcgacgtcgtcgcggagggcgcgccggatgactgcgacgactgctgttggccgcatgccgacaatggcgcggccagcgcggcggccagcgccgcggccgccgacagtctgaatacggatgtggttcgcatgtgttcctcccttgcatgggttcgccgctgccggggcgatgctttggcccggcggttgccggacgatgcccattacagccggctctccgtgtgcgatgggtgcgtgtcgcgctcacctaacgcacacccacgccgagcacaatggagaacgcgaaggcaatcgcatgaaggccatgaatcggaatcggaggcaacgaaatatggcgaggatcctgatcgtcgaggacgacgccgacttgtcggccgtgctggacgactgtctcaggcacgaggggtacgcgaccggactggcaggcaccggcgtcgaggcgctggacctgctctcacggggggaatacgacgtgatgctcctcgaccgtgatctgcccgtgctctccggagacgaggtcatgcgcaccgcggacaggctgcgcatccccgtacgcacgctcatgctcaccgcggccggcagcatcgaggaccgcgtgcacggccttgacctcggagccgacgactacctgcccaaaccgttcgcctaccccgaactcctcgcccgcatccgcgcgctcctgcgccgaggcgacgccgacgacgcgcccaccgtgatctcacggggacggctgtccgtcgataccgtgagacggctcgcctacgcggacggccggcctctcgacctcgcaccccgcgaatactcgctcctggaggaactgctgcgcgccgacggcgggtggatcaacacccgcgcccttctcgaatccctgtggccgtccgaggcgcacgaccagcccgacctcgtcaagaccgccgtctactcgctacgacgcaaactgcccgacccctcgctcatcgcctcgtcgcgcggagagggataccgcataccatgaccgacaccgacacgaccaaccggccggccgggcacgccgcgcgcccgcgcaaacccgccagcttccgcatccgcctcgccgtcaccgtcggactgctcctgctcggcatgctcctcgccgtgatcctcgtacagaacatctcgctcgactgggcgttccagcatcaggtggacaccatctccacaggcagcaaccagaacaccatcacgacggaacctgccacgccccaggacggggttcccggcacggccgactcatgtaacgcggatccctgcgacgtgaccggtgccattctctctccgaccgccgggcagaccggcacggagggcgtggtgctcaccgtcagggacggcgtcgtgcaatggatgcgctacggatcgctcgccgtgttcgccgtatccgcgctcctggccgtgctcctcgtctggaacctgtcgggcaaactcaccgcacacctcgactccatcagccgccagaccggccaactcgaccccgaccatcccgccgggcgcatcagcctcgatcatcccgacgccgagaccgccggcctagccgacgcgctcaacacgatgctcgaccgcatcgagcaatccaacgaactgcaacgatcgttcatccgcaacgccagccacgaactgaaaacaccgatcacgaccatcggcaccagcctcgaagcgctcatggcccaggaccggttccccgaggacgtcaaaccagccatcagccacgccatcgaagcgaaccgcaaaagcagtgaactcatcaacagtctgctcgaactctcccgcatccagaccgtgcccgacaccagcacggaaaccgtggaccccgcccgcatcgtacgcgacacgctcgaaacccaccgcgaacaggcacaggcacgtcacctgcgcatcgacgccgacggactcgccgcataccacggccccttcatcgagacgaacccgcgctacctctcgctcgctgtggacaacctgatacgcaacgccatcatccacaacaccgaccacggcgccatcacctgcaccatccacgacgacaagcagcacgtcaccatcagcatcaccaacaccacaaaacagccggaccaccccgaagccacggccgacctcatccaaccattccaccgaggagacgcaacccgcatggccaaccaacctggccacggcctcggactatccatcaccaaagcctgcacagacgccatcggcgccagcctcaacatcagccgtcccacagccgatgtattccgcgccggaatcatgctaaatcgacatatcggcatgcccattagatgatttattcacgataagatatccttactcatactgactgattagtcaatgaatgcgaggatatcgatgaatagtgcggaacggagacgtagaacgcgcgaagccctgctcgaagccgcggctctcgaatttgaaacacagggatatgcgaagaccacattgcagggcgtcgctgaccgacttggtttgacgcgtggcacagtgctgttccattttcacacgaaggaagcattacgggatacgcttatccaatggtgcgatgagcgcctgtgcgcaaaagtgtcccaatgtagcggcagaagcgatttcgctcggattctcgccgcgattgctgacatgcactatgaagatgcgcgaatacgttccggattgctgctgcatgaagaaaaagcccgagcggagaacgcggggcacatgaagtgggaggaagcacttgaactagtcttgtttgggcagctcaacgacgcccatgacagcattaaggcaggagccctaatcgatatgtacatcgccgtcataaggtccgatcgatggaagaataagcagcagctccgtcaggctcttgatttctatctgtccctaaccggtctgagcaaagcggctgaactctctgataacaggctataagggaatcgtatggcaagaatcaacgattcttgttgactgactagtcagtcaatgcatattatgggagcaccaaccggaaaggttggacaacccaaggaggaaggaactcccatgaacaccaccgccaaaagcaaaatcggtctgctgggcaaagtcggagccgtcgccgcagctgcggcagccgtgatggctttcaccgttcctgccgctaacgcggccggaacctacgctctccatgccggcacggactatgccttggcccagacttggaccaacggaggaacccaaggtcgctcctatgcgcagcatggtaggcgcgtagcaagcaccgtgtggactctgcagtccagccgcgcatacgccgatgacgggtactcgaccagctatcacgctcaggtctggttccgctgaatttgactctatgaatcgaggaggcgagctttgctcgcctccttctttattcgtcctgatcaaaacggtctcaccgcacataaaggacaacgagaccattcttgtccgccgctattccgccggctttccctgacgatgggtgtcaacggagaccgttgcctgtcgggctccttgatcgtcatcagaggaggccgtcgtggatttgttgaatcaggtgcttcagttgttcgtcaggttcgccaccatcggcggtgggctgtggctggtgtggggcgccgtcacattcggcggcggcctgaaggatcataatgggccgcagacgcagtctggactgtggcagatcgtgggtggaggcatgatcatcgcggccgcgcagattttcaacgcggtggctctgggctgagctgattcggggcctgccatggaggacttcatcgtagccatgctcaacatgatcggcggcggaggtgccggttcgatcacggccgggctgttgtcccaggcgccggagacatggaatcccgctctttaccagttggcggtgaacgtgcatggagtcgccgtcaagcctctgacatcggtggtgctcgcggtcatgttcacgttggagctggcgcgcaactcgacgcgcattgaagcggatcgcgatctgggtgcgaagatcgtggccggcaccatgttcaagatcgcgttggtgttcatcgccgtgcagaacgccggtctgttcatcggcatgttcaaccgggtcacgcagttccttatgcagggcgtgtcctcgcagatgtcctttgaggtggcgggcgagggtggccagttgggcgatctgatgcgcgaccagatccgtgatgcaggtgtgatggggcaggcggcgttgttctttctgctggtgatcccgtggttgttgtcccagttggcgtcggtggtgttcacggtggtgctgtatgtgcggttcatcgagttgtatgcgttgacggcgtttcagtcgttgccgttcgcgtttctggtgcatgaggataccaagccgatcggcgtgggtttcttcaagtcgtatgcgcgtacgtcggtgaatgcggtgtgcgtgttcgtctgtctggtgttctatcagcggatcgtggtcgatgccgtgaggatcccggattccgcggacaagggcatggtgtcgtgggtgacgggcaatttcggcaatctcatgatggcgggcatcctgctgttcttcgtgatcgcggtgagccagcgtgtcagccgcgccatagcaggcggcgaatagccgcatcggaaccggggccaatcggaaaggattctttcatgttgcagatgcgcgtgtataaggagatcgccaatgtcgaggcgaaggtgatgtgggggctgggctggcgtcaactggcggccgccgcgtgcatgctcgtcctgggcggcggggaggcggcgttgttctggtcgttggggctgacggacctaggctcgtatctgctgttcgtggtgtgtctgccgttcgcgctgtggggctggtggcgtccgaagggactgaagccggaacggtatctgggatacatgctgcgccaacgtttcggcccg

SEQ ID NO: 738 - DNA, 10929 bp, Unknown
  R14_15m  MAG No. k141_51946
ccagcggcatatgttcattgattgttgtgacgacggtgtcagggtccttttcttcgggaatatccaaattatttcacgtcgcatacggtgaaggcgaagctggtgagggtgccggtggatttgccgttggcgaggagctgattgatgtcgggcaggtccttgttgtcgctggtctggttgagggcgtatcgggtgccgtcgggcgcggtgaagcgcatgacgggatcgcctttgccgttgtgcgtgcagctgacggtgccgtggtcgacggtgaggggccatgtgtggccgagctggtcggcgctgatgtcctgggggttgctggtcgcggtgattgtcttgctgccgtcggtagggtagttttcggggtgttcgatgccgtccatgcaggcggtcagccccagggtcatgatggcggcgaggcttgtggcggtgatggttcggatggcgtgtgtcgtgttggtcatgctggtttcctttgtcgtgttcggtggtggtcggggtgcttgttcgtctgccgtcaatgctggtcggggtgttcctcgatgagggccatgtagccgtcctccaatgtggggtccatggggtgcgcgtcggcgggcgggttgtcggtgatgacgcggtagcgtacgccgcgtgcggtggtgacggcgttggcgacgatcatgccgtccggtggcggggtgttggatggctgggtgagccagacatggcccgcggcgtgtccggtgaggtgttcggtcggcccgtcatagcggatgcggccttggcgcaggacgaacacgtatgggcaggtctgggcgatgtcgtcgaggatgtgggtggacaggatcacggtgcggtcgccgccgaggctggcgagcagcgtgcggaagcgcatgcgttcctcggggtcgagtccggcggtgggttcgtccacgatgatgagccgggggtcgcccatgagggcctgggcgatgccgacgcggcggcgcatgcctccggagaagccgccgatgcgccggtcggccacgtccgtgagcccgacccggtcgatgagctcgtgcgcctggcgcatgcgttcccgggtgtcgtcgatgcctttgaggacgcccacgtagtcgaggaattcgagcggggtgagctgcgggtagggttcgatgtcctgcggcaggtagccgagcgtgcgtttgagcgcgcggcgggtcctcgcgtccttcagatcgtggccgtccatgagcacctggcccgatgtggggcggatgatgccggcgaggatgcgcatgagcgtggttttgcctgcgccgttcggcccgatcaggccgaccatgccgtgcggcaggtcgcaggtcacgtcgtccagtgcgcggggcttcctcgggaagtccttggtcaggtggttgatggagatgaacatgacgtcttctttccgtgtggtgttttttcggtggggttccgccggtgccgttcagcgcgttgtgcgcgggcgtgccgagcaccatccgcccaacgccatgagcaggacggcgatgacgagctgcgcgatcagggatatggccgcgttggcgggcgtgccggtgaccgcgaggatgcctcccgtggccgggtagacggggccgagcccgaaccatccggcgccgacggcgtcgccgatcacgttgaggatggtgccgttgatggtcggcacgggcagcatcggcgaggagaacacgagcgcgaaccatgcgagcacgccggcgatgcgcgcgacgatcatgggcaggatcgcgccgagcagcgaggacaggctcatcgcggtcagcacggccggcccggtgatcgcgagtccggcggccaatgcctgcggtatggcccgccacgagccgtgcagggtctggatgacgccggcgcaggccagcagcaggagcgacggggtgatgaggatcaggaacgcgccgagcgtgcgtgccgctgtcagcaggggcacgggtgtgggtgtggagtcctccagttggccgatgccgagtcggtcgtggcgtgtgtggaagtcggtgaacgcggccatgtaggcgatcggcatgaacatggccatcgtcttggccatgaatgccagatcgcccgcgccgtggtcgtgcgggccggcaggggagatcacgcccagcagaagcgcgaacagggccaatgggacggccgcggcccatagggagcgttgccgccacacgatgatcatgtggacgcggatcaatcgcgggaagccgatgtgcatgttcatatgctcctcctcgcaagcgtcacgttgcgttcctcgtcgcccagcagatgccacgcgatcccgacggcgatcacggcgacggtgagcgggatgccgcgttgcgcgaccgggtcgagcacgtacggatcccacaggagggcgaggaacatccataccgcgaccaccgccatgaccgtggcccgcgtggacgcggaccacgcggcggccgcgaacccggccgcccccacgaccagcaccgcgccggtcggcgcgatcaggcttatccaccccgtgtcctgcggccacaggcccagtacgtgcaacggcgcgaacatgagcacggcgccggcaagaccggacacggccgcgagtgcgaaccgcgtggcctgcacgcgcctccaacccacgggcgtggactcgctcgcctcgaccagcgggtcgccggtcaacgcgaccgccacgcacacgcccgcgccgatcaccatcagctgggcgagccagttcaccaccgtcagcgtctgcgtgcgcgaccacacgccggataccatgatgccggcggccgccaccgcgatcccgcaggccacgggcattgtcagcaatcccatgccgatgcgtctggcctgcgcgcgaatcattcccgccatgccgtccctccttgaagtgcgaagctcgacggccgttccttatcgtccgtcacctgataggtagcggacggcagccgcatggttcacgcgacacgccgaacggccgccggaggcccgtcggcttcaatccggtcagacggccgcggccgccatgcgcgcctcggacaatcgtccggagaacgccaccgccgccgcgcacgccatcagacccgtgacggccagcagcggctgcccgaatggccgggtcatatcgatccagcccgcggccggcaggcccgtcagcccgagcaggtccgtacggatcacggcgaccagcagcaggccgacgccgaaaccgacgcccgtggagaaacggatcgcgagcatcgcgcccacgccggcgaccagcagcaggggcgacagccatccgaccagcagcacgccgaacgtcccatacccctgcgcgcccatcacggcggtcaccatcaggccgaacacgacgtcgcaggcgagtatgaacaccagccggaccagcgtgaccgcccccgtacccaacggggtggccgacgagatcatgtccgcgcgggaatccccgaacgccatcgtcacgctcaacaacacgccggccagcaccatcgagcagaacgcgcgggacacgaccgtcgcaccccagccgaccgcgaagaaccgcgcccccaatccggcgaacgccatcaacgccagcgtggccggcaccacctgccacggcaccacccgcgactgccggcccagcagcagcatgaacaaccgcaggctgcgcgcccacgaccatgccggtccgtccaacggggaacgcgacgcgcggatgcgcgccatcaccgccgcagcgggaggcgcgtcttccgaacgggatcgttccacggcgtccaatgccgcaagcagacgcccgtcgggcgtcccgcccgtcaagcggtcggtcgtttcgtcgatatgatcggtcatcgggattcaccgttcctttccatccgcatcgttttggcggtcgagttgcgcgcgcagcagacggcgcgcacgcgagatacgggatttgaccgtgccctccggcacgtccgacaaatcggcgatctgccggtacgacaggccgtgcagccacgccaacgtggccgtctccaccagttcgacgggcagccggcgcagcaacgccgtcagatcatccacgcccgcttcggacagcacggccgtctccggactcgggccatcgtcacgcggttcgggcgcatcgtccaacgcggtcacattcgggcgtacgcgccgcacgcgcatgtagatctgccgtttcgcgatgcccagcaaccaggacagcaccttcgcgtcaccgcggaacgccctcgccgaccgccagcaacccaaccacacgtcggcgcacacctcctcggccgtgccggcatccggcacgcgcacgcgcacgaacgcccgcaccgccgcagcgtaccgcccatacagggtctcgaaggcacgctcgtccccggaggcgacccgcgcgagcagatccccgtcacgcgtcgccgccccaccgggcgaggtcatgtcatcctgcgtatgcggctccttccacagcacatcgtagacggatgttcatcggtatatgtagcggggaacgcgccggcggttcatggcacgtgcatcgacatgcccggaggggcgtcagatcaggtcgtagggcatgcgcctgaacgccatccagaacgtcaggagcgcaagggcgatcacgggctgccaaggtatgccggcaagcgccaaacaggcgaacaccacgaaccgtgccatatagaacaggatccgacgtacgcccgagcgcggaaccgtctcacaggtcatatgcgtgtagccgcctcccaacgtgcgcccatcccgcagccagggcaccaacacctcgaagacgaacagcatgagcaggaacatcagccccgagaaccctaacccgcccaacacgcggtcggcagccgcaccgggccggacgcctgagaccaatgcgtggatgacattcgccgcgacggccaacggcagtgccgccgacatcacgaggcccatgtccacgaggaacgcgaccagacgccggaccaggccgggatgggtcaccgtcgccgcatccgactcacgcatgggcaggagccggtcgaatgccagcgcgcacccgtacccggccagcgcgcccgacgtgttccacaccagatcatccacgtcgaacaggcgatacgcgcacgggaacacgcccaacgttcccgtcaactgcatcgtctccaccagcagcgagaccaggaacccggcgacggtggccgtgggaagcccgcgatggaacacacgcctgacgatgaacccgagcggcagaaagaacacgacgttcatcacgatctgcaacacagcatccaacccgtcggtacgtatgtcggcgacgaaccggaacaggtccaactgcggcttcagatggtggacggcgcagaacgcgacgggatcggccggcaacgggtacaaagtgaagcacaacaagccgattgcatacagcaccgtgccatacgcggacaggatcgccggcaatccaagccggttatcgcggtgatacagcatcgccagcaccggaacggtcaacgccacggacaccaccggccacaacgccaacgcaaacaggaacggaaccgtaaacgccgataaataaagcatatcattcctgccaattagatgaatacttcgcgttaagcatatttcataaatgtgtggaatattgacatgggcctatgtttgaattgatgtcactatttcagttgtgtaaagacactcaatttaatccaattgattgcaatttgggtgcggtttgaaagatggagcttcgatagaattcgactaacatagcgtttgactgatttggtttccagaaatagtttttttgctatgtcgtcattactgagtccttgtgcaattaaggcacatatgtcacgctctctagtagtaagactcttgaatgattcaataaatatattttgctggtcttgaaaaatgaatttgctttgttgatattctactagtttctttgttattcgtggagtaagaattttaccattttcaaaaacagcttttatcgattccattaattgtgatttacttatgtctttcagtaggaagccgctggctccggcgtcgagtccgccgaaggcgtagtcgtcttcgtcgtaggtggtgaggatgaggattctgatggcgggccagtgtctggcgatgtgtcgggttgcttcgatgccgtccatgccgggcatgcgcacgtccatgaggatcacgtcgggcaacggccggtgatcggcgtccaactggttgagtgtgtcgatggcggtttgcccgttctccgccgaggcgatgacggtgatgtcggtcacgtcgtcgagcatgagctggaagccgagtcgtgccagtctctggtcgtccacgagcatcacacggatcatggtcggaccttcctttcagtcggttgtttcccggtcgggggaatgaccgctttgacctgccattcggtgccattgaccggcccataggcgaacgtgccgccaacgtcccgtacgcgccgtgacagtctgtccagtccggtgccgtcatcgggtgcgatagcttgcgccgcaccggtggctccgtcgttgcggacgatgacggtgactccgttgggctggtggttccatgagacgttgagatgcgtgacgtgtctgcagtggcggatggcgttggttatggcctcgcgggtcacgtcgaagcagaggtccgcctggggttcgtcgtcgttgcggacgccggtttcggtgaatatggtgatgatgtcgagcgtgcgggcgtgtgcgaggatcggacggatgtcatcccatgaacgcatgctccgggagcctggttcggcgggatcctcgtcttcgtcggtcgtgtcggtttcggtcagtgcgcgcacggccttgcgcgtgtcctccaggctttcccgtgcgatctcgttgatgcccttcagagcctcctccacgcgcgagtcgccggtcttaccggtcaatccttcggatagggcgatgatcgcggtcaacccgtgccccacgctgtcgtgcaattgtccggcgatgcgcgaacgacgcacggcggcgtcacgctgcttggcggcggtctgcgcgcgccggtgttccaggccggcggcggccgtggcgttcctggcttggaccatgccgcggcgtgccagggcgatcgcgccggcgagggcgagcaggaggatgcggccgggccattcgccgaggaaccggctggcgggccatgacatgaacgtcgccaaagtcacggtcaacgtcgtcacgagggacccgatgtacatgcggcgttccccggccgtacgcatgaacgcgtagaacgccgcgaccagttggaccagcaggatcgagtccgcatgccagaaggacaggaccagggtcaggatgagctgcgatgccaacgtggcggacggggcccggtaacggaacaccaatgccaggcatgacaggagctggaacagcagcagcattatgaatccgccggtctgcttggcgagcgtgtacatcggatccaatggggcgccgatcatgcgctcccacgtgagcatcgccatctcgaccgcgagcacgcataatggcatggctatggcagtgaccctgccgacgttcaccgtttgccgctccatacgatccactgtgccacctcgcagggtcatcggcgtgttcactgggcgaggcagtccgcgccgggcatcaggcagccgagcatcgtgaccgaaccggtgaacagcacagtgaacacgatgatgatggccagccatacgaacggcgagagcagcgccccgatccatgcggcgacacggccgccatgctcccatccgtgcccgtcgcggccggtgatccacgcgatcagcacgccgggcagggacaggaacaggccaagcaacaggaacccgacgatcgaatcgttcggcgcggtcgcggctggcaatggtcggggcggattcggccggccgggctccgggacgggcgatggcgccggcaggggcttgccgggtgacggttcgtgatgtgcgggaatgtccatgagtgccgatccttttgaatgtcattggagcttgttgatgttgatggcgccgttgtcgccgggcaatgcgctgatggagaccttgacggtgccgtcgtcggccgtgtagtcgtatacgccggcctgttcctcctcggtggcgttgcgggtgaagcccgcgtccttgatctttcgcgcgtagtccttcgcttcggcgatggtccatgacacgtcgatcaggtagccgttgtcggtctcgtccctgatgcgggtcgtcacccggtcgggttcgggcacccggccggcatactggccgtcaggccaggagccttggacggagccacacgccgccagcccgaacaaggccgtcaaaatcagcaagaacgcgagcagcatggatgccggggcgcgcctcggcattgccgtgtatcggacaggcatgatcatcctccttttccgaatctgatgccgtcaacggcttctgatcgcgtcggccacgctgcggcgcaacgcgggccggatctgcatgtactggatgaggaacaacgccagccagcaggccgctcccgcgccgatcacaccagcccacgggatcccggccactggaacgccgacgagcgtgatagagcgtgttgcgagcacgagcgagctgacggcgaccgggatgagcgcgaggacgaccgcgccggcggccaggtgcaggctctgccacaggatcatgcgcgtcacccggcgcggcgacatgccgatgctgcgcagcagcgcctgatcggcgaccatgccacggttcgacaacgcgatgacggccagactcgtggccagggacacgatgcacagcatcgcgatcatcagcagcgagtccgcgtagttcaggctcgtcggatggccgcccagggccagtatccgcccgtaggaccgcgcgcaggtcagcggggtcgtggacaatcccaaggccagtgcgagcggggcgatggtgttcatactggacacggccttcgccttggcggcacgggccgcgagcacgccggtcgccgacccgcacaggcggcacacggcgcgtcccgcatccagcaggattgggaccagcacgccagtgaggacgtacatgccgaacgacgcgatgatcccggcccataatgcgccgttgaacgtctggccggcctcctgcccgaacgcgtgggcgcgcggcatgcccatgccggagaacgccaatgccaatgccgccgccatgacgaccagtcccagcgcgcaacgcgcccaataccgccatccatgccgcccgatcggcgcgtccctgccacggatcgcctcgatgggacgaaccttcgccgcacgcatcgagggcacgaacgcgcccagcatgcacgtggccacgcccagcagcagcgagccgagccatgccgtcgcggacggcgcgaatgcgggagggacgaacgagccgagcccgccggcgaagctctccgcggccatcgcgttgaactcgggaaccgcgagcagactggccggcatcgcgagcagtgagccgagcagcgagccggtgaggctagccacgcccacgagcatccacgtgcccgcgcgcacctggctcggactggcgcccatgagacgccattgcgcgaacgtgccgcggatgcggtcaaccgtggccgaaccgaccaccgtcagcgagaagaacgcaagcaacgccaccacgacatagatcgtggccgacaccatgccgaactcggccgggtccagacccgccagccgggcggccgatgcgaacgacggcgacgaggtccacacgaactggttcatgcacacgcccaccagcgtggtcaccaccgcgaccaccatgatcgtgggcacccaacccgcgagattatcgcggaacacgcgaagcacatacctacccacgacgggcctcctgaccgtgctgcggcatggccggctcgaacgtgcggcgcatgccctcgacgatctgcccagcggtcagtctgcccgcgatgtgggtgattccgccgtcacgcaggaagaccacgcggtcggccagggcggcggcgtccgtgtcatgcgtgaccatgaccacgttggaacccgaatccgccagctcgcgcagcacctgcagcacgagctcgctgttcgcggtgtcgagcgcgccggtgggctcgtcggcgaacaccaccgccgggcgcaagagcagggcccggcacagggccacgcgctgctgctcgccgccggacagggcgctcaccacggtcctcgccctccggcgcaggccgaaccgggacaacagctgcgtgacccgaatgtagtcggccttgcgatgggcgagcgagagcggcagcatcacgttctcctcgaccgtcagatacggcacgaggttgtactgctggaacacgaaaccgatatgcccgcggatgaaccgcgaacgacgctcctcgtccaacgcgtagatgtcggtgccgccgatgacgacccgacccgagtcgggcctgtccaaaccggacaacacgtacaacaaagaggtcttacccgcacccgaaggcccgacgatcgctgtcaacccggcactgggaatatccaacgagacatcattgagaatcacactcggactggaaccatcagcggaaaccacacgcttgaccaacccacgcgcctgaaccgataaatatgtatttaccccaatgaagtcatttggttgttttttcatggacgagaatccttcctacgagagtgctactgccgacagtatccataaagacaagtcaatcgtctatgccggagagacgattgacatcaaaagatgtcaatctgtgtcgaagagagagtcgagtaaccatatagttgataaacagccaccagtcaaagaatcatcagaattgtgatgtccttcatctaacagttgcaaaaacaccgaattatgtgcggacggaacaatagccgaatatgaattcaaccattgttccgtatataagagaggcgcctttatatcattcttgccggcagtaatccaaatgtcaggagcctgattag

SEQ ID NO: 739 - DNA, 19677 bp, Unknown
  R14_15m  MAG No. k141_54162
cctgactaaaaatcaggcagcgagagcgaactcagtgcggttagatttagcacttattcttttgccggggtcatccacgagcggacccggcgttctcggcacgcttccctgcagcgaacaggtcaccgtcgaaaccgatcgcccccaatcttgagttatcaagcttccggcttttcggccggacttttcagcatacaccctatggcgctactcgcgcaaatcgccggcagcgaacatcgccccggcattgacgggaccaacgttgtcagcaggaccaacggagcgaacgccgccccggaaccaacggaaccaactgaatcgccgtcacttgatgatgggcttctgggatgcggaaacatcaatctgatgtttgccggcaaagccagccgtgccagcggtgatgttcttgtcgatttcctcgacttccgccagcttcagcttcagttgcgaggagtctccccaaatgattacgcggtcaccgtcgttaagcgtggtggtcaccgaatcctgcgtctcagcggtgaccttggtaatggacttacgcatcgattccggcaatgcgcccagaatcgccagcgcctccttcaccgaacggttcttgagactggcgtctatatccttgacctcgatcaccgggatgccatccacgttggcgttcttcaccgagttcaacacgcgcgcctgggaatccaccgcggtcagggtatcgcctcttttcagcatggccgcaggccgttgcgccttgacttccacgctcatcgacttggggaactgtttggagaccttggcctcgctgacgccgggaatggacttgagttgctctgtgacctcatgggtggagaccaggaacaacgactttccagcctgcttatcggcgatggcatggatggtctgcgcgctcacccattcgttggcaccggatacgccgatctcgctggtttccagacggaacaccgacgagaagagcagcagccacgttagccccgtcactacagccacgctgacgacagcaatcaacacgcgtaacgcaacgacacgtacgttcgcacgcttgcgttctttggcgcgttcggtgaaattcaccactttcgggcgtgatacgactcctagggagccggtggtctggtgcagcgtttcggcaacgtaatcctcgctgtgcagccgtcgtgcatcgacgaaggcaccggcctggcccttggctaccgtcacatcgtcgatgatctccggctcgttgatctcatgcccggaagacacggaccggggagcgcgagacttcgacgagtgacccgtgtttccgcgtgaaccgatggtgcgcggcttgcggggacttccggacgaacgacgtgagccgttgtcattgcccccggatctgaccgtgcgcccggacatcactcgcagctttcccgatgggcctcaagtgcggtgagcagcacctgatccatgtcagtgatgtcgcccgcgcccacggtgaagatcacgtcgccgtggtgggcacgcatggccatcatcttggcggccaggcacatatcctcgaccggctgaatccacgtgcctgcggaagcgtccttgagtccctcagccgcgtccacgatggtggaggggctgatgtccgggaaatcggtctgcttttcacgggccgggaagatgccggtgataatgacgtcatcggctttggccaaggattcggcgaactggtgcgcgaagaacttggtgcgggagaacaggtgtggctggaagatcacacgaatggtcgaatcggggtaccggcgtcgggccgcatccagcagggccgcgatttcggtgggatggtgggcgtaatcgtccactacagtgacctgcttgaccgtgccgcgcacctggaagcggcgtgccgcaccgaggaatgtgccggccgccttggccgcgtctgcggggttcacgcccagcagcacggcagcgctgatggcggcggccgcattgcgcgcattgtgcacgccaggaaccttcagggcaacgctctgagacaccggctcccccgccgtcaccgcggccggcagatgcagggtgagctgttcgacgccgctgcctgcggtctcgctttccgaagcgatccagacatacgcggcaccgcccaaatcgggcagggattcacgcgcggtagtgccgtaggcaacggtatgggatttcacgtcggcgggcatggcctccagcacggcaagtccgtcggggtcgtcgatactgatgatcacgtgaccggtggcccggccggcgtgggcaacgaacgcggcacggtagtgggcttcgtcgccgtaatggtcgagatgatcggcttcacagttggtgataatggcgatggttggatggtatttggcgaagctgccgtccgattcgtcggcttcggccaccagaatatcgcctttgcccgcgtgtccaccgtccagcgtggtgccgtccgggccttggataaagccgccgatggcgtagcttggatcagcaccggcgttcaccagaatgtgggacagcatggagctggtggtggttttgccatgcgctccggccacggtgacggctcgtttgccgttcatgagtagggcgaggatgtcactgcgatgcacaatacgcttgcccgccgcgtgtgctgcgacgatttccggattgtccggtttgatggcgctggagtagaccacggtctcggcctgggcgacattttcggctcgctgcccgaattcaacggtgatgcccagcgtttcaagtcggtcggttttggcgctgtgcgcgcgatcggagccgtccaccgcgactccttcggcgtgcagcatttcggccagaacgctcataccggcgccgccgataccgatgaaatgggtggcgccgagatccgcggggcgggccgcagcatcgaacgaggcatacgtggggtcaagcacgatgggctgatcttgagacaattcaaaactcctttggggattccagcaccctatattatgaccgtatctcgtgttgcgggacgggattggtctgtatcgcgcacgggatgatatctgaatactatttggatggttcggctaattgcagaacgtgccgggccatgatttcggcagcgtttctgatgccgtattcccatgccttgcggccgaattcggcaagtcgttcgtgatcggcgagcagatcgggcacatgctcatgcacccactgcggggtcaggtccttgtctgcgaccagaaggccgccgccggcgttcaccactggctcggcattgaaacgctgctcgccgttgccgattggcagcggcacgtaaatggccggcagacccagtgcagccagctcggataccgatccggctccggcgcggcaaatcaccaagtcggcacaggcgaaggccagatcgattcgttccagatattcggcggtatggtagtcaccttgtccggccgattcggggccgatgccggtaagcacgtccgcgccggccgaggccgtgaccagttcgcgtacttcgctgattttgcctcgcccggtcaagtggatgatttgtgcgtgggccaacaggtctgcggcggaggaggcgatggcgcggttcaggctttgcgctcccagcgatccgccagtgaccagcaccagcggacggttcggatcgacgccaagctgcgcggccgattcacggcgtacggcggcacgatcgtcaccgatgcgtttggtcagggaggcgatggtcgggcgcaacggcagaccgacacgctcgacgtcggctccggcacgcggtttgagaccggtgccttcgtacacggtaccgatgaaatcggcccaacgagcgcccagtttattggccatgccggcacgcgcattctgctcatggatggcaatcggaatgcccatcttgtgtgcggtggcgtagacgggggcggaagcatacccgccgaatccggccacgacatccgcatgccgcgtttcaagaatggagcgcaccttggcggtttctcgcttccattttgccgggaagcgaagcatgtacaggtcagggcgacgcgggaacggcactttttcgatggtgtcgagctcgtagccggcctcaggcaccaaatccttctccaaacccaccgcagtgccgatgacggtgacctgtgccgtgggttcgatgtcgcgaatcgctccggcgaccgcgagcagcggattgacatgtccggcggtaccgccgccagcaagaacgatatgtggtgtgccttgattcatgattaccgagtctacttacgcgctctgacgcgactgttttatctgcggttgagaacgcataagtcccacaaccagtccggccgccgtcaagcacatgatcattgatgagccacctgcggagacgaacggcataggcacgcccaataccgggaacacacccacgaccacgccgatgttgaccatggcctggcccacgatccaaatggtgacgcacatcagcaccatggcaacataacgatcggtgacctgcaatgcgatgacgatcatgcaccaggcgagaatcgcgaagaacagcaatacgatggcgcaaccgacgaatccggtctcctcgccgatgatcgcgaaaatgaaatcgttatgggcggccggcaggtaattccatttctcacgcgaattgccgatgcccaatcccagaaagcctccggaggcgatggcgtacttggcgtgaatggactggtagcatacgctctgcgcgtcagtggccgagcaatcaccatatgtggccagaatacgacgcatgcggttcgggctggaaaccgccaatgcaccgaccataaccaccgcgcccaatacgccgattcccatccatttgccggggaatccgacgatcaggaaggccacgcctccgatggagaccagaatcatggccgtgccgaggtccttgccgcccatcaccagcgccacgcctatcgcatacaacaccaacggcgcggcatatgctttgattcccttcttgtggtacatcttgctgcaggcatgcaacgacgagggcagccatatgcacatcgcgaacttcatgaattcggccggctggatagtggtgaagccgaggttcagccaacctttgttgccgtagacgtcgatacccagcggagtaaaggtcagcgcctgcaacaggcaggcacccaccacaaagaacacgccggtccgtttccagaacgtcaccggcatcgtcaatgccacgaagcccagcaccaagccgatcaggcaaaacgcgccctggttcagaagctgaaggaacggcgacttgcccagtgcggccatggtgaccgtggagctggagaacaccatgatcaggccgaagcatgtcagccccaccacggccatgcggaatccgtggtagcaccatagcgggttgagcaagcttcgccaacccgtgtagtcggtgatctcgagtgcgggcctgtcaggggctctgtatgccttacgcttatgggtatcagtggaggccatgcacctcgctccacgtcttggctgcggcggcgaatcgattgcctcgatccgcataggacttgaactggtccatggaggcgcaggccggagccataagcacgatgtcgccggcggcggcatacgtgccgcaggcttcgacggcacgatccatgacggtatcgttgtcttcgggatcgatgatggtcaccgggatgtccggagcttggctggcaaacgcttcgaccatcggctgctggtctttgccgatgatgacggccgctttgatggtatgtgcctggtccttgaccaggtcctcgaatcgactgcccttggccagacctccggcaatccagatcacagacttggccgggaagctggacagcgaggcgcgtgccgcatgaccgttggtggctttggaatcgtccacgaaacgaacggagccgccctcgactgcggcctcagccacggtttcgatgcgatggccgcccggcttgaacgaggtaagcgcctccaacgcggtatctcgatcagcgccaagtcccagcaccaacgccaatgccgtcaatgcatcggccaccagatgcgggtacagtgagccgtccggctctgccagatgcgtgaaatcggtgatggcggccagtctgaccggctcccccactgcgccgccggccacgccgctcctgtccacgatccagccatcttcaatgccgatctgaccggcctggggggcctcgagcgtgaatcccaccttgcggcatccttcggcggtttgggcctcggccgccagttcgctgactttggcgtcctgcgcattgtagacgatggcgcgtttggcgttgtggaacaccttggatttgtcggcggcgtaattctcgcgcccgccatgccagtcgaggtgatcgtcggcgatattggtgatcgccgcgcagtcaagtgccagcgaatcggtgaagtgcaattggaaggagctcagttccacgcacagtacgtcgtgctgaggattggtggcgcaacgagacaggctcatgctcatgtctccggaggcgatattgccggcggtcggcgcatcgagtccgcaggcggtgagcatttccgaggtcatctcggtggtggaggttttgccgttggtgccggtgatgccgatccatggagccggagtaccggtgcgctcgttattcatacgcagctgccatgcgaattccacctcgctcatcacggggatgccacggcgttgggcttccagcacgaacggggtgcgggggctgaacaccggggacgacatgacgtagtccacatggtcccagtccacgtcatcaaaggagcggagaccggcctcgggcttcctctcgtcgacgccaatcacgtgggcgccgcattccctcaatacctccgccaacgaggtgccggacacacccagtccagcgatcaccactgtcttatccgctacttgcattgttcctcctgatataggaattccgtgggtgagcataatcccacccagatttccgctagctgaacagcaggccggagcgggtgacccagtcgccgtagaaaatcgtcagggcgagcagcacgaagatgagttcgatcatccagaaccgcaccaccaccttggtttcggtccaacccttcagttcgaaatgatggtggatcggtgccatcttgaatacacgtttgtgggtcatcttgaagtacccgacctggatgacgtcgctcatggcttccatgacgtacagtccacccagaaccaccgccaggaattcggtgtgcgtggcgatggacagggctgcgaacaggccgcccaaggccagggacccggtatcacccatgaaaatcgatgcggggttcgagttgtaccacaggaagccgaagcaggcgacggccgcgcatacggcgatgacggtcagatcgagaggatcggacacggcataggaatatccgccatggctgccgcccttgatgtggtagctttcccagaatgcgatgatgccaaaaccggtgaaggcgatcatcgacgaacctgccgccagaccgtcaagcccatccgtcagattcactgcgttggtccatgcggtcatcaggaagttcacccagatgacgaacaggatgatggccacggttcgaccggcgaaatcgaagttgaagaacggccgttcgatgaagctgatgcccgcctgcgcactggggaatcccgatttggtgggaatcagcagcgcaagtaccgcgtagatggtggcgaagatgaactggccgatgaacttgccgcccaccgataggccttcgttctgcttcttacgcaccttggcgaagtcgtcgataaagcccagcagacccatcgacagcatggcgaacagtacgagcaccgcggaccaggagggcacgtcgcccgaacgcaggtatcggtacagtgcggaggatgcccaaccgagcagaatcgcgaagttgatgaccacgccgcccaacgtgggggtgccgcgcttgaccagatgcgactgcggcccatcctggcggatgtactggccatagtgcagcttgtggaccagccgaatcagcagcggggtgccgactaaggtgacgatgagcgacaccagcattccaatgatcagagcaatcacgtgcagcttctctttcttgtcggtttcttggggtggttatcgggtcagttctttgcccagcgttcagccaaagcgctcaggcctgacgtgtgcgatcccttgagcagtaccacagcgtcggaatggttgcgcgccaagtcgatgaccagctgttcggccgcatcgatgtcgtgtacgcaatccaccgacgcggattggctctgacgggcaccgtccgccagagcctgtgccagtgcatcgagatgttggtcttgggcggaaccgaccgcgatgatcgcgtcgatgcccaattcggccgcatacgtgccgatagaggtgtgcaatgccgtctcatcggcgccgagttccagcatggcacccagcagcgccacgcggaacggatccttgccgtcatttgagttccaagccttcaacccgttcaggccggctttcatggagtcgggattggcattaaaggaatcatcgatcagtgtgaaggaagtcccctcgcgattcaccgtggacaatgccatgcgatgagggctgatggtgtgctgcgaggccagaatccgcgccaccgtttcgggtgccataccgtaacgcatcgccacggttgcggcggccaacgcgttcatcacgttgtgacgtccaggaatgcccagatgcaccggcgtatggttgccgtccgcatcgaccaacgtgaattcagcatgatcggaccggtcggcagtgacatcaatggcccgcacctcgggctcctgcgacgatcccaagccgaaccacagcacatcgccgctggccaggccggccatgggaaccacgtgttcgtcatcggcgttcagtaccgcggtgcctccgggaagcagtccctgcacgatttcgcttttcgcctgtgcgatgcgttcgcgggagccgaattctccaaggtgagcgacgccgaccttcaatacgattgccgtgttcggcggtgcgatacgggtcagtcgcgcgatttcgccgatatggctggcacccatctcagccacgaagaaccgggtgtgctcatcgacccgcaacgcagtgagcggcaggccgatctcattgttgaacgatcccaccggagccacggtcgggcctacggtggcaagcagggaggagagcagatccttggtggtggtcttgcccaccgaaccggtcaatccgatgatgtcgaagtcgccgtccagctcgcggcggcgaacgatgttgtgtcgggcgagctcgccaagggcgtcgaccgtgtctttcactacgatctgcggcaggccatcggactccacctcatggtcgacgatggccaccgtggctccctgttcagcggttttcgccacaaagtcatgcccatcgacacgctcgcctcggatggccacaaacaccgatccggggccggcctgccgcgagtcgctgaccgtattggtggctcgagactcggaatcggcgtctccgatcaatcgaccatcgacggccttggcgatctcctccacactcatcggaaccatggtgtttcaaactcctttacgattacgcttcgtcccgcatccacggacttaattgagattgttggccacatgcagggcactgcgtatgttgtttttcctcacgccggcggccagtaccatggcgatggccaaggacatgtgcccgagtcggacgcggtcgtacattgccggtgaatccgcagccatttcatccgattcgggtgtcgacgaggtcatggacatgtcatgttccgcaacgaatgcgtagcgtgtcttcaattcgtccaagcttgcgcttgcgttgacatcttccgtgcccagcacatccacgttcaccgattccaacgcatgctcggccaatgtgcggtcatccatggcgatgatcacggccgccacaccgtcttcggcgcacacggacagcgcgcgctgcatatcgaggatgcccagaggatagttcaggttcatggtacgtgtcatcgacgtggacccggatgcggtgattaccgccaccggattgcccagcatgtgcaggaattcggagagctgggacacgcctgcgtcaacggcctgctcatccgcaccggtcaccgcgaacaccgccatggcgttggatggtccgccggccaggccgctggccagatcgccgagtacgcgatcgtcgcaatcgccgtagagcaacggtatatcggcattggcgatctgccctttggacgcgcgtggcagcaacgccgcataggcaccggcctgtgcggcatgcagtacatcgggttcctgctcatgcgtgcagatgaacagcgagccgggaatcacggtatccacggcatcgctgagtgaggtaatggtgacattggtggcgaagggtggatcgacttcaaaaccgtaccgttcgaccagcattcccaaggtcacccgctgggcgatggattcgctcactgcactcatgggctatcgcctttctcccctgatccttaccacgtgactggaatagcattttttcgtggactggagacaggcacctcgtatttctgcataaggaactcacaaatctgtgcggaaacagggccggccgtcagaccgccgaacacaccattcggatccttcatcaccacggtgaccgcatagcgcgggttgtccgcgggaatcaccacggaataatcggagataatggacgagagcgcgccatccgaaccctgcacctctgcggtaccggacttggcggccatgcggtaaccatcgaccttgacgaacttgttgtagctctccgccactgattccatcgcattcatcatgtccgatgcgaccttttcatccaacacgcgggtggcttcgcccttcttggtctcagtggtcttgccattggcatcggtggttgatctgatgatcgactgctgctgcttgacgcccttgttcgcgatggtggccaccacgttgttgagctgcagggcgttgacggtgtagccctgaccaaacaggatggtgttgcgcgtacgcagatcccacgccgaagggttggtgagcagaccgctcgattcaccgggcaggttcagtccggtcggttgtccgatgccgaatttggtcaggtactcgtagcgttgctcatccggatagttctccccggccataatcatgccgacgttcgatgagttctgcagaataccggcgagcgtccagcgctcagtgccatggtcgaatgagtccttgtaggtctggcccttctgtgtgatgtggtccgggaccgacaattgatcgctcatcttatgcagtcccgtctgcagatagccggacatggagatgaccttgcccaccgaaccaggctcgaaggtttcggacacggcccgagacgggctcatcttcgccgcatcggtaccagcctgtacttcatcgctatcggccagtgcgagaatctccccgctctggacatcctgcaccacggcgatcgcccacgctgcaccatacttggattcggcctccttcaaggcctttttgacataccattgcacatcacggtcaatggtcagggtgacatcgtcgccatttttggccgccaccgattcggtcatggtgccgggaatctcttcgccgccattaccacgctggtaggtttcatggccatcggttccggtaagcgtcttgttctcgacctgctcgatgccggcgacgccatcgccgttgtcgttcacgccgccaagcagcgcgcccatgagatcgccatccgcatacagtctttcactgctcagctcaccccagacaataccgcccaggtgcaacgcctcgatgctgcgcttgacctgcggagtcacatctttcttcagaatcacatactgcccggtaccggacagatcagcgcccagttccatggcgttcatatccaggactttggccagcagtcggcccacggccgccgctccggtagcacccacgggtttgccgtcaatttcgtggcagtaatcacgggtgttgtcattgcaggtaatcggctcgaactcctgtgcagcctccggattggcgacgatagtataacgctccacgctttgagcgagcacggagccgttggcgtcgaggatacgcccacgcttggcgctcaacgtcacggtcagggtgcggttagccgtggccgcttgtgcggtttgacggccgccgatgagctgtgtggaggccagctgaatcacgcatgccgacgccaccaacgccaatgcggcgccgatggcaatgcatttgaacgcgaaggtcttgaccttggcgaactctacgatgcgacgaatggtgttcactgggttccgcctttgttggactggtatccgcttaagtcgatggacactgatccttgctgcgggaccatgcccatgtcgctggccttgtcgggcaggttcgcgactaattgatcgagtttggcctgatcgtcttcgacatcttgggtaagtctgttgatattggtttcgatctgtgccgcctcaaacgagttctgcaccatctgggtacgcaacatcagcgcgccgaacaaggtgccgacgaggaagatcactgcgatggccacgtgcaccagcggtgcgcttcttgttctggtccattcgatgacccgtccgacgacattgccccgctcgtctccacgcgggttggagaccacccgcagctcaggtcgggaggaggactgatgcttggtgtgcggtcggttcgaggccggagccgcgttcgatcgaatgttacgtgcggttgccatatgccgttatcccctccttgtacgaattcgcgctgtgtttttggctctgcccggagacgcggagccttgtatcttgacgtcattcaggccctgcgcggtttgcgtaaagcgtttcctccatcgtgacggaatatcacggctgacttccaccgcccgcaaccgcaccgaagccgatctcgggttggctgcgatttcatgttcgtcggccttgatggcacctcgcgtgagatccgtgaaaaacggttgggcatccggcggtatgacaggcagaccagccggaacatccactcgcagcccttgtgccatgaacgatttgacggttttgtcttcgagcgaatgataggactccaccaccagtcgtcccccgacatgcagtcggttcgcggcttgcggcaatgtggaggcgagcttgtccaattcgccgttgacttcaatgcgcaacgcctggaagacgcgtttggcgggattgcccgccgggcggtgggcttgcggcaccacttcatcgaccagacggttgagctgtgcggtggtggtaaacggctccttgtctcgacgtgccacgatggcgcgggcgatctgacgcgagaaacgctcttcaccgtattccttgaatatacggaccagttccgccgcatcataggtggcaagaatccgttcggccgtcaacggctggctgacgtccatgcgcatatccagcggcgcatcatgcgaataggagaagccacgatcggtttcgtcgatctgcaggctggataatcccagatccatgaatacggcgtccacacgttctatgcctcggtccgtcaacacctgatcgagctgatcgaaggcggcatgcaccgggatgaatcgatcggcgagcccctcccgttccatgcgttcggtggccagccccagcgcttcactgtcacggtcaatgccgatgagccgagcctgcggtgcggctttgaggaaggcgatggaatggccggcaaggcccagggtgcaatccgctgcgatggcgttctcatgttccagggcaggcgccatcaggttcacgcaatcgtccagcaataccggcagatgaatattcgccacatcaaccatcagaattccacctccggcaacacatcgtcagcaatatcggaatatccctcttccttctcggcgaggtaggactcccacgtgtccttattccacagttcggcacgggtgccaacgccgatcaccacgacgtcggaacccagattggcgtaatcgcgcagcatctgcggcaccagcacgcggccctgcttgtccggctgctgatcgacggcaccggaaaggaacacacgcaggtattcgcgggcggctttgtttcccaccgacacacgctgaatctgcgaggcgatacggcgaaattcatcgaacggcagcaggtacacgcaccgttcctggcctcgggccatgaccaggccctgccccagctgggagcggaatttggccgggagcgccatacggcctttggcgtcgatcttcggcgtatatgtgccgagaagcagcggcggcagaccagccatgagatcagccatagtggtggagccttgtgcgttggcatcagcgtcgcgaatcgtctgatcggcaaccatggctccacctccttcatcgttacgtgggatacacttcggccaactggttcaccactctaccccacgattccccatttctccccactcatgcacgatttgctcacccttttagggcaattaccgatggattgcgcgtgtcggccacgactgtcgcacgaatgggcgctccgcacatccaatccacgttgcgcactccaccgaccgagcagcatggcgaattcacgctgaattcacctattccgggttgtccgcatcactgacgtagggggtgtgcggtaaatttgaatgccttaagttttttctgccccacggaaatggaacgaagagaacagcatgtcgagttacgcctcccagctgcatgaggagcagcaggccgtcgatcgcgcctatggacgattggatgatctgcgagccgaaatgtggcaacgcctggacaccgtacgcgccgccggctcccacggatcccccacgcaacgcagcgaacgagactcctttgccacaatgtacgaaaaccgcctcacgcaattgcgcagcgttgaggatcggctggtgtttggtcgtctcgacgccaagaacggcgaccgtcattacatcggccgcatcggcctgtcgagcccggaccatgagccgattctgaccgactggcgtgccgaagccgcacgtcctttctatgaggcgaccccctccaatcacggcgacatcgtgatgcgcaggcatatcaccttgagtttccgcgaagtcgtgggcgttgaggatgaggtgctcgacgtgcattccgaccaagtcggccaggcgtcttccgccggcacgttgaccggcgagggtgcgctgctggcttcgctgagctcacgccgcaccggcaagatgaccgatatcgtggccaccattcaggccgagcaggaccgcatcatccgctccgacatgaatcgtgccgtggtggtgcagggcggtcccggcaccggcaagacggccgtggcgctccatcgcgccgcctacctgctgtacacgcaccggcgcacgctggaacgttccggcgtgctggttgttggccccagctcggcgttcctgcactacatcgatcaggtgctgccctccttgggcgagaccggcgtggtctcacgcaccatcagcgatctgattcccggcatcaccgccacggcggtcgactccccttatgcagccaagctcaagggcgatcgacgcatgacctccgtagtggccaatgccatcgccgcgcgcgtgcgtgttcccgctgttctgccgacagtaaccattagcggcattcaggtaccaatgctggccactgatatcgagcaggcgcaggcggacgcgaagcgcacccggcaacctcataacaaggcccgcgagacctttatccgttcgatgctgaccagcatgcagaaccgttatgccgaacagcttgattacacgccggatcaggcggagctgaaccgcgcgatgtcgttgctgcgtatgaacgagcaggtgcgcaagaccctgaacctgtgctggctgccgatgaccgccccatggctcatcgatcagctgttcgcccatcccgaacgtctgaagtctctggctggttggctgaccgacaacgacatcgcggcacttgcccgccccaagggctccccgctgacccgctccgatattccgctgctcgacgaagcgatggatatgctgggccccgatcccaagacggtggcccgccagtccgccgccgacgcacgtcgtgccgccgaagagcagtatgccaaagacacgctggccgcgaccggtctgggtggaggcatcgtctccagtcagatgctgctcgaccagatgaacggggacgacgccgagctgaccgcgcagcgggccgcggccgaccgtgaatggacctacgggcacatcgtggtcgacgaagcgcaggaactgaccgccatggactggcgtatgttgatccgccgttgcccctcccgctcgttcaccatcgtgggcgatgtggcgcagacctcggcgctgggtggcacccgacgctggagcaaatcgatgaaccgcctgttcggcgaaagccactgggatctgaacgagttgaccatcaactaccgtaatccgcaggaagtttccgaactcgcctcacgatttgccgagaaggaaggcctctacatctccacggtcaatgcggtgcgcaccatccccgattcggtgtcccgcaatgtggtgcccgacatgtcgtccttgctggaaacgacggccgagcaggcggcgcagcttgccgaacaattcgtttcggcagacggcaccggccgcatcgccgtcatctgtccggatgatctcatcgccccggtgcgcgacgccgtgcgccgcaaactggccgccgttcttgacccggccgaatacgcaaggctcatcgagcagcccgaatgggatgagcaaatcagcgtctgcggcaccgaaacggtcaagggtctggagttcgatgccgtcgtggtggtcgagcccggtctcatcgaggatgacgcgccgagccgcctggtcgccgcctcggacctgtacgtggcaatgaccaggccgacccagaaactggttatagttcggacaagaacggacgaaaagtccctgaacatctaaggtatgaagcatgcccaaagcactgttattggaaaacattcaccccgacgcggccaaatcgctgcgtgatcacggtttcgaagtcgagaccatgaagggagccctgagcgaggacgaactcatcgacgcgctggatggcgtggacttggtgggcgtacgctccaagaccaacgtcacagcccgcgtgctggatgcgcgtcctacgctaagcgccatcggctgcttctgcatcggcaccaatcaggtcgatctggcacatgccggcaagcgtggcatcgccgtgttcaacgccccctactccaacacccgttccgtggtggaattggtgatttgcgacatcatctgcttgatgcgccgcattcccgcacacacgcatcacatcaagcatggcctgtgggacaagtccgcttccggctcgcatgaagtgcgcggcaagacccttggcatcatcggctacggcaacatcggctcccagctgtcggtactggccgaggccctcggcatgcgcgtggtgttctacgacattgaggagaaactggcactgggcaacgcccaccgttgcgataccctcaacgaactgctggaacagtccgatgccgtgaccctgcacgtggatggccgcaagtcgaacaccggcttcttcggcgaagaccaattcgcccacatgaagcaggacgcgattttcattaacctttcgcgcggtttcgtcgccgatctgggagctctgaagcagcacctcgattccggccatctgtctggcgcggcggtcgacgtgttccccgttgagccgaagaagagcggagatccgttcgagacctcactggccaacgaagacaatatgattctgactcctcatattggcggctccaccttggaggctcaggaatccatcggccatttcgtctctcagcgtcttgaggattactggttcaagggttctacctcattgtccgtgaacctaccgcagatcaacctaggtgaacgcaagggcgtgtgccgtatcgcccatctgcacgacaatcttcctggtgtgctggctcatgtcaatcgcgtgctcggcgaagagaacatcaacgtttccttccagtcgttggccaccgaaggcgaacttggctatgtggtcaccgacgtggctcagaagcccagcgccgccacgcttgaagcactacgcaacatcgagggcaccgttcgcatgcgtgtcatcagctgacgcagctcatcctcgattgatatgaaagagacccgtcgctgaaccgcaccccgattgttggactgaagtaattcagattcgatgatcggaggtgcggtttctcatgtgtagggatcgcaggcgtcattacgatgacggtttcatgcgggtcgtcgccgacctgatccggggcggggctgggaggcgttctctcgcccgccggcttggcgtgcccgtcagtaccgcgggaaaatgggtgttgtcataccggtttggcggggaggcggcgctcatgggagaacgcgaaggcaacaggagatacgactacgagacgaagctcgcggcggtgcgcgaccatgtggagcatgggctgacgaaggccgaagtcatggagaagtacaggatcgcgagtctcaccccgttggagcgttggtgccgcgagtaccggtccggcggcccggacgcgctgcgtccgaaaccgaagggcaggcccaagggcgcgaaatccaagccgaggccggctcccacaagggaacagctccttgaggaggagaacgcgtacctcaaggcgagggtcgcgtacctggaaaaagtcgacgccctgctggcgtggagatcggcaaccgggacagaacggtgatcgtctccatgctggcggggctgggacatcagctccggcacctgctcagggcggccggactggcgaaaagcacgtattaccatcttctgtcgcatccggccgccgtgacccggccggacatcgagccgatggtcgccgagatattcgcgcgcacgcccaacgggtgcggccaccggcagatacgcatgtgcctcgtgcacgagttcggggtgcgggtgagccacaagagcgtgctgaaggtcatgaggcgcatgggcctggaatgccggatacgcaggccgaacccgtaccggaaatacagctcgtaccggggcgagacgggcgcgagggtggagaacctgccgaaccgcgacttcacggccgaccggccgtgggtgaagctgggcacggacgtcaccgagttcagggtcgccgacggcaaggcgtatctggctcccgtatacgatatgggatccaaggagatcgtggcctgggacgtcagccggcatcccgacatggcccagcagtggcgcctgctcgccatgctcgaggagaagctgcccgaagacgccaacccgatcctgcactccgacatgggctggcagtaccggcaccggtggtggcgcgaccggctcgcgggactgaacatccgccagtccatgagcaggaagggcaactgcatcgacaacgccgcgaccgagcaggtgttcggccacctcaaggacgagttctacgccggacgcgagttcgcctcatacgaacagttcaagaacgaactggacgcgtacatcatccactggaacaccaaacgccgccagatacgactggagggacacaccccggaggaattccggaacatgtccctcacagcctaatcaggtacccttaataaaccacgtccaacaatcggggcgcagttca

SEQ ID NO: 740 - DNA, 6230 bp, Unknown
  R14_15m  MAG No. k141_55466
gcctttgaatggcacgatcaaggtgcgtggcgcgaagaacttcgtgagcaaggcgatggtcgccgcgttgctggcaccgggcaagtcggtgctgaagaacgtgccggagattcgtgacgtgcatgtggtgtccgatttgctgcgcctgcatggcgtggacgtggatgtggacggcgaaaagggcattgtgactatcgatgcctctcatgttcagctggccgatgtggctgacgtggatacgctgtctggctcctcgcgcatcccgatcctgttctccggcccgctcgtgcaccgtctgggcgaggcgttcattcctgcattgggcggctgcgcgatcggcgggcgcccgatcgacttccatttggagacgctgcgcaagctgggcgccacggtggacaaggagcacaaggacggcatccacatcaccgcgcccaacggcctgcatggcgcgaagatccacctgccctacccgtcggtgggagccaccgagcagacgctgctggcggccgtgctggccgagggcaagaccgaactgtcgggcgcggccaccgagccggagatcatggatttggtatgcgtgctgcagaagatgggcgcgattatttccgtggacgtggaccgcaccttccgcattgaaggcgtcaaggagctgcaaggctacacgcacacgtcgctgacggatcgcatcgaggcggcgtcctgggcgtccgccgcgctcgccacgcacggtgacattttcgtcaagggtgccacccagccggagatgatcacgttcctcaacgtgttccgcaaggtgggcggcaaattcgaggtgacggacaagggcattcgtttctggcatccgggcggggacttgaagcccgtggcgatcgagacggacgtgcatcccgggttcatgaccgactggcagcagccgctcgtggtggccctgacccaggccaacggcctgtcgatagtgcacgagaccgtgtacgagaaccgtttcggcttcaccaagccgctggtcgagatgggtgccaccatccagttgtaccgcgagtgcctgggctcgctgccgtgccgtttccggcagcgcaactacaagcattccgccgtgatcttcggaccgaccccgctgaccggacgcgacatcgacgtgccggacctgcgtggtgggttcagccatctgatcgcggccttggccgcgtcaggcccctcggacgtgcacggcatcagcctgatcgaccgaggctacgccgacttccgcggcaaactcgaagcgttgggtgccgacttcgattaattcgggcgttccgcggctcccctctctgaggggagccgcgattttttacaacagcccgtccgcctcaagtgcggcggccatgcggtcgaagcattcctccagtagcgggtagggcatggcgaagttcatgcgtacgcatccatgcccgacctcgccgcattcgcggccgtccgtcaacgccacattggctttcttgaagaaatagtcggccgggtcatcgatgcccagtgacgagaaatccagccacgcgatatacgtgccctgcggctccacatagcgcaccttggcgaatctcgtgcgcatctgctcgttgaccagcgcgatattgcgctcgatatatgccatcacgccctcgaaccatgccgcgccgccgtcataggccgcagtggtggctatggcaccgatggtggccgtctggtgctcggaccattccgcgttcctcatccatagctccagatcgtccggattggtgagaatcacctgcgcgcacttggtgccgggaatattgaacgacttcgaggctgaagtggaggtgaaagcctgcatggccgtctgccggttgattgaggcgaatggcacatgcgtgtggccttggtagacgaacggcgcgtgaatctcatcggagaatatacgcacgtcgtacttggcggccaggtcggacaatcgcagcatttcttcgcgcgtcaataccttgccgatcgggttgtgcgggttgcacagcacgaaggcatggcagccgttcgcgaacgcctgctcaatggcgtcgaaatcgaacagccattcatcattgcgcccgctgctctcgccggcgccctcgcacagcatcggaatctcaagaacctccacgccatacaggcgcggcacgctcaggaacggcatataggccggagtcggcaccacgatggagttgccggcgcgcacgatctcgcgcaggaacacttcgaacgcctccagcacgtccggcaccggacggatgcacgtcggatccacatcccagccgtatcgacgctgccatgcggcgcacgagcgggcgacctccttcttccacgggtcgggaatgtagccgagcgcgccacgttcggtggcctcttcgatggcttcggccacgcacggcgccagaccgtaatccatctcggcgatgaatgcgccgatgcagccggggtaacgggtccatttatccgaaccgacctgctccagatcttcgatggtcgtcacgtcgatgtgattggcatcaaagcaagaggcgccggcggttgcgttgctcacagtcgttgactggggaatgttgttcatgctcataacatgccattgttcccggtgcagaagggccgctcaacggtctggctccccgaaatcgtgatggcgttcgcaagcttgcttatcgctgtccgactacttggcactcaaatatttgagtgccgtgcgctcgagctcttcgagcaatgaaccgagcgcgggacgatggtcgccggcacgagtcacgatgccgacctcgcgcgccgcaaaatcgtcggcgatgggacaggccaccagatcgccttgcagattgatatgtgtatcgagcgccggcaccagcgagacgcccatgccaacctcgaccaggttctgcgtggcccagtaatcatccgtgcagtggcggatatccggcttgaatccggcacgggtggccagtttcaccaaatttgcgcggcaggtggggcagccggcgatccaatgctcgtctttggcggcggacagcggcacgggttcgccggtctcctcgaatcgtttggcgatgtcgctggagcggcggaccaacaatcgcatcggatcgtaacccagcgactggaaggtcagatcgtcgccgatgtgcaggaagttcgggatgctgctgtaccggaacacggcggcggcatcggccttgccttgggaaatcagaccgatcgcctccggcggctccatctgaatcaggctcagctcgatgtccgtgaacatactgagcttgaccacggtacgggccgcgatagtagagcagattgacggtggggccaccaaatgcaggtgagcaaaccgatgatgccgataatcctcgacctcacgggccgcccgctccagccgatcggcgatggcctcgccgtggcgggcgagcatcgaaccggtggcggtgagttccacaccatgcgaggtgcgttgcaccagagtcgaaccgcactgtgcctccagctttttgatctgctggctgatggccggctgcgaccaacccgtggccttggccgtggcggagaacgaaccatactgttcgatctgccacaacgtgaccaatgattgggggttgagcccggccatatgcacctctttcgcgcgtcgttccattatggccgccgacaatgaccggacgcggcacggtgtcgccatcgccggtatccttagaagaatgagccctgaagccttaagtgaactgatttccagcattgcccacaacctcgtcgccgccggccaggccggcgcgttgaccgacgagctgattccgcccgtcgacaagctcgccgtgatgcgcccgaaggaccgcgcgcatggcgactgggcctccaacatcgccatgcagctggccaagaaggccggcatgaagccgcgcgatctggccgagccgttcgccgccgcgctcgccgaagccgacggcatcgccaaggtcgaggtggcaggccccggcttcatcaacatcacgctcgactccgcctcggccgccgccgtggtggacaccgtactcgccgccggtgccgtgaccgacaccgacaagcatctcaacaaggtcaacgaatacggccgcaacgcccatctgggcggccagaccctgaatctcgagttcgtctccgccaaccccaccggtccgattcacatcggcggcactcgttgggctgccgtcggcgatgccatggcccgcgtgctcgaagccaacggcgccaaggtggtgcgcgaatactacttcaacgaccacggcgagcagatcaaccgcttcgccaagtcgctggtcgccgcttgggctgaggccaacaacctcggcgaggccggttaccagaccgaaaccccgtgcgacggctacaagggtgcctacatcaacgagatcgccgcccgtgttcaggccgaagccgagtccgacggcgtggacctgaccgcactggcccaccaggatcaaggcctcaacgacgacggtgaaccgctcggcgaggccgacaccgaagtgcgcgaggaattccgcaagcgcgctgtgccgatgatgttcgatgagattcagaagtccatgaaggacttccgcgtgaacttcgacgtctggttccatgagaacagcctgtacgccgacggcaaggtcgacgccgccatcgaagagctcaagtcccgcggcgacatcttcgacaaggacggcgccacttggtttgaatccaccaagcacggcgacgacaaggaccgtgtgatcatcaagtccaatggtgagttcgcctacttcgccgccgacatcgcctactactgggacaagcgccatcgcgccgaaaacccggctgacgtggccatctacatgcttggcgccgaccaccacggctacatcggccgcatgatggccatgtgcgcggccttcggcgacgagcccggcaagaacatgcagattctcatcggccagctggtcaacgtgatgaaggacggcaagcccgtgcgcatgtccaagcgcgccggcaacgtcgtgaccatcgacgatctggtctccgtggtcggcgtggacgccgcccgctactcgctggcccgctccgactacaaccagaacttcgacatcgacctggccctgctcgcctcgcacaccaacgacaacccggtgtactacgtgcagtacgcgcacgcccgctccaagaacgtggaccgcaatgcagccgccgccggcatcagctacgagggtgccgacctggccctgctcgacaccgaggccgacggcgaggtacttgccgccctcgcccagttcccgagcgtgctcgccactgcggccgacgaccgccagccgcacaaggtggcccgttatctcgaagagctggccgccacctatcacaagtggtacaacgtagagcgcgtggtgccgatggccctgaccgatccggaaacccgtggcgacgatgaggctcgcaaggccttggagatcgccaagaatccggagccggcccgtgccgccgcccgcctgaagctcaatgacgccgtccagcaggtcatcgccaatggcctcgacctcctcggcgtcaccgcccccgaaaagatgtgattatgcccatttctccaatttggccggccgctacggctgtgaatgccgacggtgccattacattccacggtcgtaccgccgaatcgctgcttgacgagttcggctcgccgctctatctcatcgacactgatgaagtagtcgcacgtgccaggcacttcgtgcgcgctgccgccgaagcattcaacacatccactacgcacgtgagctttgccggcaaggcgttcctgtccaaagaaatcgtgcgattggtcaccgaggccggcatgttcgtggacacctgcacgatgggcgagatgaaaatcgccctcgccgctggcgttcccggacgtcgtctggtactgcacggcaacaacaagtccgatgaggaaatcgcgctggccatcgaacagggcttcgccaaaatcgtgattgacgagcccgacgagccggagcgcgttgccgccatcgcccgcaagctcggcaaacgcgcccgtgtgatgctgcgcgtcaccgtcggtgtccacgccggcggccacgagtacatctccactgctcacgaggaccagaagttcggcgtcccgctgttggcggccggagccgacgccgcagtgctcgacgtgctgaacaacctgacggacgtgacacctgccgcgaccaacgcgcgtattgcggagtcggacgttaatgctggca

SEQ ID NO: 741 - DNA, 7423 bp, Unknown
  R14_15m  MAG No. k141_56130
cccttggtcagatcgacaggtgcggccttgatgccggaaccgccaatgtcaacaccgaaagcctgtgcagtttcaatcatcgttgaccttcctttccatacgttttcatcagttcgtagggttgcgcccagtctaacgcgaccatcacgcggacgcgccggacgggccggggcatggccgtcactcaagcggcggcatgggcttccaggtggggtcgtgcatcagcttgcgcgagtcccaccagcccttggcaatctgcaccaaaccggtcttgaggtgttcgcgatccaccatcaccaggcgaatgacttccttggccgcggtgagcacggtgcccagtccaaacaccagcggacggaagtcgccgtaggtcatgaagtaccgggccatatagccgcggttgcgcatgatgtgataccggttcatgtcggacgtggagttgagctggcgcacgccggcgatatcccaattgccgatttcgcgcgtacggcgcaggatcacgtcgggcaccacaatcgggttggtgaccttgctggcgcggtagccatacatcgtgtcatcccagtagatgaagaagcgcgggtccggcagaccgatttccgtgaccacacggcggttgaacaggccgccttcgaagcacagcgtgtccatcactcggtatccggccgggccgaatgcggcgggcgcgatcgggttcggaatgcccagcggcacaatgaagtcgtactgccagtagaacgggccgccatcgtaatcgaatcgggatccctgaatcacctcgtgcttgtcggtccacttggacagcttggcaatggcgtccggcagcacggccacatcgtcatccatcacccagaaccatgcggcgcccagatcatacgccttggccacgccggcggagaaaccgcccgcgccacccaggttctcggtctgcggcgcatagaccacgcgctcttcgttgccggactggtcggccacggtggtgccccactggccggtcaccttgccggcaaacgcagcgaccatgtccgccgtctgatcggactgctcattgtccacgatgacaatgcgccacggtgcctgctcaagcgccagaatcgaatcgaacagtacctcgagcagctgctgacgtttgtaggtggtgacgatcagggcaagcttgtcaatggtgttgttgggtttcttcacttcagccatggctcccattgttgcacttgaccggcacaagacgaatttctgcacagtgaaacgcgggttgcgtacgtccggcgcatggcgtatgaataagcctgtcagtttcagggaaggtgcaattccttactggcggtaacctgtaccccgggtttcataacggggatggcgggaagcccgcgacccgcgcaagcggctgatccggtgagattccggagccaacggtatagtccggatggaagaaacgagggctcattatgagcgtatcttcgcgtatccgcatgcaagttgttcgttctgtggcgcccgaggccgagggttcggccagcgcgtccaccgccagcaccagcgccaaactcggctcgcacaccactggtgtggccgattccggccgctggtccacgcgccgtatcgccatgtatgcactgttcgtggcgctggcgatggtcaccagcttcattgaattcccgattacgccggtcacttggctgaagtacgacccgtccggcatcgtctgcctgatcgccggctttgcgtacggtccggccgccgccgcaatcgtgtctgtgctcggctttgtgccgcacatgttcgccgacccgtggggttcgctgatggctgtgctggtggcgctgttcctgtctgtgccggccgcgttcatctaccgtaagatccgtacgcgcaagggtgccgccatcggcattctggtgggtgcggtgctggccatcgtggtggcgctggtgggcaacctcatcatcacgccgatttacgcgcacatgccctaccaggctgtggccgcgatgattctgccgattctgctgccgttcaacgtggctaagatggcgattcacgccgtgatcaccttcctgatctacaagccggtctccaacctgctgtccaagcagcagtgaccggcctgagacgggcctatgcccgccacgactaacgaccactcaacgaccactcaaagaacaagaacgcagaactccggcccttgccgggattctgcgttttcgcctatcagttacggattgctgtttcatgaccgttgcaccccattccttcgacgccgacgagttccacgattccgccgagcccgctccccccgccgccgtactcaaggacattcgtttcagctatgaccgcggcacttcatgggctttggatggcgtttcgctcacggtccatgccggcgagcgcctatgcttggtcggtccgaatggatcgggcaagtccacgttggcccgtctaattgcgggattgaccgcgccggacggtggcgaagtgacgctactggaacagcgcgtgtacgcagccggcccgaatgccgacgcctatcgcgctgcccgccgcggcatcggtatggtgtttcagaatcccgaggatcagctggtcaccaccgtgttggaggatgacgtggcttttggcccggagaatctcggtctggagcgcgggctcatcggcgagcgcatcgttgattcattgcaggccgtggggttggcgaacttgcgtcagtccgacccgacccgtatgagcggcggacagcagcagcgcgccgccatcgccggcatgctggccatgaacccggcgatgctggtattggacgaaccgaccgccatgctggacgaatccgcacgcgctgaagttatgcgcattttggatgatttgcaggcgcgcggcaccactattgtgcatgtcacgcatcatccggatgagaccgttcatgccgatcgcatcgtgcacatggaggccgggcgaatcgttggtgtcactgcagccgccgataatcgacccccgctagcggaggctgtctcgcaaagcgagaccgagggtggtatcggcacagaagccgcccccagtcgtcctacgaacgacagcccccgccagcggaagcgcgaagacggctccgaactgccgctgctctccgacggcatcggtgatatgacgaaccccattattcgcgtctcgcatctgacctatcgctatccttcggccaaacgggcggttatcgatgacctgtcgttcaccatcgcgcgcggtgaaaccgtggcactgatgggcgtgaacggttcgggcaagtcgacgctggtgcgcatgctgtgcgcgctggccgcgccgaccgccggcagcatcgaggtggccggcgttccggtggcctcgaccggcaaacgcggtcgcaacgcgcgtccgaagccggcgaatcgcaggcaattggcgcaattgcgccggcatgtgggttacgtgatgcagcatccggagcatcagctgttcgctgacacggtagccgaggatgtggcgtacggcccgcgcaaccaggggctcgccgaggccgaggtggccgaccgtgtgcgcgaatcactggacctgctgcatatcgggcatcttgccgaccgctcccctttcgacctgtccggcggacagcagcgattggtggccatcgccggcgtgctggcctgcaatcctgacgtgctcatcatggacgagccgaccgcgagcctggacgtccaggccaaggagcgcatccatgagctgttgcgcacgctcaaatcgcgcggcgtgaccgtgctcatcatcacccatgaccgagcggaggccaagcatatcgccgatcgcgtggtacgtatgccgattgccggcgcggctggtgctgagagcatctcggcaaccgagactgccttccccgccgagtccgtctcccctgacaaacccgcgcactcggtgatccaccgacttgacccgcgcgtgaagatggtgggcttcctggccgccatgttcacgatgttcgcggtgaacacacccctccagcttgcgctgggcatcgccatcaccctggccgttatcgcggcggcacgcctgaacccgttacgggtgctcgaatccattcatccgattctgattctgctggtgctgatgggcgtggtcaatctgtttgtggtgcgcaccggcacgccggtggtggcgctgggcccgctgagcatcaccgatcagggcgtggccatagccgtgctgtacgcctgccgtttcgcgttggtgatcatcttgggcgcggtgttcctcaccaccaccacgccgaccgccatgaccgacgccttcgccaccctgatcagcccgctcaaccggctcggcatccacgcccaggagatcgcgttggtcatgagtctggcattgcgattcattccaacgctgaccgacgagacccgtgccatcgtcgatgcccaatccgcgcgtggcggttccatcgaaaccggttcgctggcccagcgcatcaaggcgatgagcgcgattatcgtgccgattttcgccggcacgttgcgtcacgcggacaacctgagcctcgcacttgacgcccgctgctacgaggagagcatccgccgcacccactggcgtgccctgaccatcgccgcgcaagatctcgtgttcgccgtcgccgtcatcgcctacatcgccgccatcatcgcgctgtagggcggcaaacagcacagacagcaccggttgctatgctggtgtggttatacgaaagatgtaaggaaattcccatggcattgaccaagaagcaaatcaagcagctgcgcgcgatggcgaactcactgaagcccctgttctatgtgggcaagaacgatttgaccgagtcggcagtcaatcaggccgatgagaccattgagaagcacgagctcatcaagtgcgcggtacaggacggttcgggcctgaccgccaaggaagccgccgccgagcttgccgagcagctgaacgccgaagtggtgcagtccatcggcaatcgtttcgtgctgttccgtcgctcccggcgcgacgatgtggagcatatccgcttggtgcgcgagtaatgttcgccccgctcgatcccgtagcttgatatgagtaatggcggttggaatcagtccgattccaaccgccattactcatattcgcccagcgagcaccgtcactgatccaagatggacccgacgattcccacaacaatggtcagaaccaaggaccccagtaccgaccaccagaaaccgtgtacgaagacgcccacgccgaacagactgaccgccagccagctggcgagtcgcatgaacagccaattgataatcaaggtgaccagcccgagagacagaatcgcaaacggcagtgcgatcagatgcacaatcggcttgattgacgcattaatcagcgccatgaacaaagcgaacgcggcgatgccgagaatcggaggctcccccaccggggtcatgccgggagtcaccgcgaccatgacggcggcggcgatagtcataatcaaccagctggtcaggaaacttttcatggcccaatcgtagcgcggcaggttttactattaggcaaaacgtgagatgatgttgtgcagaaacggtaagaaggtactgccgttcccgattgagaagggatagacccacatgactgataatcaacaacaaccgtacggttcggacagtgttccgcagccggcacaacctgcacagccggcacagccgtcgtacggccaagatgccgcacggcagccgcaaggctatggcgccccacagcccgccgcatacgctcaacccgccgccggaagctacggccagcagcagccgcaatacggccagcccgccggcgcatacgctcagtctcagtacgctcagccgcagtatggccagccgcagtatggccagcccgcacagcccgcagcgggctacggccagcagcccggctatggacaggcctaccagcagccgaatgcctacgcacagccgcaatacaccgccgctccgtatgccgccgccccggtgtggcaatcatccaagtccaagttggctgccggcctgttgggcatcttcctcggcggacttggtgtgcacaacttctatctcggcaacaccggcaaggccgtggcccagctgctgctgacgcttgtcggctggattctgctcggacttggcccaatcgcagccgccatctggggctttgttgaaggcatcatcattctgtgcagcaagcccggctcgccgtggcataaagacgccaacggctacgaactatcagactgagactgacctcgggccacgttcattgggcctctgatcaaccacgcctctgcaggtatcatttcgatgccgcagtcgtagcgggatgcgacacgccggccgtgtacatgagttcatgtacacccgatacaggcgaatcagtatcgcacgagattcaacagttcctgctgtttggcatagcgggaaacgttggtcagggcgatgcggatgatgtgttcggaagtcttttccaaatgattgccgccggccacatgcggggtgatcaggcaatgcggctcatcccacaacggactttccgccggcaacggctcaggctcagtgacgtccaatccggcaccgtggagccgtccattgtgcaaggcgtcggccaaggcctcgggatcgatggcgtcgccacgcccggcattgatcacgatggctgtggatttcagacgccccagacgatccgcattcagcagatgatgggtctgcggcgagcgcggcaccgccatcgccaccacgtccgccaatggcagcagtgcttccagccgctcgaagccatacatcttttcaatgcccttggccggcacgtccgcatgacggcgcacgccgaaggtacgcatacctacggattgggcaagctgagcgaaatgcgacccgatgtcgccgacgccgataatcagtgcgatgccaccttccgggctcaataccgggccttcatcctgccactgatgatcgtgctgattggaggcataccggttgaggttcttcatcaatgcccacatggtggcgaacatgtgttccgacacgctttggccatacgcgccgctcgcattggtgaccatggtgccgcgaggcagcacacccgggcggatgtacgcatccacaccggcgctgaaggtctgcaaccattcaagacgggtgtattgggaagcctgcgagaccggaaagttgccgatgactgcggtagctcgggagcgaagctcctcgggaacagcggccgaccagaccatgtcgccgcagtgcgcttcgtcgcccacgaattcctgcggcacatcgcgggccgccttggcgaaagcgcgccgttctccttcgttgagtggcaggcagttgacaatcagcttatgcgtgttctcaatacccatggttcaccaaactaggcggcagggcggatattatcgcgtgtttcctcatgctgaaccaatgccgaa

SEQ ID NO: 742 - DNA, 9086 bp, Unknown
  R14_15m  MAG No. k141_56257
cggttcgcatatccctcgataagtcgaatctcgttctccacgcgcgaacggacccgcagtcgcatacggtcgatggcaccttcgatgagctgcgactgctcacgcacatccggcaccacgcgcttggccgcatcggtgggggtggaggctctaagatcggcgaccagatccagcaacgtccagtcatcctcatgcccgatggaggagattaatggtgtggtgcaggcatacgccgcacgaaccacacgctcatccgagaaaccgatgagatcctcaaacgagccgccgccacgggccacgatgatcacatccacgctcgggtcggcatcaagttgtgcaatggcctgaaccacttcggccgggcattgctcgccctgaacatgcacatggaccaccttgaaggttacggaaggccaacgaaggttcacattggtgatcacatcgccttccgcacgtgcctgaggtgcgcaaatcaggccaatagtcttcggaaactccgggagaggcagtttgtgatcggcatcgaacaggccctcgcccttaagctgcttgcgcaattcgtcgatcatggccttgaggctgccaccggctccgaccttgagaatcgtgtccccgcgcaacgacagcgaagtgcgcttcatccacaggttcggtttgccatgaatcaccacgcggtcgccctgaacgaactggctggccgcggccgcgaacctgccgaagccattgacttccatggcgatatcctcgaagtcgtcgcgcagcgtgatgtaggccgagccggcgcgacgggtattgatctgcgtgatctggccggtgacccacgcggacggccatcgttccacggcaccgtagaacttctggctcagcacacttaccggccacggattttgcgcgctggtttcagcggcgcgtgcaggcagctgatcgatagggcgaggctcattcggcagattgatggtgccctgatcaggcgcgaaagtgccttgacccggctcaaagccagccgaggccagtgaagcggcggtcggtggacggccggtagatgggtagcccattgcagtagtcatgcactccactataagtgcgttggttgatgacggtaaatatttaccgtcgcctgaaaacggtgtgatgatgaatgcgagaaccgtacgaagcgatgtatcagccgatgatggagatggtctggtgcatcagaagaaaggagtcattatggcgaagaaacgggtgctatgaagaggagtgagatatgcgttgcgctgacgattgagagtcgttagtgagctcgctgtgcgacacgcgagcagaaaacagttacgctaatcacacacttgtggttttggcggaaaatagccgaaaaccctataaatagttcgacacaccactgttgagcactagatatagtggtggggatgccgtattcttctagaggttcaaaaaacgacatcaatgtaatttcgtgtggcccacgtcgagtgcggccaaaatgcggaactcaggagagtgttcgccttataggaaaggggtgcccgatgggcgcacaggtgttggaggaaatcgtcaccgataacgagaccaaggtggccgccaaggcctccaccgtgctcgttgagaagcgtgatggtcgtgtggtcgacttcgaccccattaacatcatctctgcggtcaagtctgctttcggtgacctgaacaaggaagtcggccccgaagaagatgccatgatccgtggtttcgccaaccaagtcgaaggcgaaatcaaggggcgttacgccggccccgccaagatcgaggacatccagaacctcgtggagcacgccctcattgacgcccacctgtacgatgtggctcgcgcctacaccaactaccgtctcgacaaggacattcagcgtgccaaggccactgatgtcaacgaggccgtttcccgcttcatcaaccacgacccgaccctgattcacgagaacgcgaacaaggattccaacgtctactccacccagcgtgatctgctggccggtgccgtgtccaaggccgccgcgttcaacatgctgccgccggcggtgtccaacgcccacatgaagggcgacattcacttccacgatgccgactactcgccgttcactgcccagtccaactgctccttgccgaacttctgggacatgttggccaatggcttcactcttggcaacgctccgatggcttccccgaagtccatcgccattgcggccacccagattacccagatcatgaaggacgtggcctccagccagtatggtggccagaccgccaaccgtgccgacgagcatcttgcccagtatgccaagaaggattacgagaagttcctcgaggaagctcgtgagaccatccccgacggcatgccggttgaattcgcccgtcgtcaggtcgagagcgccaagaggaacgagcccgccaagctgcatttcggttcccgcgaaccgctgccgatggacaccccgttccacaccgacgttgacgaacttgagcaggagcgtgaaatcctcgccaagattcgtacccgcaaggccatctatgatgccatgcagaccatggaataccagatcaactccaaccgtgtgtccaacggccagaccccgttcgtgactgtcggctttggtctcggcaccgactggttctcccgcgaggtgcagcgcgcgatcctgctgaaccgtattcgtggcctcggcaaggaacaccacaccgccatcttcccgaagctcgtctttactgtgcagcacggcgtgaacgccgacccgggtgacccgaactacgatttgaagcagctcgccctcgagtccgccaccaagcgcatgtacccggatgtggtgttctacgagaacatcgtcaagatcacaggctccttcaaggctccgatgggttgccgctccttcctgcagggttggatcaacccggagaccggcaaggacgaggaggatggccgtatgaacctcggcgtggtcaccgtcaatgtgccgcgtatcgccatcgaatcccacggtgacaaggctcgcttctggaagctgttcgaggagcgtatggaagtcgcccatcaggccctccagttccgcatcatgcgctgcaaggaagccaccccggtcaacgccccgaccctgttccgcttcggtgcgttcggtcgtctcggtgccaacgacaacgtggaccagctgttcaagaacgagcgtgccaccgtgtcgctcggctacatcggccttgccgagaccaccgcggtcttctacggcaagaactggattcgcgaccacggctgggatccggaaggcaaggagttcgcgctgtccatcgtcaagcgcatgaacgagctgtgcaagcagtggagcaaagcggagggctaccactattccgtgtactccactccggctgaatccctgaccgaccgcttcaaccgcatggaccgtgaaaagttcggccgtatcgaaggcgtgactgaccacgacttctacaccaactccttccactacccggtgtggttgcagcccaccccgatggagaagctcagctacgagaaggacttcccgtactacgcttccggcggcttcatcaactactgcgagtacccgtgcctgcaggacaacccgaaggcgctcgaagccgtgtgggattacgcctacaacatcggcatcggctacctgggcaccaacaccccgatcgaccactgcttcgtgtgcggcttccagggcgactttgagccgaccgaggaaggcttcaagtgcccggagtgcggtaactccaacccggacaagtgcaacgtcaccaagcgcacctgcggctacctcggcagcccggtccagcgcccgatggtgcatggccgtcacgaggagattgcccaccgagtcaagcacatgagcggcgaaaccggtcgtgtgacgctggacgacggcaccactcgcgagtggttcgaagaggccaagtagggttattcgtgagtaggctcccctctctgaggggagctgtcagcaaagctgactgaggggagtccgaggagctattccgaagctcccctcagtcgcctacgacgacagctccccctcaaagaggggaactaatgctttccgcaaggagggaatcatgccggagttgcatacgaccaagcccgaacccaagcgccatgactttgcggccggcgagaccgggcgtggcccctccgtaccctccaacggtcttgccaacgatccgaaagccggtcaatgggatggccggcgcatgtccaagcggatgatcgccgactacaaaaccttcatcgtcaccgacggagaaggcgtgcgcaactccctttacgtctccgggtgccccttccactgcgtcgactgcttcaacgcctccatctgggatttccaagccggccacgaatacacgcaaaaacttgaagacaaaatcatcgaagatctgaaagccccatgggtgcaaggcattacgttccttggtggcgagccattcctcaacactcccgtgctggtgccgctcgcacaacgtatccgccaggaattcggtcataccaaagatatctggtcgtggaccggctacacatgggaagaactcatgcgccccggagaaaccccagacaagcttgaattgctacatctcatcgacattctcgtcgacggccgctacctcagagaccagaaggactcgctgctgcaattccgcggctccagaaaccagcgcatcctcgatgtgtccaagtccctagaagccggcgaaccggtcatctgggccaagctccacgatcaagaacgagatatccccgaaatctatttgagagaccgcgaagccggcgaaggccaacaggcctcgtagtagcaggtccggaatgccgcactcagcaatatcgtcggaactgttggggaacgcccttcccgtgagcgaaatcaccatgcccggcgtcacgttgggcaggtggtcggactaatattccagaagaagtagccgggcgaagccgtccgcaggtatctgccagccgtcccgaaacggctcatgatgcctgaaggcgcacatacccggaagtcggaattaagaggaacacatggttgacatcgtcactgacgcgagcgtaaagcccgcttcacacccgaagcccctgcgtgtgggattggacatcggttccaccaccgtcaaggccgtggtgcttgatcagtccgattccctgaaagacaccctcttctccgattaccgacgccaccacgccaacgtgcgtgccaccgtggccggcctgttggtcgacatccgtaaagagctcgtggaactaggtcgaggcgatgagccgattcgcctgtctatcaccggttccggcggtctggcgcttgctgacaatctgcatgtgcctttcattcaggaggtcatcgccgaaaccgaggcgatcgacaaggaatacccgcaggccgacgtcatcatcgagctcggcggcgaggacgccaagatcacctacctgaagcccacgcccgagcagcgtatgaatggttcgtgcgcaggcggcaccggcgcgttcatcgaccagatgtccacgctgcttgacaccgacgccgcaggcctcaacgagatggccaagagctacgagaacctgtatccgatcgcctcgcgttgcggcgtgttcgccaaaaccgatctgcagccgctgatcaacgacggcgcggccaagcctgatctcgccgcctccatcttcaccgcagtggccacgcagaccattgccggcctggctgctggccgcccgatccacggtaccgtcatcttcctcggtggcccgctgttcttcatgtccgaactgcgcgccgccttccagcgtgcccttgaaggcaaggtcgacgagttcatcgtgccgaccgacgcccacctgtatgtggcctacggttcggcattgcaggccgacatggattccgacgatcagggccaccatttcgaggcccacacctgcgatgagatcctcatgcgtctggacgagctgaagaacctgccctccaacacgcccaccatgccgccgctgttccccaccgaggccgaccgcgaggacttcaacaagcgccaccacaaggaacacatccacatcggcaccctcgaaggcgcgcatggcccgcacttcctgggcatcgacgccggttccaccaccatcaaggccacgctcgtcaacgacgaccgtgaaatcgtctggtccagctacgccaacaacgaaggcagcccgctgaccgccgccatcaacatcgtcaagaagatccaatccgagctgcccgaaggcgcatggatcgcacgctcctgcgccaccggttacggcgaaggcctcatcaccaccggcctgcacctggacgagggcgtggtggagaccatggcccactatcgtggtgctgaaatggtcagccccggcgtcaccgccgtcatcgacatcggcggccaggatatgaaatatctggccatcactgacggcgtcatcgactcgatcgccgtcaacgaagcctgctcgtccggctgcggctcgttcctgcagaccttcgccatgtccatgggcctgacgattcaggaattcacccaaaaggctctggcttccacccatccggtggacctcggttcgcgctgcaccgtgttcatgaactcctcggtcaagcaggcgcagaaggaaggcgcctccatcgaggacatcgctgccggcctatgctactccgtggtgcgcaacgccctgtacaaggtcatcaagttgcgtgattccggcgaactcggcgacactgtggtggtccagggcggtacgttcctcaacgacgccgtgctgcgcgccttcgagctgctcaccgaacgtcaggtcacccgcccgaacatcgccggcctcatgggcgcgtttggcgccgccctgaccgcccgcatgcactatcaggatgaggccgaccacttggatgtggtggttaaggccgatgggtccgaggaacagtccgaggctgagcccgcactcaagtccgagcccaaggccgcagccttcaagaagaccgagccggccaagcccgaagtccatgtcgttgtcgtggacggtgtgacccacaccgccagctccatcctgaccggcgacgcactcgacaatatgagcatgaccaccgagcgtgacgtgtgcaagctgtgccagaaccactgcaagctcaccatcaccacgttctctgatggttcgcgcttcgtgaccggtaaccgttgcgaacgcggtggtgacgccaagaagaagcgttccgaccgtccgaacctgtacgactacaagtacaagcgttgcttcgcctaccgccgtttgaccgacaagaaggccactcgtggcgagatcggcgttccgcgcgccctcaatatgtacgagaactacccgttctggttcacgctgctcacttcgctgggcttcaaggtgatgatttccggccgtagctcccatgaactgttcgagaccggcatcgaatccatcgcttccgaaaacatctgctacccggccaagctggtccacggccatatcaagtggctgatcaacaagggcatcaagaccatcttctacccgtgcgtgagctacgaggagaacctcgtgcccaacacggacaatcattacaactgcccggttgtggccaactatccgctcgtcgtcggcgctaacatgcctgagctgcgcgaggatgacgtgcgttacatgcacccgtacttcaaccttgccaaccatgagctcatggttgatcgcatcgtcgaagagtttgcgtgggccaacgtgacccgcgaagaggccgaaaccgcggtcaaggccgcctatgccgaagacaaggtcttcaagcatgacgtgcagcagaaaggtttgaccgcgcttgcctatatgaaagagcacaactgccgaggcatcgtgctcgccggccgtccctaccacatcgaccccgaaatcaaccacggcatccccgaaaccatctgctcgctcggcatggtggtgctctccgaggattccatctgcgaactgcagccgggggagaagctcaacctcaccgaattcctttccgagggcgaagccgacccacgttccaagaacgccgccggattccgccatgtaggcgaccgcacggtcaccaagatgccgctgcgcgtcaccaaccagtgggcctaccactcccgcctgtacgcggccgcacacttcggggcctcgtatccgggcctcgagcttgtgcagctcacttccttcggttgcggcctcgacgccatcaccactgatcaggtggccgagattctggccgacaaggcggacgtgtacacgctgctgaagatcgacgaggtctccaacctgggtgcagccaagattcgactgcgctcgctcaaggccgccgtcgaggaacgcgaagccaataaggctcgtgaagaagctgctgccaaggcctcggaagacaagcaggccgccgccgaacgtgccgctgaagaggccaaggtcaaggccgagtccgatcttgaagcggccaaggccgtactcgctgaagcgcaggccgccgttgaagccgcgcagaagaaggtcgatgctgaggccaaggctgtgcaggacgccgccaagacggcacaatctgcacagtctgcgtccgtacagggtcccaagcccaccggcttccgcaggaccggttccaccgcgccgactccaggccgtcagattctgctcgatacgaccatggccgccaacccgaagcttaccaagtcgatgcgtgaggcctccaagcgtgccgccgaacgcgacctacaggccgcagtcgcccacaagaatggcacttcgggcggcaccaccggcgtggcgaacgccaagaatgtcaagaagtccggccacaacaacgccaccatgtcccgatacgcgcatcgtgagaagttcgtcaaggacatgaagaagaactatacgattgttggccctcagatgagcccgattcatatgtccttggtcgaagcggtgattcgttccggtgggtacaagttcgacatcctgaagcacgcgagccgtggcgatgtggaaaccggcctcaaatacgtgaacaatgacgcttgctacccggccatcatggtcgtcggccagctcatcgacgcgattctggaaggcaaatacg

SEQ ID NO: 743 - DNA, 13130 bp, Unknown
  R14_15m  MAG No. k141_56514
caaccggttaccatcgtgaatcccggtgggcggcctgcaatggatctgcgcatgattgagccgttggaaaacatgcgtgatttgcagtccgtgaatgccaagcagcgtgtcggtggcgtggatgctgaacggtccgctccgcatatcagtggtgtcacgccggccatgcagcgacttgctgaacgcaggggcattgtgccggtggatgatagagatgtttcttcttccacttctggggacgattctgatgcgagtgatgcgttcgattcctccgcgttggttggagcggcgggcgaccgtacctccggttccatttggcccgtggtggaacgcagtattttggatgagattctcgcgcaccgcactacattggtgttcgttaattcgcgtggtgtggctgagaaactcactgcgcgcctcaatgatctctatgcgcagacccggcatggcaccaatcccgacactgtgcgggatctgggctctccggaaggccgcgaagggttctccacgcattacgatgctgtggtcggctccaccaccatgcttgtcggctcacatgagggcgatgatgtcatcgccatggctcatcatgggtcggtttccaaagaccgtcgcaaaatgattgaggaacggctcaagcgtggtgaattgcgctgcgtggtggccacctccagtttggagctaggcattgatatgggctcggtcgacttgatgattcaagtcgatacaccgttgtcggtctcctccggattgcagcgtgtaggtcgtgccgatcatcaggtcggtggcgtctctcacgcattgttctacccgctcacccgtcagcaaatcgtcactggggccgcaagtctggaagccatgattgccggcgatatagaaccattggccgtgccgcgcaatccgctcgatattctcgcccagcagaccgtggccgctgcctcgatgcacgatttgaacgctgatgactggtatgccacggtgctccgtgctgcgccgtttgccgaactgccacgtgacatgttcgatgccgtaatcggcatgatgtccggcgaatacaacagagaggaattctcggccttccggccgcgactggtatggaatcgggataatggcctgatttccgcccgtcccggttcgcagaaagtggccgttacctctggcggtacgattcccgatcgagggctgtacaccgtggtcctgcctgaggcggacgccggcaaaggccagcgtcgcgtcggcgagttggatgaggagatggtctacgaatcgcgcgtgggcgatgtcattacgctcggcacctccacatggcagattcaggaaatcacccgtgatcgtgtggtcgtgactccggctccgggccgcaccgcccgtctgccgttctggcacggtgaaggcgctggccgtgactacggtttcagccgtaccatagcccgcttcacccgagaaatcgccgccggattagacgtgaagcggactggggggagttctgccgcagaaggtccagctgtcccaaccttcatcccaacaatcctcacccgtctccaccgagacggcctagaccccaacgctatcaccaacctggcccgcctactctccgagcaacaagccatcaccggcacagttcccagcgaccaaaccctcatcgtggaacgggcccgcgatgaagacggcggctggcgcatcgtactgttaagccccttcggccgccgcgttcacgaaccgtggtccatggccatcagccgcagactgcgccaacgctacggtttcgatgggcaggtatatgccgccgatgacggtatcgtcattcagctaccggacggtgacggacatattcctgctcaagacctgttccttttcgacccagaagacctcaaagcagatgtagaacgtcaagtgggcgagtccgtgctattcgccgcacgattccgcgaatgcgccgcccgatcactgttcatgccgcgatccgacccgggccgtcgcgtgcccctatggcagcagcgactgcgcgccgcacagctcctgcaagccgcacgtatggtcaagaacttcccgctgctgctggaaaccgcgcgcgaatgtttgcaagacgtatacgacatgcccgccctgaacgaggtgatgaccggattgcaagccggcaccattaccgtgaaggacgtggagaccgagccgccatcgccttttgccgagaacattctctttggcttcgtcggcgtggtgatgtaccagtatgaccaacctcaggccgagcgcagcgcgcaactgttgtctctcgatccgcacgtgctcgaacgcttgctcggcaccaccgacatggcacaagtgctcaacccggacgtgattcgcgaagtcgaacaggaactgggggagcgcactttctggaatgaacttgccgacgatgatgtgactggtcgcgtgacccgttacgccaaaacccatggtcctttcaccgccgatcagctcatggccgatctgcacctcgatgctacggatgccgtgcatactttggatgtactggctgccaaaggcgagttgctgcaaggccactttgtagatgatgacaagcaaggccaacagtggctccataaggacgtattccgccgcattcggtctcgctcattggccaaggcgcgtaaagcagtcaagccagtagaaccagaggcgttccagatgtttcttatcgaccgacaaggtatcgggccggtcggcggcgaacgatatgaaggtgccgacgggctcatgcgcgttatcgagcagctggagggcatagcactgcccactgcactctgggagtcggcggtattccccgcacgagtacgagactaccaacctgcattgctgggtgagttgctgaccagcggcgatgtggtctgggtcggctcaaaaaccgggggaaccagtgcgatggaccccggtgaggttgctttctatccggcggattcaatattgctcagcggtgtggaacatggtacgacatcgaacgcttcagacgccaccatgccggaagcgattctgaccgcattggactcagggggagcgttccatgcccgtcaactggtggatgccgccaaacgtgtgtggaatgaggccgcggagccggacatcaatccaaacaccggtgaaatcattccgcaagagtggagcgaacagcagttcaaggatgccttgtggagcttggtctggcaaggtaaggtcaccaattccagcttcgcgccggtacgtgcattaaccgcaggcgcagcaagcccgcgtaaatccactacatcacgtcgtcgtgggcgtgtcgctccgattcaccgagccactacggatatgacgttaggaggtttgtggtctgccgtaatcgggcaagctgaagccgaagacactgatcagaccgagcaggcgctcgcactggtcgagacgttgctggacaggtatggcgtcatcgcgcagccggtgatcgacaaggaaaatatcccgggtggctactcagcgttgtatccgatattgcagcgcatggaggagcatggtcgactggtacgaggcatgttcgtccgtggtttcggcgcggcccaatttgccgagcgcgacaccgtggatgcgttgcgtcatccgtcagagcctcgcggccagtccgtggtggcattgagtgtgctcgaccccgcaaatctcagtggctccgccatcgcgtggccggacgcgcctgccggtgcgggtaaaccggcacgccgtatcggagccacggtcgtgctcaatgcgcaaggtgcgctactatacgcggctgccaaagccaagcacttgacggcgttcgatcaatcggtcggccatgaacccgccgccaatgattccgacgaacaaatgcgcaaggccgccacagaactggcctacgctctcaaacgcaatggcaccggttccgtgacattcagcgacatcaatggcgaacccctcaacgcccgtcaccccttcgcccgcatcctccaccagtccggcttcacccccgttccccgaggcatgcggctgtactgattgagcccagctatcgaatgcggtagttggagccgcgttgggtcatgatgaggccggcgtgggtgagcttcttatccagtgtgtagagggcgttcctgaggagcccttgttgctcgaagaatgggccaccgacgagcttgaccaattcgctggtgttgacaaactggccatcagccttgaccagtgcttcaagcaaactgtattccagacgggacagtgaaattgcggtgtgtgtggatgcgtagtaggctttgcgattcgtggtatccaacgtgagattgccacgaatgatcatggtgggggagtcggtggcaagcgagccgacgtatgagagcagttcgccatcggagaatggtttgctcagtacggcatccgggtgtcgtacattagctcgtgcgctagcggcagcattgtccgtgcactgttcggcttcggcatctgagttgtttgcgtgtgaatccgcgctgaaggagctgtagggcgtctcttcgatcggggcgtactcgtcaggcagcgctcgccagcggctgccttcgccgatggttttgctgagtggcgtcgaagtcagcagcaggattttaacggaggcacgggcattgtgaagggattcgatgagttgctcggtggagatgccgagcagggattcatcgagaatcactgcgtcaaatagctccttggtgaccgcggcgagcgcgatactgccggtgcttgccaaggacacctcatgacgacaggcaagcagcgcaccacgaatggcgcgggccaacggttcattggatacggcaaccagtagtctcatcgccacctccttgatgcttagtgtaggtcgggtttagggtctcttctctatgtgtttggctcactatcgttcgctcctcgcctacaaacaccccactgggggtgtttgctttacggctcggcccatcagagggagcttaattgaggttacgcaatgaaggcgatgggggaggcgaggtccactccggagccgtctcggcgcatatcgggcttgggaagctcgaccggggagcctgcggatgtggaggcatgcaacgggtagagaccaacccaggcaagaatcagcgtgttctggcccttgaggaagcgctgggagcgtacgccaccggtagcgcggcccttggtggggtacatttccagcggggtgaccttggcggcgccgttttcggtgccgggtagtgcatcggagtcgccggccacggtgagcaccaccgcgccggagccggaagtcaaaccgttctcgccctcctcataggtccatgccaccttgccggcgggaaccacgttgaatgccgccacacgggcgccctcggccagcttgatgccggccataccgcccgcggtgcgaccctgcgggcgcacgttcttcgcctcaaaggtcagtagcgaggaatcggaggagatgaacaccagacggtcgtcatcctcggccacggcggcgaataccacttcgtcgccatctttcagatcaatgacgggccaggaatccatggtggtgggtgcctcacggttccaacgcttgatgacaccgttacgggtaccgatagccagcgacggcaacggcttggcctcggcggccccgccatcctcgctctcatccttggcactggccttgccggacgtcggctgctccatggcgatcgccgtaatcacgcgctcgccacgaatcggatcggtggattcggtcatgccgatcagttcgtcggcctgaactcctcccttcagcgacaatgtggcggcagcgggcaaggcaggcaaatcaaccacatgcgcgagcaccaggcggccggccgacgtgaccagcccgtatgtggcgcgcgtggaggtctcgaagattgtggtgatttgatcgtctcgcagacgttcatcggatgtggaccgtacattgaacacgtccatcgcgcttggcgtggtacgggcaatcaaaccggtggcgctcatcatcaccacgcacggctcgtcctcgatcttcaaggctccggtcagcgcggactgttcgccggtcttcttggctgcggctgcggctgcggccacatcggcttcggcggaggaaatcgtggtggcggccttcaccgcttcgagcgcggacttggacacacccgaagccccggcaccctgcgccacgaccggcgtcaacgtgccatccgggtcggcatccagcagcacggtgcgacgcggcgagccccacttggcgaccgcctcgtccatctcgtcggtgaccacatggtcgagcgcttcggcggaggccagaatgcgggtcagctcctcgatgcgcttcttcaggtcatcgcgttcggcctcaagttcgatgcggttcatcttggtcagacggcgcagacgcaggtcgaggatgtactgggcctggacctcgtccaggtcgaacacaaccatcaaacggcttttcgcggcatccgcatcatctgaggtgcggattacctggatcacctcgtcgatgtccagcatggccagcagcaggccctcgaccaggtgcaggcgttccagcgccttcttcttgcgatattcgctgcggcggcggatcaccacacggcggtggtccacccacacctgaagcatctccttcaggcccatcgtgtgcgggcggccctccaccagcgccacgttgttcatggcaaaattgtcctgcaacggcgtgtgcttgaacagctgcaccagcaccgcatgcgggtcgaaaccggtcttgatctcgatgacgatacgcgtgccgttatgacgatcggtcagatcgaacgcgccggaaatcccctccagcttgcggttcttcacgccgtcggaaatacgctcgatcaccttctccgggcccaccatgtacggcagctcggtgaccacgatggcctgcttgcgggccgtgacatgttcgatatgcgtggcggcgcgcgtggtgagcgtgccacggccgttggcataggcctcacggatgccgtcgcggccgatgatcgtgccgccggtgggccagtcggggccgggcacgtaacgcatcagttgttccagggtggcgtccgaatgcgccatgaggaacttggcggcgttcaccacctcgcccagattgtgggtggccaggttcgtggccatgcccacggcgatgcccgagccgccgttgaccagcagattcgggatggcggccggcagcacggtcggttccttgagcttgttgtcatagttcggcgtgaagtcgacggtgtcctcgtcgatatccgcgttcatgccgagggccgccgggccaagcctggcctcggtgtaacgggaggccgcagggccgtcatccagcgagccgaagttgccgtggccgtctaccagcggcagacgcatcgcgaacggctgtgccaagcgcaccatggcctcgtagatcgcggaatcgccgtgcggatggagcttgcccatcacctcgcccaccacgcgggcggacttcatatacgggcggtcgggagtcaggttcatctcgcccatctggtagacgatacggcgctgcaccggcttcaagccatcgcgcgcatcgggcagtgcgcgtgcgtaaatcaccgaatacgcatactcgaggaaggatttgctcatctcctcgttcagcggcgtctcgacgatatgctccttgaccgtgcgcggatcgtaggtttgcgcggacggtttgcggtgtgatgccatgaaactccctttcgaacgcccccatattagcgggagggcgcgaaacagtgcgcagagaacggttctcgataacaactgtgcgctggtttcggtgcgccaatcgcacatgtttgccgataaaatggcgtgattccagtgtttcagtcgatgtgcgtttgtttgattatgtgcgttggggcgcacagttgttattgagaaccgttctctgcgcactgagccaaggggaggggtgctacttgaatgggcaactatgagtgttgagacgccggatatggacgagttgctgcggctggtgcccactgtgggctatggggatgacgccccggccgatcggcgtgggggagcactgcacctgtcagccgtgctgcccgccttgtccgccgcgattgggcatccgactcccaccaaggtccacgccgatcccaaggcctgccagcgcgcgttgggactgcccgacgccgaatcggccatcgtggtgctcgtggacggcctgggcttctggaacctcgccatgcgcctcggccacgcgccctatctgcgttcgctgatgaacgaacgcgccaatcagcgtcccatcgccacctgcgctccaagcaccactgtggcggccatggccgcattcggtaccggaacctgcccgggactgaccgcaatggcgggctatacgcagctcgaacccgccagccataagctcatccaactcatccagttcaaagacgcgctggcacccaaaccagccaatccgcacattcctgtgccacccatggtcgatccgctcgaccagcagcgcgaggagacggtgttcgagaaacttgcggctcaagaggtgcgcgtcacaagctcggggttgcccaagttctccaaatcgccattgaccgaagccgcattgcgaggcaccgactatcaaggcaacgtcaccccacgcgatcgtgtgctggccgcctcacgtgcctcccgtacccccggcctgacctacctgtacatccgtgacgccgacaaagtcggccacaattacgggtgggattccgaacactgggtggccgcattcgaacatatcgacgcccagctcgcgctcctgaaacgcagcgcacccaaaggcacgctgatcgtcatcgtggccgaccacggcatggtgcaaaccgacatgggccagcggattgacatcgccgttgaaccgcagctcacccgaggcgtgtcactggtcgggggagagccgcgctcgctgatgctgtatgccgagtcggatgaacgacctgaggatatagcttgccggtggcgcgattacctgcaagaccgagccttggtgcggaccagggatgaggccatcgcggacggattgtttggaccggtctgcgagcgagtccggccgatgctcggcgatgtggtcgtgcaggcagcgggagccgtgaccctcgtcgattcgcgtacgcaaggagacaaagccacccacctgccgagcgtgcatggctcccaaacggcattggaaatggatattccctgcctgatcgatatggcctgattcggaaattcagtctccgaacagaatctcgtcccagcttggtacggccgaacgtcctgatttacgcttggccggtttggctggtgcctcgtgtttggtggcggcggattcggccgcccgctcctgctcggtggctaccagctgtgcattggggccacgccgtacggtctcgtccgaaatattgtcagaaccctgctctggtgccgtggcaggcgattgctgcaatcctgcggcagatgacgaaacagatccggcggtctgcgaagagaccgggctgggagccgtagcgtcatgagcctggttcgtggccggtgagatggacgtggataggtccaccgggggcatggaacctgtggaagtgacggagggccggatcgcggcaggccgtgcggccggaatcgaaggcgtaggcgccgcccaagcagacacagcgcgctcgatacgcgcggaacgtacggagtcgccgggcagttcaggaatcgtcggcttgagtttggaatccgtggctgattccggattctgttcgccgagcagttttcgagcggcattgttcaggctcatcacggaattgtcgtgcatattccacgtccattcggcatggatctcacggcccgcggaagtgaatatcgccacgatgcgccaaggctcaagtccgcgccgggtggatttccaggtcactgattccatgccgattccagcagaggccagcgtgcgttccaccagttcgctgatggtgcgcaccctgctgtctttgggtgccgccacggcaaggaattgttcgatggcgtactgtttctcggtctccacggccatggagaaacgacgtaccagcgtttcgctcagatgatatttctccgcgacacgggccggatcggcgccggcgcgaatcagcgactgtatctgggaaatcggcaaagtggactgctgatgcggctggggggcctgtcgcgtctcgcttctgacctgcttggcctcaagaatcgcccgttcgagcgtgtcgtccacgctcacggccatttccctgccgccaatggagaatacgaggtcccccgtcttgctcacgcgcacgaaacgggctttttcaagccgatcatctggcatattcgcaccactttccgtcgcaaagacattacttcttttaagtatgccccacgtgtcgaactttacgagtatttcaaatcgtgtatcctatgggcgagtacggcgctgaccgtgctatatatatcgacttacgaaccaaagacgacgaaaggaccatgatggctcaggattatgattccccccgcaataaggatgaggacgaggaatcgctgcaggcgctggggaagtcctcgcagaacgcctcgagcgacatcgacgacgatgagaacgccatcgccgaagactacgaactgccgggcgccgatttgagcaacgaggattcctcggtgaccgtcatccccatgcagggtgacgagttcatctgctcgcagtgcttcctggtcaagcatcgcagccagctcgcctacacggacgaggatggccagccggtgtgtgaggagtgcgccgcctgatggcgttcgacgagacctacaacgagcccgaatccaccgaggtcctggtcaagagcctcgaccccgaacatccggcccagctgcactatgcccacgcgggcgatgccggtgccgacctcatcaccaccgtcgatgtgacgctgaagccttttgaacgggtactggtgcccaccggcgtggccatcgccctacctgcgggctacgtggcgttggtgcatccgcgttccgggctggccgccaagcagggcgtcaccgtgctcaacgcgcctggcaccgttgatgccggctaccgtggcgagatcaaggtgccgctgatcaacctcgatccggaacgcaccgccgtcttccatccgggcgatcgcatcgctcaattggtgattcagcggtatgttgaggcccggttcatcccggccgagacactgcccggatccgatcgcgccgaacgtgggttcggttcgacgggagtggtgtcctgaccggattgggccggttgaatgaccaaggtgatgacggcaacgacggttgcggaaccaatgatggcgaacaggtgcatgcacaaggctccggttcgcggttacaatgaacttcatgacgagggaggtgactggcatggcagagattgatggcgagcagtacgccgcccgtaagttgggttgtgagatcagtgccgatccgctcaatccgctggatccaatcaagaaggtatgcaagtcccatcatcccggtgaggatttgtccattctcgaccgcgcgtaccggcgcgccgtcatccagcattgcacgcaacggcgcaagtcgggcgaaccatacatcatccatccgttggccgtttcccagattctcgcggatctgggcatggggccgattgtggtggcggccggtctgctgcatgatacggtggaggacaccgactacacgttggatcaatgccgtgccgagttcggcgacaccgtggccggtctggtcgatggcgtcaccaagctcagccagcttgaagtgggcgactccgcccaagccgaaaccattcgcaaacttgtggtggccatgagccgcgacgtgcgcaccttggtggtcaagctcgccgaccgtgtacacaacgcccgcacctggcgctatgtgaagaccacgtccgcccagaagaaggcgcgtgaaaccctcgacgtgtacgcgcctttggccaaccgactcggtatgaacgccatcaagacggagctcgaggaactgagcttcaaggtgctctacccgaagatctacaacgagatcgtggtgctggtggctcgccgagccggccagcgcgatgtgtacctgaagcagattctggcggagatcaacgaggatctcgacgagcagaacatcaaggcatacgtcaccggacgcccgaaggactacttctcgatttatcagaagatgatcgtgcgcggccatgatttcgcgaacatctacgatttggtcggtgtgcgcatcatcgtcgacaccattcaggattgctatgcggcgcttggtgccgtgcatgcgcggtggaacccggttcccggccggttcaaggattacatcgccatgccgaagctcaacatgtaccagtcgctgcataccacggtggtgggccccggtggcaagccggtggaaatccagattcgcacctgggacatgcaccgccgcgccgagttcggcatcgccgcgcactggaaatacaaggaaaacggccaggccggccgcgccctgagctcgccggacaagtccgaccgcaggcgtgacgagaagaaccaggagctttccgaagccgacaatctcaaatggattcagcagcttgccgattggaccagcgaaacccccgattccaacgaattcctcggttccctgaaggaagacctcggctcgtccgaagtctatgtcttcacgccgaagggcaagatcgtctctttgccggcccatgccacaccggtcgatttcgcctatgccgtgcataccgaagtgggccaccgtacgatgggcgcgcgcgtcaacgggcgtttggtgccgctcgacaccacgctcgacaacggcgacaccgtggagatcctgacttccaagtccgataccgccggtccttcgcgcgactggctgagcttcgtcaagagcccgaaggcacgaaacaagatccgccagtggttctcgaaggaacgtcgtaccgaggctattgaggaaggccgcgacgaactgacccgcgctatgcgcaaacgtaacttgccggtcaatgcgctgctgaccaccgaggcattgatcggtgtggccgacgacctcaatttcccgaacgccgacgctgtgttcgccgccatcggtgatgggcagatctccacgcagaacgtcatctcgcatctggtcaaggatgcgggtgc

SEQ ID NO: 744 - DNA, 17033 bp, Unknown
  R14_15m  MAG No. k141_58071
acggtctccgaccgcctcggcatacgtcttgccggcgctgtgcgcggaagcggcaagggtgaccacctcgaaccacgggtgattctcaagcagcgtgataaaacgctgaccgaccataccggtggcgccgagaatgccgactttcaacttttcggacataacaaccttctgggtttgacggattgatttcacgttcgggcagccgtagcgaaatggccacacgtatccatcaatcttacgaatcgggcggaacaagaagaaccgggtgcccgtatgctgggccggatcgccggtgcgacgggacgccggaaccggctggaacgtcacggcgccgccccgccgcgatgctctgcactgggagtcatgtcgaaggcgtcggtagaagcgcagcgtcagttggaccgcatcgtggcattggggtacccggacgtggcggatgtgagcgccgcggcgttccgctccctggcccgtccgctgatcgaggcgctggagcataccgattttgacgagcgcatcctgctggcgcccacgcgcgagctggtgtcgcccgaatcgctgatttcccgtacgtcgatcaaccgcatggccggtttcgccacgatgccgccgcgcgacatcgcgagctttttgccgcaggacggcttcgagccgcccgagggaccgttctacatcgtcgtggaaccgcgcaccggtaccaagtacacacaaaccgcgagcccgacgtggcccgcaagctcattgactccgacgagcgcattccgctcacgctcgaggagggactggccatcgccacgcagcatccgggctggcttcaggagaaaaaacgggttcaacctgctgggctcgcgcagcgccgacggccgcgtgcccagcatctggctgagccagaacgccccgaggctcggtgcggtgtggccgaattccaagcacacgtggcttggcaacgcattctgcatggcccgcaggggcgtctcgctgttccgttagtgagcggattgcgcggcttgtcggggccgtgccgcttgcccgctgacttgttgccgcacggagtccacatacgatttcaccggctggctgcggctaagacggtgaaatcgtatgaccgtatacggaaactccggctgggtgcccgtcagccggtgaaatcgtacagggccatacgaaaactccgccgtagcgggcgccagccggtgaaaccgtataagcgcatgccatttcaccggctggccgcggttagcatcccatgtcactatttgttgataatttctggttcccctccagggggggcaagcatagtaagcgaatgcatgatgctaaggtcggcaggccgagagaagacacgccgaagtaatctgcctttaacagattagatatcagatgtctgatgatagtacgataggaatgctcagcgaacccgcatcgggcatttcaaggaggaaagcgatgccatcattcgtcgtcggcgcgtacgcgtcattgccgcaggggcgcgaagcccaggaagcctattacgatctgctgggcggtcagccctggatcgacggcaccgagatccccttcccgggggaccttgccgaaaccgccgaccgcatctggcttgccggccaactgcccaggcattggaagaacaatacggtcactgccattccgggcaccatgcagcacgtatggaaggacccgaacttcggactggccagcccggacgaggacggacgccggttcgctctggcgttcttcaagcagctgcgcgacgcgctcgccgactttgcacagtggcggggcagccaggacgtcaagttcgtcgaaatccacacggcgcccacgcgcattgccagccgcgacgcgatgaccgcctcgttgcaggccctcgcgcagctggactggtccggcgccaagctggtcatcgagcactgcgacaagtacgtcgaggggcagaagccggaaaagggcttcctgccgattgaggacgagatcgcgctgtgcgggtcggccggcatcgggctcaccgtcaactggggacgctcggtggtggaggggcgcacacccgaaaccgccgtggcgcacgtggaggccgccgcgaaggccggcgtactgagcggcctcatgttctccggcgccggcccggaggagacccagtacggctacggctggatcgacggccacctgcccatgaacccggacgagccgacctcgctcatggacgccgccgccatcaaggccgccgtgcgcgccgccgggacgcaggagcgcccgctcgactatctgggcgccaaggtgtgcgtgcccaaggccgcgacggtcgaggagcgcctcgactatctcgcgcgcatccacgaggcggtcgtcgcatgagcgcgggggcggcgcccacctacctcgccttcgacatcggcggtaccaaggtcgcctcgggattcgtgacgttgcccgcaagcgcaaacgcaaacgcgggcgcggacggcaggcccgaggtgacggcccgctgcgaaatcccgaccgaggccgcgcgcggcggcgaggacctgaagaaccgcatcgtcgccttcgccgtccgccagcttgagcgcgccgaggccgagggcgtggcgatcgccggcgtcggcattgcggcggccggcgtgccggacagtgaaaccggcgagatcgtctccgccacggacatcctgcccggctggcgcggccagcgcatctacgacgcgttcgcggccgtgaccgacctgccggtgcacatgatcggcgacgtgggcgcgcacggtctgggcgaggcgacgtacggcgccggacgcggcaggggcgtggtgctctcgatcggcgtgggcaccggcatcggcggcgcgatcgtggtggatggcgccctgttcaccggcgcgcacggcgtggccggccacgcggggcacgtgccgagcgcgctgggccgcggattcctatgctcgtgcggcaccctcgaggggcacatcgagccggtcgcgtcgggaaccgggttgaaagacctctacaacgcccgttgcgatgccgaagagggcgaaccggtggcggacggctcccaggttgcggcgcgcgcggccgctggggagcccctggccgtcggcgtgatcgaggacagcgcccgtgcgctgggcgagtgcatcggcggcatgggcaatctcatcgacccggacgtcatcgtcgtttccgggtcggtggtcaaggccggccccctgtggtggaacgccctgcgcgcgggattcgaggattccgcattgcagctggtcaggtccgcgccgctggtggagggcgaactgggcggcgccgctccgctgatcggcgccgcggtggccgtgcgcaggcatgtcgcgcagggccgcccgtgatccgccgccgggctgggactcccctcgggaggaccccgagccggcgctctccggcaatccgtcgcgcaatcgtcaacacccatatgaagcaatgtcaaggcatgaggaaaggaagcgcatcatgcatcaggtaatcgaaaagatcaggggcgggcttgtcgtcagctgccaggcgtatccgggcgagccgctgcgccaccccgagacgatggcccaaatggccatggccgcggtggagggtggcgcggtgggcatccgctgtcagggacttgccgacatcgctgccatcaaggggcaggtgaaggtgccggtgatcggcatctggaaggagggcgacgagggcgtctatatcaccccgacgctgcgccacgcccgttgctgcgcggccgcgggcgccgacatcgtggcgatcgacgccaccggcaggcctcgcccggacggtctgagctacgccgacaccgtgcacgcactgcacgacgagggcgtgatcacgatggccgactgcggcagtttcgccgacgccgagcgtgcggtcgaggccggcaccgacatcatctccaccacgctgtccggctacaccggtgagcgtctcaagaccgacggcccggacttcgaactgctcgagcggatggtcaaggcgttcccggacatgccggtgctgtgcgaggggcgcatccacacgcccgaccagctgcaccgcgtgatggaatgcggcgcgtgggccgccgtggtgggcaccgcgatcacgcatccgacgacgatcacgcgctggttcgccgcgaagctgtgatgcctcgcggcatgcggccgtgacgctgcatgcccggtgccgcagccggaatgccggtgcggtggcatcccgtggcatgggccgcggtggtccgttcgactatgccgtcgaccggaccacggcggtcttgtcgtttggcgccatatcccgtgtttgccgcgttcgtcggcggcgaaagttgccgttatgttaacagacgtcagatgtcttattgcagaatggtaaacaaacattttcggaacgataacggtcggcgaagcccgaaatattgccgatattcaaggctggtgaagtataggcagatcagcgcggaggggccttgacgagtgaattcctcaacacgccgatttgaaatcagacatcagacgtcttaccattaaggaggttcgacaacgatgttggtggttccccgcaggagtcccgcacaaaccgcaatggtccgccgtaacgcggaaaggccgaagcggacgcaggccggggaacggtcaatgaagcaattaggaaaggatcgcgtcgtctgtcggacggtgattcgaaattcactcaatgatgaggagatcgcatgatcaagagaaacggaaagttcaaggccgccgtggccgcggccgtcgccagcctgatgctgctgtccggatgcggtggcggcacccagaccgccgcgaagaccggaactgccgtggcggacaccattaccgcccaggttgcctatgcgagccgcgacttcagcccgtccaccacctccggcgccctgccgatggccgcgaactggcacgtcaccgaaccgctgtacgcgctggactacagcacctacaagccctatgccgctcttgccaagggcgatccggagaaggtctccgacaccgagtacgtggtcaccctgcgcgacggcgccaagttctccgacggtaccgccgtcaccgccaatgacgtggtcagctcctaccagcgcaccaccgccaccggctcgctgtacatttcgatgcttgacttcatcgattccgtcgaggcgaagtccgacacccaagtgacgttcaagctcaagaaggcgttcccgctcttcaagcagcgactggcgttgatccagatagtcccgtcgtccatgagcgatgccgacctgaagaacaagcccatcggctccggcccgtggaagtacgccgagatcaccgaccagcaggtcaaattcgagaggaacgacctgtacaacggctcctacccggcccaggccaagaacatggtgtggaacgtgaccgtggacgacaccgcccgcgtcaccgccatgcagggcggcaagaccgacatcatggaaatggtcccggcccaggcgctccagaccctccagtcgtccggctccgagctgaagaccgcgcagggcttcaacctgccgttcctgatgttcaacaccaagaagaagccgttcgacgacaagcgcgtgcgccaggccgtgttctacgcgatcgacgtggacaagctgatctccaaccagatgagcggccaggccgaagcggccacgagcttcctgcccaaggattcgcagtactaccaccaggcgaagaacgtctacaccaaggacacggccaaggccaaggaactgctcgccgaagccggggtcaccacgccgatcagcttcacgctgtacaccaccgaccattcctggatcacccagctcgcaccgcagatcaagaacgatttggccgagatcggcatgaacgtcgacatccagtcgatgaagtcctccgcgctgtacccgtccatcacggacaaggacgacgctgactactcgatggtcctcgcccccggcgatccctctgtgttcggcaacgaccccgacctgctgatgaactggtggtacggcgacaacgcctggaccaagcagcgctccttctggaagggctctgacggctacaaccagctacatgagctgatggacaaggccactgccgcttcttccgattccgaacgacaggagtactggaaccagtgcttcgacctgctctccgaagagctgccgctctacccgctgttccatcgcaagacaaccacggccgtcaggaagggcgcgttctcctcttgggaggccattggctccaccggcatcaacctggtcaaggccaagctgaactgacgcaatccacatatgccatcaccggctgaaccgaacggacggcaaggcaaccggggcgtcctgcgaacgtgcggatgccccggccccgcccgcggcgcatctgaaccgccgatggcgcacgcataggagcttttacagtgagcaatctgttacgactgttgggcaggcgtctgatcgccttgccgttcatggcactcggggtcacctttttggtgttcttcctgatgtccttctcccagtacgatcccgccgtcgcggcgcttggcgagaactccacccccgaggcgctggccgccttccgccacgagatggggtatgacctgccgtggtggcagcagttcttcaactacatcgtcggcctgttccacggcgacatgggcgtgtacggcgtcaacaaggattccgtcgcggcccgcgtggcccaggcgttccccgtcacgctgcagctgaccttcatcggcctgatcatcgccatcgtgttcgccatcgtgttcggcgtgctcgccgccctgtaccgcgacacctgggtcgaccagatcatccgcgtggtttcgatcatcgccatcgccaccccgtccttctggctcggtgtgctgctgatctacgtgctgcagatcaagatggcgtggctccccggctccggcgacctcgtcccgttcacgcaggaccccggcgcgtacctggcccgcatggccatgccgtccttcgccctcggcctgcccgtggccggccagctgacccgcatcatccgcacctcgatggtcgaggagctcgacaaggactacgtgcgcaccgccatcggcgcgggcgtgcccaagagcgtggtcgtctcgcgcaacgtgttccgcaacgcgctgatcaccccagtcaccaccctcggcatgaagatcggctacctgatgggcggcgcgatcgtcatcgaggtcatcttcgccctgcccggcatgggcaccgcgatgttcgacggcatcaacggcaaccagccgatgctcgtccagggcgtggtgctcgtcgtggccctcgcgttcatcatcatcaacatcatcgttgatctgctctatgtgctgatcaacccgcgaatcaggacggtgtgacgatgctattcggcaagaacaaggcggccgaggccgcaagcaggcccggcgtcaaattcaatcgcttcagcaagatgaccgtgggaagcaagatctccttcgtggtgatcgcgctgctcatcgtctgcgccgtcttcgcacccgtcctttccccgcacgatccgctcgagatcacgatgagctaccaggcgcccaccggcgaacactggttcggcaccgacaatctcggtcgcgacgtgctctcccgcgtgctctacggtgcccgctactcgctggtcatcggcctgagctcgatcgtcttcgcgctcatcgtcggctcgctgatcggcgcgcttgccgccgtgacccgcacgtggatctccgagctcatcatgcgcgtcatcgacgtgttcatgtccgtgcccggcatcgcgctcgccgccgtgttcgtctcgatcctcggccagtcgatgatcggcatcatcatctcgatcggcgtgctctacgtgccgcagatcgcccgcatcgtcagggcgaacatcatcagcgagtacggcaaggactacgtgcgcgcggtcatcgtctccggcgcccgcgccccgtggatcctcttcaagcacgtcacccgcaacatcgccgccccggtcatggtgttcaccaccctgtccgtcgccgacgcgatcgtgttcgaggcgtcgctgtccttcatcaacgcgggcattcccgagcccaccccgacctggggcaacatcctgtcctccgccaaggccggcgtgatcttcggctactggtggcaggccatgttcccgggtctggcgatcatgatcaccgtgctgtgcctcaacatcctgtccgagggcatcaccgacgccatggtggccgccccgacggccccggtgaccaagtccgccgccgacgccgaggccgagcgcagggaggatcgcctcctgaccgacccagtcgctgcctacagggagcaggccgaatccctggccgattccctcgccgcactcaaggaggccgaacttaagcgcaccgaccggttcgagccgacgagcacggccgccccggtcatcgaggtcaaggatttgtgcatcaagttcccgcgccacggcgacgtgaacgtggtggaccacgtgagcttctctgtgcgtcccggcgagaccatgggcctcgtgggcgagtccggctgcggcaagtccatcacctcgctggccatcatgggcctgctggacccgaaggccgagatcagcggcgagatcctgttcgacggcaagaacctcgtcggcatgagtcctaaggaacacaacgccctgcgcggccacgagatcgccatggtctaccaggacgccctctcctcgctcaacccgtccatgctcatcaaggcgcagatgaagcagctcacctcccgcggcggcacccgctccgccgaggaactgctcgagctcgtgggcctcgatcccaagcgcacgctggaatcctacccgcacgagctctccggtggccagcgccagcgcgtgctcatcgccatggccctgacccgcgaccccaagctcatcatcgccgacgaaccgaccaccgcgctcgacgtcacggtgcagaagcaggtcatcgacctgctcaacgaactgcgcgaaaagctcggcttcgcgatgatcttcgtctcgcacgatctcgccctcgtggccaaggtggcgcattccatcaccgtgatgtacgccggccaggtggtcgagcagggcttcaccaaggagatcctcaccgatccccgccacgagtacacccgcggcctgctcggctcggtcacctcgatcgaggcaggggccaagcgcctgcaccaggtgcccggaaccgtgccgtccccggccgacttccccaagggcgatcgcttcgctccccgctccagccacccggacgttggcctcaacacgcgcccgatcttcgaacgggtgcccggcacgcatcactattacgccgccctgccggccgatgccgacgtcacgcccgccgcggcgacagtttccacccaggaaggaggtgcccgatgagccacgccgccgaaacccccaggaaggatcccaacgttccgatcatcgagctcagggacgtcgaggtggtgttcaccacccgcgccggatcggggctgttccacaagaacaggatcaccgcggtcaacaaggtgaacctgaagctcatgcccggccagaccatcggcatcgtcggcgagtccggctgcggcaagtccaccacggccaacgtgatgtgcggcctgcagcaggccaccagcggcaaggtgctgttcaagggccaggacgtcacccaccgcaccgccaaggagcgcatggacatcggccgcgtggtctccgtggtcttccaggacccggcgactgcgctgaacgcccgcatgagcgtcatcgaccagctgctcgacccgctggtggtccacaagctcggttccaaggaggagcgcgacaggcgcgcccacgagctgatccgcatggtcggcctgcccacctcggtgctgggcgccctgcccgggcagctgtccggcgggcagcgccagcgtgtcgccatcgcccgcgccctgtcgctcaagccggacgcgatcatcgccgacgagcccacctccgcgctggacgtctcggtgcgcgcacagatcctcaacctgctctcggacctcaagaggacgctcggcctgtcgatggtgttcatcagccacgacatccaaaccgtccgctacatctccgacgaggtgatggtcatgaaccacggcaccgtcgtggaacgcggcaagacgatggacgtgatgcgcaacccgcaggacgggtacaccaggatcctcatggacgcggcgccctcgctgctgcatcccaccgcggccgaatgcgcgtgaggccttcctcgcgttgaaatcgcgttcgcccgattccaacgccgaataatttcagcagtccatttttaatcctcaaagacaatcctcaaagaagggacacatcatcatggcaacccaattccgcggggtcattccccccgtcgtcaccccgctcaccgcttccggcgaagtggacaaggccagcttcgcccgctcgatcaaccgcatgatcgacgccggcgtcgacggcctgttcacgctcggctcgtccggcgaggtggcgttcagcaccgatgcgcgtcgccgcgagatcatccagaccgtgattcaggtcgtggacggccgcgtgccggtgttcgtcggctgcatcgacaccgaaaccaaccgcgtgatcgagcatgcgaaggaggccaaggagctcggcgcgtccgccatcgtggccacgtgcccgttctatgccctgggcggcatggccgaggtggagcgccacttccgcctgattcacgccgccgtgccggacctgccgctgttcgcctacgacatcccggtgtgcgtgcataccaagctgccgggcgacctgctggtcaagctgggcagggacggcgtgctcgcaggcgtcaaggactcctcgaacgacgacgtggccttccgcttcctcgtggacgacaacgccaaggccggccatccgctcacgctgctgacgggccaggaggttgtggtcgacggtgcctacatggccggcgccgacggctccgtgccgggcctggccaacgtggaggccaccggctacgtacgcatgtggaaggccgccgaagccggcgactggaccacggtcaggaaggagcaggactggctggccgcgctgatgcgcatcgtcaccgtgccgcagggcgtggcgggcttcggatccggagtgggcgccttcaagaccgcaatggcgctgctgggcgtgttcgacaccaaccagatgcctgatccggtgctgccgctcaagggcgagaatgtgaaacgcatcgccaccgtgctcgaggagtgcggcatgaagctggaacgcacccccgaagaggtttccgcctccactgaggcctgattgccgcacaaccatatgcgttgcgcgaatgcccgcccgcatgcaagcgcgtggcggcgttcgtgcggcgcaacgccaataggctcatacgaaaggaattgccatggctgaagtgatcatcgtcaaatccgagcaggaggccggcgaactgtatggccgttgcgtggccgatctgatcaaggccaagccggacgcggtgctgggactggccacgggctcgagcccgctggcggcgtaccgggcgctcgcgacaatcgtcagggacgagggaatcgacgtatccagggtgcgcggtttcgcgctcgacgagtacattggcctgccgctgacgcaccccgagtcgtaccatgcgaccatccaccgcacggtggtcgagccgctgggactggacccggccaaggtgcacgtgccgggcgacgcgctgaacggcaccgcgctggaggacggcgacaaggtcgccggcgccggtgcggcatatgacgcggcgatcgaggccgcgggcggcatcgacgtacagattctgggcatcggtaccgacgggcacgtgggcttcaacgagcccggatcgtcgcttgcctcgggcactcgcgtcaagacgctgaccgagcggacccgcatcgacaacgcgcgcttcttcgacaacgacatcaaccaggtgcccacgcactgcatcacgcagggcatcggcacgatcatgaaggcccgccacctcgtgctgctcgcgttcggcgcgggcaaggccgaggcggtcgcggagaccgtggagggcggcgtgagctcgtactgcccggcatccgccctgcagctgcacccgcacgctacgatcatcgtggacgaggcggccgcctcgaaactgcgcggcaaggactactaccggtattcctacgagcacaagcccgcctggcagaagatctgaggaaacgcagatgcaaaaacgctatcaggcgacgatggtcgcggatgcgctcgccgccagggcgggaaccttcgtcattcgcaatgcagtcaaggccgatgcgcgtggcgtgcagctcaacgcatgggtgagcgtgacggacggcgtaatcgacgccgtgggcacgagcgacgctgaccttgaaacccgcatcgcccatctcagcggcggggaccaggtcgccgaggtcgatgccggcggcatgctcgtgacgcccggctacgtggacatccatgcgcatggcgcctgggagcgttcgttcgacgacggtgccgagggcatcgccgtggcgcgcgcgtaccacatgctgcacggcaccacccgccaggtgctctcactgatcaccaatccgctggatgtgatggcgcggaacctcgaatgcgtcaggtccgtgatggcaacgcggcccgacgtgctcggctcgcatctggaggggccgttcctggcgttggcccgcaagggggcgcatgacccgaactgcctgtgcgatccgaccccggagcgcgtggagcgtctgcttgaggccgccgacggcacgctaaggcagatcaccatcgcccccgagcgcgaatgcggcatggacgcgatccggcgcttcgccgcggccggcgtggtccccgccgtgggacactgtgacgccgactatgacgtcgcacgccgggcgatcgacgccggcgcgggcatcatgacgcacatgttcaacgcgatgaacggcatccaccaccgcgagcccggcccgattccggccgcggtcgaggatccgcgcgtcacgatcgagctgatcaacgacggcttccacgtggccaatcccgcgcttcgcctggcactgggtttcgcgccgcatcgcattgcgttcgtcaccgacgcgatggccgccaccggttgtgcggacggcgcctacaaactgggcgcgctggacgtcaacgtggtgggcggccacgcccggctggtgtcgaacggcgcgatcgccggctcgacgctgatcctcgaagtggcggtgcagcgcgccgtgcgcgagctcggcatgggcctgaccgacgcgctcgaagccgccacgctcaccccggcgcatgcgctcggccttgatcggccgaaccccgtaaccggcgcgccgctgggcctggtggcccccggctacgccgccgacctgctgctcaccaatcccggcacgctcaccgtgaccgcggtgtggtgcgcgggccgtcggatcgtgtaacgggttactttttgaaggggcgtgtcgcatgtcggtcgggccgactggattgcccgcgccaatcggcccgcggtttcgggtttactgctcctggacgatgcgacgcttgagaatcgattcgatcggctcgtaatggtcgaacacggcctcgcggtagtcgtccacattgccggccagcgccgcgttgagcatgcggtgatgggcgtcggcggtacggtcaagttcgctggaaaccgccagtccgagctgggggagcacggccatgtgcacgagccacagggagcggaccatctgcttggccacggtgttgttgagcgaatcgagaattcccctgtgaaattcgatgtcgagcccggtgaacgtcttgccttccttggcttcggcgctcatgcgctcggcaagttccgtcaggcgcggctgctcggttcccgccagggacgcgcagacctcctcggcgcatcccaggtcgaggaagcgccgcagttcgaccacgtcctgcagatcggtgaaattcttgccgaccgacgccatcgaccggaaggcgagcgtttccaccatagggtccagcgacagggaaccgacgaaggtgcccttgccgtgctccaccttgacgatgttcagcgcctcgagcttgcgcacggcctcgcgcaccgacgaccgggacgccccgatggtgtcgcacagctgcgtttcggtgggcagcacgtcgcccggttgcagacgttcgcgcagtatgtacgacttgatcgcgtccatcgtctcgtcgcatcggctgcgggaagagacctgcgtggtcgaccagttgcccagggacaggcgcgccagcgcggccagctcctgcgtactgtattggccttgcggcgcgtcgggttccgtatccgttgcgcgtgagcccgccgtggctcggtctgctgtgccgttcatgatgactccttgtcgtccgtatggttggccgcgacgcccttatcgtggccatgtgaaaaccatgcaagggggatatgcgtaatgtaaacccccgtcgtctctatttcccacaatagtcccaattgtgaaccttcacattctacgtcgtgcgtcgtttcacatattgccatgcattgatagacatgatgatgggggtgcacgcacaggctgcccgtccaggtccgtccgccgtcctcgctcagtcgcaccatgccccgtccccggtatggcatcatctggctggcgttggcgaacagcaccgcgtcagtgccaagctgcggcaccgcaagggcgttcggctggctgaagatctccggcaaggcgggatcgaactcaagctcgtcccaggtatcgccgccatcgtggctgaccgccttgcccacgcgtccgctggcgtgctggttgcggaaaaacgccactacgtcgccgtccgcgcgctgtacgaacgtcgtttcgctggtcgttgcgtcgtcgtcgcgcatggtggctggatcgacgacggtcccgttgatctcgcgcccctcgttgatcatgcgtccgcgtcgccaggtttcgcctccgtcgtcgctgatcagtgctccgccggaatagtgggcgcggctctgcccgctgcaatagaacggcatgagcagacgaccggcatatggccccttgtccagctggatgccggttcccgggcatacgcccatgaaatgcatccattcctctttgaccattgcgtcaatgaggaatggcggtgaccaggtctcgccgtcgtcgtcggaatggatctgcgcgatgtagcaggtgggaaccgcatgccagcgttgcgacgggtcggcatgcatgggacttcgccacacgtcgccggcgtcggccacggcgtccagcgtggtctcattgccctgagcgtcccgcagacgcagaacgccgtcgcggttcacgccgatgccgcgctcgcagttggtcaggccgatgcctccgggattgagatcgatcaataccgtgatgcgtccgatgctccggtccactacggagcaggagtcgagcgcgctggccccgtccagcccgtcctcgcgtccgggcatgtcgatgaccgtctgcatcggcatccagttgcgcccgccgtcggttgacctgcggatgacgaagttgatgtggttgggggcgtcgttgctgatcgccgttcgctggtcggccccggcgatcagcgtgccgcggacggtgcggatcagcgagggtatgcgatagctggccgacccggcgtatcccgcgtcgaacagcgccgtggtgaccatcgggggagtgtgagcgagccgtgcgatctgcccgtcggtaagcgcgtggacgtacaggcctccacggctgacctcgcccatgagccgcaccccggcgatattgcgccccacggtgaaagcgtcgatgccttttcggccgtggcgtggaccggccagatccgcgaaccacatctggcccggctggtgcagcacgctgacgccgtccataaagaggtcaacggcgccgcgcgaggagcggacggccagatcgtgccagcctccgtcatcccaatggcccggcgcgtggcatgcgatgcccgctccggattcgtcccgcatggccagcgtcagtcctccggcgccgatggcgacggtcatgcgctcgcttccatcgacgccggccgcgaggatcgtgccatgctgtccgcggccgcgcaggcggaatctcgcatggacgctgcccgcatccgccagggcgatgcgatcggtatccctgggggagagccggtccgaggcgaagacgatatccggcttggccgccgcggcatgctcggcgatgcggacggcgtcccaatccacggggtcgacgaggaacgcattgcaagcaatggcattgggtgagccgaggtcgaatgcgcccgatgggtggacccgtgagggattgagattgccggcgcaggcaaagcattggtatccgtccaggtagatgcgcgtgccgaacgcgccgaaggtcaatgcggcctcgtgtatcgttccaggatcgaggccgaaggcgtcttcgatgtcgaggctgacgtgggactgcgcatttgggtcggccgggtccggggacagggaccgcgccgtcagcgtgaggtgcccgtcacgcacggccaggcaaaggtatggggcggcagtgggaattccgtcggcggtggcggggacctgcgcccgccagatcggcccgtccgcacgtacggagaattcggcgatgacggtgcccgcgccgtgtgggaaatccgttgtctgccatggtgccatgctcgtcgcctcggtcttgtgatgggttgtcgtacgtctcgatatcgagacatcagacatctgataagttaatcgtatcatatggatgccaatgaaaattggcacccgttgtctagatgaaagtgcaacaccctttagattggagattgtccagataaccagtgaaggggtgtcgcgccttggggcaagtgtattcgcacctgtcggaagaggaacggcggatcatccggatagagatcggcaacgggacgagcatacggcggatcgccggcctgatcggcagacacgcctccacggtcagccgcggaatcaaacgcaacacatgg

SEQ ID NO: 745 - DNA, 10190 bp, Unknown
  R14_15m  MAG No. k141_59057
ggcggccagaccgcactcaacgccgccatggcgctgggcgaggccggcgtcctgaagaagtacaacgtcgaactgatcggtgcctccctggaagccatcgaccgtggcgaggaccgtgaactgttcaagaaggtcgtcgacgaggccggcgccgaatccgcccgctccgacatcgcccacagcatcgaggaagtcgacaagatcgccgagaagttcggctacccgctggttgtgcgcccgagcttcaccatgggcggcctgggctccggcatcgcccacaacgaggaggagctgcaccgcatcgccggcgccggcatccattactcgcccaccgacgaagtcctgatcgaagagggcatcgagggctggaaggaattcgagctcgagctcatgcgcgaccgcaacgacaacgtcgtggtcgtctgcccgatcgagaacgtcgacccggtcggcgtgcacaccggtgactccatcaccgtggccccctgcttcaccctgaccgaccgcgaataccagaagctgcgtgacatcggcatcgccatcatccgcggcgtgggcgtggacaccggcggctgcaacatccagttcgccgttcatccgaagaccggccgcatcatcgtcatcgagatgaacccgcgcgtctcccgttcctccgcactggcctccaaggccaccggcttcccgatcgccaagatcgccaccaagctggccctcggctacacgctcgacgagattcgcaacgacatcacccagtccacgccggcctcattcgagccgaccatcgactatgtggtcaccaaggtgccgcgcttcgccttcgagaagttcccgggcgccgaccccaccctgaccacctccatgaagtccgtgggcgaagccatggccctggccggcaacttccaggagtccctcggcaaggccatgcgttccatcgacaagcgccacatgggcttcaactgggatggcgagaagccgtccgccgaagaagtggccgaactgcttgaggccatccacaccccgaccgaacaccgttacctgcagctcatgcgcgccatctggggcggcgccacgctggagcaggtgttcgcggccaccaagatcgacccgtggttcctgaagcagatcttcctcatcaacgagaccgccatgacggtgcgcgaggccgagaccctgaccccgaagctgctcaagaaggccaagctcgccggtctgtccgacgtgcaggtggcccacctgcgtggcttgggcgatgaaggcgagaacaccatccgcgagctgcgctggacctacggcctgcgcccggtctacaagaccgtcgacacctgcgccgccgagttcgacgccgccacgccgtactactacagctgctacgccgacgaaaccgagctgcgcccgcgcgagcgcgaggccgtgatcatcctcggctccggcccgaaccgcatcggccagggcatcgagttcgactacacgtgcgtgcacgccgtgcaggagcttggcaaggactatgacaccatcatggtcaactgcaacccggagaccgtctccaccgattacgacatgtccgaccgcctctacttcgagccgctcaccttcgaggatgtgctcgaaatctacgaggccgagaagaggatgggcccggtcaagggcgtcatcgtccagctcggcggccagaccccgctgtccttggccgcgcgtctgaaggccgccggcgtgccgattctcggcaccaccccggaatccatcgatctggccgagaaccgcgagctgttcggcgaggtgctcaagaaggcggagatgaacgccccgcgttacggcaccgccctgagcctcgaagaggccatggacgctgcccaccgcatcggatacccggtgctcgtgcgcccgagctacgtgcttggcggccgcggcatggaaatcgtctacgacgacaagcagctcaccaagtacgtggaccgcgcgcttgccgaggccaaggccgataccgtggtctccggccgcctgccctccccgctgctcatcgacaagttcctgcaggacgccatcgaaatcgacgtcgacgccctgttcgacggcgaggaactgtacatcggcggcattatggagcacgtcgaggaggccggcgtccactccggtgacgccgcctgcaccctgcccccgtccaccctgtccgacgaccagatccgccgcctgcgcgaaggcacctacgccatcgccaagggctgccacgtgcagggcctgatcaacgtgcagtacgccttcatggccaacacgctgtatgtgatcgaagccaacccgcgtgcctcccgtaccgtgccgttcgcctccaaggccaccggcgtggcgctggccaaggccgccgcccgcatcatggccggcgaaaccatcgccgaccagcgcgccaacggtctgctgctgcccaagggcgacggcggcgacatccaccccggccagcaggtcgcggtcaaggaatccgtgctgccgttcaagcgcttccgcaccccggtgggcaagaccgtcgacatcctgctcggacctgagatgcgctccaccggcgaggtcatgggcttcgaccgcgacttcccgcacgccttcgccaagagccagctcgccgcctacgatggtggcctgccgacccacggcaacgtgttcatttccgtgaacgacaccgacaagcgtcagctgccgctgctcgccgtgcgcctcgaagagcttggattcaagctctgggccaccgagggcaccgcctccgtgcttcgccgttacggcatcgagtcgaacatcgtggacaagatcagcacccgcgtggacaccgatccggaagccccggtcgaggtgcatcacgccgccggctccgtgggcaagaacgtggttcagctcattgaggaaggcaagatcgacatgatcctcaacacgccgaactcgcgcggctcccgttccgacggctactccatccgtgctgccgctattgcagccgatctgccgcagtttaccaccatcaccgagttccaagccgcactgctggctatcgaggccgtgaagcataatgattatcagatcatgagcattcaggagcattcgaagcagctgttcgaattggagcgacgggagttctgatgactacacccagcagtgaggaattgcaggcacaacgttcggatttcggtctgcgactgagcaattcaatggccaaatacggaccgctgtgtgtgggcattgacccacatcgcaagctcctcaccgactggggatacaacgtcgacgccgaaggcgccgaactcttctccatgcgtatgctgcaggccgccaacgggcgcgccgcagcagtcaaattccagacgtcgatgttcgagcgctacggagccaaaggtttcgaagcgctcgagcgcgtgctctacgcggcacgacaaatgggcgtcatcaccatcgtggactgcctgcacggcggcctgtccaccacgatttccgccatcgcagacgcctatttcaagcccggtgcaccgttgctggccgacgccatcacgctgctgccgtactatggcgcgcgctcgttgaacggcttgattaccgaagcgttggaaaacggacgcggcgtgttcatcgcctccctgacttccaatccggaaggcatgagtctgcagaccgcgttgcgccagagcggcgattacaagggacgtaccgtggcctacggcatcgcctccaccgcgcagaagcataacgtggatatcgaaggcatgggctcggtgggtctgatcatcggtgccaccatcggccaatggatgcaggattccggcgtggacccctccaagttcaccggtccgattctttcccccggttacggttggcagggtgccgaggccaaggatctgaaaaccgtgttccgcggtacgcgcggcaacgtgctggttaccgtgtcccgctttatcgcctcgcatgggccggatatcgccgcactgagccaagctaccgagtcgattgcgcttgacgtacgtcagtcgctgatggaagccactgccgaaggcacagaaaaccagtaatcagaacggaatcagatgtcgcggcatgcgtacgtatctatctcattgcatacgtcgcatcacgattcatattcttccctgttcgtcggggctgtaacagttaccggtcatctcgccggtgagccgttaccacattggattcataatcgctgcacaccacatcatctccggaggaacccatgactgaaaacacccatgccggccgtctaatcgtcctgactggccctaccgcagtaggtaagggcaccgtggaagccaagctgcgcgccgaccaccccgaagtgtgggtgtccgtctccgccaccacgcgtgccccgcgccccggcgaggttgatggcgtcaactactggttcctcaccgaagacgagttcctgacccgcgaagcggcgggggagttcctggaaaccgccgtggtgcacggcatggcccactacggtacattgctggctccggtggaggagcatctggctgccggcgtgccaacaattctggaaatcgatttgcagggcgcccgccgcgtcaagcagcgcgccgccgaactcgacttggaagtggtgtacgtgttcatcgcgccgccgagctttgaagagctcaagcgccgtctgatcggccgaggcaccgaaaccgccgaacagcaggcccgtcgcctggaaaccgccaaagtggagctcgccgccgaaaacgaattcgacgtcaccatcgtcaacgaaaccgtcgatcaggccgccgccgacctctggtccgtcatcgccaaggaatacgggctgtaacgtgtgcgaataggttctgttcgtactgagatgtccatgcttggcatggcgtgctcatgtgattatgcgtgttcagtccctgccagtcggccctcacaatagggggagagcctgacggcagggactgattcataccgatacaaaggggcatgagcccccatttgtgcgtcaatcgtttgatatgcaaatgggggcacatgcatgtgtgcgccatcttccaaaaacgtcgaattatgcaaatggggggcacgaataggtgtcggcgtgatgtggtgtggtgcgatgctgcaggtgcggtgtgacatggtgtgggatgccagcggatttcgggtgtttttcctctggcgtcccacagaacctgatgtacggtgtcgtcaccggtttgtgggattggcagaattccaatggttctgtggaatggggtgtgggatgccagccgtgtgcatcgtttgacgtgcgtggcgtcccgcacggttgcgggacgccggccccaaattggccgctaaccgtgtggtatcccgaatttctccgatatgcgagaggaatccgtccactataaggtctctagcccagcgactaatagttttcctctatgtgcgaataatacgggctgtaactaccgctttaccactagctgctggtggagaatttcggtgctgtttctggccggcgcctgcttccaacggattgcttcggattcgtgatgctcggtgacataatgccgcatccattcgaagcactgctgggtctggatggcatcgcttaatgcgcggtgttcctcattgtccgcgatgccgaagcgcacgatcaggtcagccagacggtgatgccgctgcgcggggaacagggcgcggctgatttgcatcgtgtcataatccgcgcaggcaaagccgcagccggcgatatgccgggtgttgtaatccaggaatcgcagatcgaagctgacgttatgaccgacaatcggctcaacggtgggaccggcagccggggtagcgagccatgcgatgaatcggggaagcacctcgtcaatcggatcgaggtcggccaccatcgcatcggtgatgccggtcagcgtggtgatctgacgcggaatcggccgcaagggattcaccagctgctggaattgatcgacgatatgcccctcccgcacgcgcacggcaccgatttccgtgatggcgcaactgttcgggtaaaagccggtggtctccagatccagcgccacataatcggtgggaaagagggcatcgtccatggcgattcgcccgccggcaccatgattgggctgggatggttggccgaaaacggtaatgccggaagtggtcacggaggctcctcatatcagtcggtgttcggtgacttattgtaccggcagcccggtctgacggtaaaatttttccctcccggattttctcggatatattggttaggcggccggcaacatgcggcgcatcgggaagggagcacagctgatgaaacagatagtggcaggcatcgtggcgcatgtggacgcgggcaagaccacgctgtccgaggcgctgctctaccgtaccggtgagatccgcaaattggggcgagtggatcacggcgatgcgtttctggacaccaattccttggagaaggcgcgaggcatcacgattttcgcgcaccaggcattggtagaacacggcgacctgcgcctgaccttgctggatacgccggggcacgtggacttcgcagccgaaaccgaacgtgtgctgcgtgtgcttgactacgcgattcttgtggtctccggcacggatggcgtgcaaggccataccgagacactatggcgtctgctggccagatacggtgtgccgacgttcatcttcgtcaacaagtgcgacgccgccggatttgcccgcgaggccgtgttggctcagttgcgcaggcgtctgagcgatgcgatatatccgttgccggcaatggaacagtccactgagggcagcgcgctaccgttggacgcgttcgccgaagacatcgccaccctggacgaggaggcgatgaacgactatttggaacatggcgcgctgtccgtgggcagattgcgatcgatgatcgccgtacgcgagctgttccccgtatatttcggctcggcattgaaactcgaaggggtcaaggaattcctggacgggctggagacgttcacccgcgaacgtgaatggccggccgccttcgccgcacgcgtgttcaaaatcgcccacgacggtcagcacaaccgtatgacgtggctgcgcgtcaccggcggtgcgctcaaagccaaggagatcgtctcctcatcctcgtgcgccgcggcgtcgacaccgtcgccagcgcaggaggatgatgacatggcgtggtccgagaaagtcgatcaggtgcgcatctacaatggcgccaaattcgagacggtcaccgaagtgccggccggctcggtatgcgcggtgaccgggctgacgcggaccttccccggcgaagggctgggaacggaactggacgccgaatcgccgtcgctgcaacccgtgttgacctacacggtgttgcccgccggagcggaatccgatacggccggcacctcgggagcggccaaacgtgggggagccggccatgacagcgcgaatcaggacgatgccgagcatgatgccgccaagtcgggaaccggccgcaatgaggagaacgacaccgccggccagaccgcggcggacaatagcttgccggcccgtccccagttcgatgatctgaccttgcataaggtcatcaccgtattgcgtgagctggaagacgaagacccgttgttgcatgtggtgtgggtggaacggctggccgagattcatgtgcaattgatgggcgctgtccagctggaaatcatccagcagaccctgcacgactggttcggtctggatgtgtcctttggccccggctccatcctgtaccgtgagaccatcactgcgccgatcgaaggcgcaggtcatttcgagccgctccgtcattatgccgaagcacatatcctgctggaaccaggggagccgggcagcggagtcgctgtggcctcggccctgtccgaaaatgatttggaccgcaattggcaacggctgattctgacccacctgaccgagcgtgagcatctcggtgtgctcgttggcgcaccgctcaccgatatcaagatgactttggtggccggccgcgcgcatctgaagcacaccgaaggcggcgacttccgtcaagccacgtaccgggcgattcgccaagggctgatggaagccagggcaggagtcagtggccggcccgagacgccggtcgagagccggccggacaccacaggggagggcaactgccgactgctggaaccgtggtaccggttccggctcgaagtgcccgcagacatgatcggccgtgctatgagcgacatccagcgcatggccggcagcttcgaatccccggtcaccgatgacgaatacgccgtgatcgaaggcgaggcgccggtgtccgaaatgcgcgactatgcgatggacgtgaaccagtacacgcacggccatggccgtttctccgccaccttcggcggctacaagccatgccatgacgccgaacaggtcatcgcagccgccgcctacgatcccgaagccgatctggacaacacccccgactcggtcttctgcgcccacggtgccggctaccccgtcaaatggtataaggtccccgaattcgtccacgtcgactacaccatgtgaggtggtgactaccaaatctgcggccgaatgaatccgttggcctccaagaaccgttgaatatcgcgcatttccggcatattgatcgaatgggccatgcccggatacacttgttcggtcaacgtgccgtgctcgcgccagaacttacccatcgccgtcacatcggctttcgggaagatgtcgtccgcgacaccatgcccgtagaacacgggcggcttcaacgaagccaattcggcatcgcccgcaacggaccccggtgccagccatccagagcaggagacggctgcggcatatcgcttcggattgaaacgcagcagatgtgcggccaagaggccgccctgcgagaatcccatggcaaccaccggccgagtggcgggaatatgctccgcaacccatgcatcaatggcttgggcggcctcagccgcctgcttgtccaatgattcgccctccggcacaccttcatgcgcccacgcaccgaaccatgtatatcccatgccataggcgatgggtgcctgcaaactggcataatcagccgaaccggcaccgcaatagttcagcagatcgggcaaatcgtattcattggaaccccagccgtgcaacagcacgaacaccggggtggtttcaggaccggtcaaacgggtcaaggccttggcaatcttcatggctcccagtgtagccacgtgaccgccgcgaccgcatttgaacggtccataagcaacccatatagcaacgccgttccattcaagtgtccgatacgttatcgtcgtagacgtgccgcacggggaacggcctcgtgcacagcagccatagagaacaccataaagggggtgcgcaatgaccaggttcaatactcagctcgtccacggactgccggttggagacaacaacaccggagccgtgaacccgccgatctacaactcaacgacatatgccttcgagaaggtcgacgcgatgccccgctatgactacgcacgaagcggcaatcccacgcgtgacttcctggaacagcagatcgcccagcttgagcagggaacgcgcggttttgcgttcgcctccggcttggcggcgattcatgccgtgctcagcattttcaagcccggcgatcgcattgttgtggggaacaacatctacggcggctcgtattcgcagctcaatgagttcttcacccgttggagtgtgatcgtcgaatccgtcaacacccaggacatcgcagcattggaggccgctgtcaagggcgaccgcgcgaacggcatcgcgcctgcccaagccgtctacttcgaaaccctgaccaacccgctgctcaaagtcaacgacgtgcgcgccatctccacggtggcccaccgttacggggcgctgtcgatcgtggacaacaccttcgtgaccccgtacctgcagcagccgctcaccttgggcgcggacgtggtcatccactccgccaccaagtacctggccggtcactccgacgtcaatgccggtctcgtggtcgtctccggtgaggatttggccaatcgcgtgtacttcgcccagaaccgtcttggaggggtactggcgcccactgaatgcgattcggtgcgccgcggcatccagacattggccctgcgcatggaccggcagcaggagaatgcgaatgccatcgcgcggtacctgctcgcgcatccgctggtcaa

SEQ ID NO: 746 - DNA, 5143 bp, Unknown
  R14_15m  MAG No. k141_59307
agagcatccgacgtcagtttcgtcgcgtccaattcgatgttccatgatcccgagctgtcggtttggaacgtgatgggcagttccctcaacaaagtgtctccctgcacctcgttgtcgtcgttgtcgaacttgacctctacgaccggcatgttgaccgtttgcttgctggtgatgatgatgcatgagaagtcatcgaacgcgttcatgggcgtgcgcccgctcatggaccgcgcgcacgagtacgacaggctcgacgaggtcttcctcgccggcctccggctcatcctcaccgccgcctacctgaaaaaaaacacagccaaaatctgcacgaagatatctttatcctgcgaaagtcccataatcacgtcttgaaataggactttcgccggataaaagtgcaaaagcggaacgtcaattgcgccgaagatcataaatctgacataacgtacattatcggctaactattcgggaatcttagaaacggcttaatttcaacggtcttcatttcgcacaggtaactgtggatgcctctgggtggcccgttgtggctacgcatttggctacgcatttcacacgacgggagaccaacgatggcaatgggtggcggcggctcgacatacagaagcgccgatggaatctggcacgccgcgatagacatagagcccgacagggccaccgggcgcaggcggcggctcacggcccaaggcaagaccaaggcggtggcgaacgcgaggctcaggatgaagctggacgcatatgtgcgcaagggcttcacgccgaactcgccgtcgccgcgcctcatggactggctggagacttggtaccacgagcgggccgaggccaacctgcgtccgaacagcaggcgaagctacgagaacgccatcgtgcggctgaacaggatagccggcgcgaggcgcatcaactcgctgggtcacaaggatatggccgccattcaggacggcctgaagtgctacagcccgaagacggccacgatcacttggtccgtcctgaagaacgcgcttgaggccgcgcgtgacgaaaacctcatacggaggaacccggccaagatggtccgcccggtgttgggccggcgcaggccgatgaaggtcctgtcccccgcgcaggcggcggagctgataaggaacgaacccgacccgatgtggcgtctcaactggctgctcgccttcgccaccggactgaggcagggcgaacggctcggactgacgatggacgaactgacgacgctgaacggcagacgcgccttggtgatcgaccaccagttgcagcgggtaccggactctaagaaggcggactgacctctgggcgaggacgtgaccgatctgggcaacggcttctggttgtgcccgcccaagacggacagcggcgagagaatcgtggtcttggacgatgtgatgtgcggggcgctggacgaatggctcgccatacgcaagcaaaaaggcgtggactcccccatgctgttcgtcaccttgtaatgcagccgctccccctgcacgtcgatctcgaacaggtcgcctttctcggcgagcccaaggttcgtgaacatcagcctgtccgccagaccccggtgggccgcgatgaccgcgtgcgtggattcgtctcccaccggcagcgacgtcccgtagaggtgccctgctgacttctccagcgtggcggagtccgtgccgtggcgcaccggcaggctatgtgcagcctcggatagcggaccgcccccattgtgcccttgccgtccacgtcgagcagcccacggtactccttgtccccccgctgtatgaggtccttgagaagttgtccccggcctcgccaagcaccgactgcggccttgccgaaaggccctcgttgtatgccttgtcttcctcgatcatcccctgccgtccggtgtgggcagggctgcggcctcggcgctcgcggtctgtccggcggagtcgatggcttgcaggacgaatggtgcgctgagcgtcagcccgccgagcagcaggaggacgacgccgagccatccggagatgtcacgtttcataatccgccttccaagcgagcgatggaaaaggccacggccgggggaacccggaaccgtggccttggcttccgaaggggtctgtgccccgaaggccgtttacgcgtggcgcctacgctaccaaatcattaccgctcacaataccatcctgccaacattagtcagcgcgacgccgacgatgaacgaagatcaatgcaatcaccactccggcgattagggcggtcacaccaccagcaatcatgtaagccagccacgtcgagacaaggaacgtaccctttcttcccagcgtcttggttgacgtggtcgcaccattggcggtgttcgtcgcggagtattgcatgcagtcggagccgccatcggaacggcactgctccaccttcttccacgccgcctgctgacgctcatactcccgcccgatgagcccggcctcacatgggacattatccgccgcggtgccaacgccgtccgggttcgtcttgcaatcctgcgtgtaccagtccttcagatccgggtattgggcggccgctttcatctggtactccagaatcggattcacatccttgtactgggccgggtcaaccgtcagcaacgcattcaggtccacctcaccgaaccctcgcttgcgttcagggtcaatgaccggcttgcccttgccgctcttcgtgttgcgtatcaaagactggatgatctggttgcccgtcgcgtcgggccacttctgcatggccagcgccaagtacgatgacaacaccgctgccgcggttgacgtgccgccattgcccgcgatatcgtagacattcgaaagaggattgaccgagtctaatacgttcatgccataggacagcaccgccacattgccgtccataacatccgaggtgggagctaggttcccagactcgtccacgctgttcaccatcaccacaccggggaaggtctccatgctgcgcgggtcgccggtcagatcatccaagccgggattcatgtcattcgcacgtccttcgaccatgacgaccccatgacgcagggcatccacatacccagcataatccgtgctgacgagagcacctccctgagaacggttgaggatgcgagcgccccagtccaccgccgtcttgacatctgcaccactgtcgcttgtcgcatcacccgcgagtttctgatcgcaaggtgtcacagcaggccccgcattaaccgccccatccgtaatatgcaacacgtccgctttgggcgccgaccccatgattccgggccacttcgaggtgtagttgcttccatcacccacgatccatgccagcatgtcggtgccgtgcgaggagtagtagccgccttcaccggacttgatcgtcgcggtcaacggcttgccgtccaccttgcactcgaccgtcttgtcatccacgttatggaatcgtcccagcttgtatgtgatcgaggcatgcttcaacgcgggataatcctccaccgcctgcgaatccagcaccgccaccttcacaccggaaccatcaatgccctgcttccacgcggcagccaccacatcgttcgccaccggccaacgcccgtcatccgccgcgaacgcgccgggcgtccacgcgcaaggcaacacacacgccagcgcgaacgcgcacccggccttcaccctcgaccaacgagaaaccatgtaaccactcacctctccactggcctgcatccggacgccatcctcgaacatctcctgatattcgaggatggcgtccagcatacgctacttcgtctcttcgtaccaatcccttgtactgccatcagacaaaatcacgtgaccagtctcaccactcatatgcttgacgcggtgctcaatctcctcatggcgaccatgaaccatcgggcgctgaactgggttacccaaatacccgcaagtacgcttcgtcatgttgcacttgcttggatcggaattgccacactcagggcacttgaaccctccgccccggcgctttgacacatagatgtcccacggctcgcacttgaacccgttgctcgccagcaaccccctcgccgtggcgaccttgccgtccagcggctcgaacacggcctcgccctcgtatggcctgaactcggtcatcctccaattgccgccgaactggtcctcgtagtatgcggcgaccttcctcgcggcggcgctggaggcgaccctctgcgacgcggacagggcgaccaccttcctgtcgccgctgagcgtcttcaccacgtccacgtcctgcggcttgctcaatagcgcgaaagggccgtcctgggtcgtcgcggtcgaagccggccagcacaaggcccgacctgctctgatcctcgttaatccatttgtcgagcttgacttgcagcttcgcgttgtgcgtggcgttgctccacggctcgaacggtatgagggcaccgatcggtcttggtttccggctcccactggcggcatgaggcttcacggtagagtccgcaggtggctagggtgtgtttacgctagttgggttttggctgtgttttttcaggtagatgtgtcgatgaggatgagccggaggtcggcgaggaaggcctcgtcgagcctgtcgtagcgggtggcggccttgcggtagcgcttcatgcggttgaagacgcgttcgaccatgttccgccccttgtgcgcctccctgtcgcaatcccatggggccgtacggttcctcttgggcggcgcaaccggcgtcaggccgaacgactcggccggcggccgggtgggatccccctcgtgcgcgcggtccatgagcaggtgctccatcgcgccgtccccgggccagcggttgaaccgccggtagacggtgacccacttgccgtggcgctccggcaggtccctccacggggctcccgtgcggcacatccacggcagggcgttgacgaacgtgtggttgtcggccacggcgggctccggcgcgggcgcggcaacggatgcgcgaccctcatgaactcatgaaccggtcaagcgtgatgtcatacctcggcgtacacatacgacaattatcacgcaaaacttaaatacaccctaattatttgaagaaatcttccttactatattccattgttaccctccataacttctgattgttgccgtcttgacgattatgtatc

SEQ ID NO: 747 - DNA, 11540 bp, Unknown
  R14_18m  MAG No. k141_70
caccggcgtgcaccccaccgataacgtgaaccacagcgagccgtggcattcggatcactgcaacctgtccgatcacgaaccgcatgaaggccagtgcgaggcctcgcattggcagaatccggatgccgcaatcggcaagccggacgatccgcgcaagcattacggcaaaatggcgatggccgcgctcgaaccgcgtttcgccaccgagccaggactcgtggtcatctcccccgccacgccgggctccaacggcatcacccatgagttccgagagcgcgcgggcgcacattatgtggacacgggcatcaccgaatcgcatgccgtggcgtacgctgccggcatcgcacgggcgggtggcacgccggtggtggccaccacggcgtccttcttccagcgcgcgtacgaccagttcttccaggagatgagcctgaaccgttcgcgagtcacggtacttgattttctgggcggcttgtccggttcggacaatacgcattccggcgcatatgacgtgacgatgttctccaatattccaggggttacgatgctggtgccgacttcggctcgcgactatctggctgatttggcgtgggctaccgcgccggccggttcggcggacgcccctgctggtccggcggtgattcgggtgccgggcgaggcgattctggcggcggaacgggatgcgacgctgctgccggtgacgggtgggcagattgctgaccgcccccagtcagcttcgctgccagcctccgccagctccgccagcgggggcatatctgccgcaacagtccgcgggaccgttagcgtaacggctcagcatgccggtgcgcgtcacatgctggattggcgggtcaatcagacgggctcgcaagtcgcgatcatcggactgggcaatgcgtatccgttggcggagcagacggccgccgcattgtctgacgattatggcatcacggcaacggttatcgacccgcgccagtgcacgtcgctggattcagacgtactggagtcgttgcgtgatggccaccagcaggtcatcacccttgaagacgggcagcttgaaggcggctggggcgagaaagtgaccgcatactatgcgaatcatcatgtctcggacggcagccgtaatcctcgtgtgctgaacttcggcgcagccaaggaatttaccgaccgcgtgtcgctgggcgaactgaacgaacgttatggactaacggtggaacaggtgacagaggcgatcactcgttgtttttgatggcgtctagggccgggattttaacggctttattggccgggccgaagccgaatagcaagccgatcagcgtggaaaacagcacggcgaacaggaacagccaccacggaatcaccgaataacgggtcacattctcgccaccaactatcgcctgccagagtatggtccagatagatgttccgccaccggtaccgtcgccggagcccccgccggcaccgctgaccataccgccagacatgccgccgctcatgccgccgctcatgccgcccgcatacaacgcgccgacaacgttgatgcccagcgatatcagtccgctcagcacgcagccgatcaatccgccgaagaatccgatcgcgccggcctccgcaagaaacatgacgcgaatgtcacgaacgtagcagccaagcgccttcataatgccgatctcgcgcgtgcgctcggttacggacataaccattgtgttggcgatgccgatggccgcaaccaacagcgaaaccgcaccgataccgcccagaatcagctgaatcgcgcgcgactgttcttccaacgacttacgcatgtcttcataggaggaggtctcgtagcccaacgctttgatctgtgattcgacttcgggcacggacttgaggtcggcggccttgaccagcacttgatcataggcggtggcttttttggcggcggctggatcgactttggcggccagttccttcaacgcctgcaaatccatgaccagaccgtcggaggtggcatagcccttgttgtagtcgcccgccacaatgccggaagcccgcacatcgagggtgacgttttccgactgacccgcggcgctgccgcttgcgccgcccgcgccgcctgtgccgccgccaccgccgccgtacatgttcatgctgtactggtcgccctgataattggtgccggtggtcagactgatttgcgtggtgagcgggtcgaagaacggatcttcgtcctgatcttcctcgcactggccggtggcctggttaaacgtgcatgaggaatactgaccgccacgtgtgctggtgcgttgttcgccgttcttcagggtgtccatgaaaccataggcgaaccattcgccggcaagcacctggtcttttttgaccggtttctcgccaccgacgagcttgtagcccatctggtcgagctgggtcatgtcgatgcccatgatctgcacgtaatcatagatgtaacggccgcccgcgccggctctggccgtcacgttataagggaagttcatcatcggcgtcacgccggatacgccgctcatcgcgcggaaggattccacggccttgtcgtcgagcttggtatcgcccatcttggacgagccgccatcgtccatcggaccggcataaccgttggtgtacacggtgacgatggacagatcgcccatcgatttgaacatcttctcgttctgctcgttaatgccttggcccaaagagaccatgagcacaatcgagcagcagccgacgataacgcccagcacggtcagaatcgtacgggatttacgccgccataggttttgtctgcagagccgcagtatgtcgccgaatcgcatggtcgggcctttcaggccttgtgggatgagccggctggtgcgactgatgaggctggggtgactggtgtgataggagcggtgtctgccgcagcaccatccgtcacgccggtatcggtcttatcatccttgccttcggaccaatcatcccagtcctcatcaatatcgttcttcttggccttctgcttgcgccggcgacgcaccagcagcacaatcaccacgataatgaccacggcgatcacgacgatgaccacatacaccagcaccggcaatccctgattggcgttctggtccatgttcggatcggccatgccggaatcatccatcggctgcatatcggttacgggtatggtgagcgggaattccttggtcttggtctgtccgtcggaatcctcgtacgtgactttgagcgtggtcttcagctcgcctgacgcgtgcggtgtgaaggcgtaaccaatcgtgccggtggcgccggaagccacattgcccacgtactgggttttcatcgtggcatcgaaaccttcgccctccatcgtggcctcgacgttggcgatatcgcctttgcccttgttcacatattccatcgtgaccgtgttttcctggccggcgatcacctggtcgggcactacgggatcactgatttcgaaccggtcaggctgactgatcggcacggaaatcttgacgtcggactggcttgaggagcgggcgctggcgtccacatactcgtatcggaagttcacggtcacggactgggcaccgcttttcgcggaggcgagcgcctgcatcggcacgctttgcgtcatggcgtaaccggcccacagcgcgtcgacgtagaacgtgttcgtgcctcccgcgatggcgaagctctcgccgccgtccacggtgacgaccatgttcgtcaccgccacctgccccttgttctggaaggtgaagtcgagattgaatttggatccggcggccacggaatcacctccatacgcgaagttggtgatgatgatgttgggcaccggtccggcgatcggcgcggaatcgccgtcgcttccctgagacgtactgttcgtgccgcttgtgccgtctgtgccgtcgaccgcgtacgcctgatgcggaagggagatgacggcaagtgccagtgacagcgtggagagcaacgcgacgatgatggcgatggtgtggtgggagaggtgcttcatcggtcagttccttgggttctatgggcggacggcgtggacggtgtagttggtgtggttggggcggacggcgtggacggaacagttgggcgggaaaggtcggtgttgagccgatcgctggtgatgcggccatcgagcaaggtgacaatgcggtcggcgtatgaggccatctgcggatcgtgtgtgaccagcacgatggtctggttgaagtcatgggcgaatgcgcagatcatcgtcatgacctcggttttggttttggagtcaaggttgccggtcggctcatcggcgaacaccacctcgggcttggtcacaaacgcccgggcgatgccgacgcgctgctgttggccgcccgacatctggcgcgggtaatggctgagacgatggccgagcccgactcgtttgagtacgccacgcgccgcgcgctcgcgttgctccttgggcactccgcggaacatcaacggcatcgccacgttttccagcgcggtcagattgggcaacaggttgtacgactggaatacgaagccgagatgcttctggcggaaggccgccagctcacgctcgtcgagcctgctgacgggtacgccgccgattctcacgccgccgcgcgtcggtttttccatgccggccaactggttgagcagcgtggatttgccggagccggattcgccgaaaatgcagcagatctggccttgcgggatactgagattgacacggtcaagcgccaccaccgtctcatcctcgacggggtattccttgcgtaggtttcttacctcgatgattgctcgcggcacgggcccttcttccttcgttcgtcgccattggcggacgcgcgatagctggttattatccagcacatctcaagtcagtgtataaccgttatgcaggagccgcaccccttaagggtgttcccggatggcagtgataagcatataaccgctgatctcaaggtcgacagttcaggctccagacggacccagaccggcataatactcaaaagcccctggcccccacagacgatgagggaccaagggtttattgcatcgtgaccccggacgggctcgaaccgtcgaccttgagattagaagtcacatgctctatccagctgagctacggggccaaactcgtgtaagtctagccgtaggggtgtaaaacacctcggcgtaacgtcggcttgcaccggtaccatcggcgatatggggacaacggagagcaacgtagatcacgccgcatcgggccagaccgtcgcaggcgatagtggtgagctcactttcacatacgcacagggtcgttttgccagtgaaggccgggattgggaaagcccggttgtgaccaacatggctgcatccgtctctgccgatgccggcaatgccctcgccggcagcatcatcaacaccggcgccaacaacactttgaccagcaccaccgaatcgtcgcttgccaccctgctgtccaaccaatgcccgttcgttatcaaggccaccattttcgagggcaatggcaaaaacgccattcgcgaacgtcacacattcaccggctcggtgctgcgccagctcgaccaagccagcgccctgctgaacggcatcaacgaatccggccaacacccggccatagccctgcgcgaagcattggtcaacgcactggaacatcgcgattacacgtactccggccccacactgatcaatatcttcgattcccgcctggaaatcgtctcgctcggcggcctgaccgatggtttggaaatcaacgatctgctcaacggcgtatgccagccacgcaccccgcgtttggctgaattgttcgccgatctgggcctctgcgagaactgcggtaccggtattcaacgcattatggacgcctacgcgcagagcgcggtcagtccgcaactgcgcgtaggccccacttcggtggcgatggtgctgcccatcccggtctcggccgaggccgcatccttgcatcggaccgataccgatgcttccgccgcgcccagcaccactgacgaagcgcagcgcgccaaaatgtattcattccccacgattcagcgcatgacggataacgccgcagatgctttggccggcgcacgcatcatcggctgcgcgccattgcagacgctgattctcggcagtggattcggcgagcgcccggacggtgacgaccaggtcagtacccgcccgctcgatacagcgacgctggaaccgtcgcctcaaacgttggagcagttcacgctcaatttcctcgcgttccgcggcgtgaagctcagccgtaaaaccatgcagaaagcgcttggcctgaacaaggatcagatgacgcagctcttggaccagctggagttgagcggcaagatcgaacgtcatacgcacgccaagtccactacgtattcgctggcacatgcctcaggacggtaacgaccagagcggcaacaaagcggcaacgaccagagcaatacagcccaaggcacgataaagcagcagctcagttctcgaatacgcgatcgcgaatcatgcgaccggattcgtcgagcgcggtggagaaacggccgtagtcggacagaatcacgcccatgtacagcatgtccacgagcgcggtatcggccacgcgcgagaaaatcgcattgccatagatcgtgtgcgagtcacgacccgtcagcaacgtcacgtcggcccagctggccagcggcgcgccgatggcattggttatggcgatggttttcgcgccatgcgatttcgccaatcgcaacgctttgaccgtatccgccgaactgcccgaatgggagaaggcgacggccacagcgccgtggggcaggtgcccggcaccgatctgctgcaggtaagcgtcggtattgagacggcatgtcagtcccagatagccgagcttggtgaacagatccatcgccggtgtcaacgagttctccacgccgaaaatatcgatgaactccgattcggcgagtagggcgaccgccttgcgataggccttggggtccaacgcactgtgcagctcatcgatcagcgccttcgcgccataggccgctttgccgggaatctcatcttcgccatcccacggattcagatcgaatccagccaacggattgaaggtcactttgtgctcggcggccggatggcgcaacacgtaccgcagttcacggtaaccgccgaaaccgagcttgcgggcgaaacgaatcaccgtcggctggctgacgtgggcgatgtcggccatctggccgacggtcaggtcggccgcctcctcgatatgatcccgaatatactgggccacggcgcgctccgccggacgcagcgacggatacacgtggtcgatgcgctcgcgtattcccaccgaggattgcacagccgcgctcctagtcgtccgtattttccattcctgtttcgagggtaccggctgtataccggcgaacagtcgacttggattgaccgcaacatgaacggtgagcgaactcttccgtttacctttccgctccattccctctacaatcaaaaccatggtgcggattagcgtgggaagccccacccatcacacaagcgggcggctgtacggcgtgttcttcgaggacatcaaccatggtgcggatggcgggctgaacgccaacatggtgaacaactacagttttgacggcgtctatctcgaccatcacacgtggcgtatggccggcgccgaacgatggtgtacacaggccgattccctgcgtttctgggatttcatcaactgttccgccgccagcctcggcagtgagatacgcgggattcacggccagcgggtgaccaccgactgccccgccccgccaattcacgcacatagccgatacgctcgcatcacgtccgatgttccttccgaaaccggccctgcatatctggaaaacctcggctataacggaggcggcgacaacgggggcgagcccgcgttctccatcgccgccgaccacacctattccgtcagtctcgcggtacgtccggttcatgggcgggccaagctgtccgtcggcgtggtcgataggtacggtctgccgctcaccagcaccactcgattgtcgtatatcgtggacgcagatccgcttgacgatacggaagagaccggtctgaggcaggacgatggtgccaatgcgcaggattccggcgtttcgatcagtccggattcgtcggatggtgccatcgccatcggccgtgacggctggtaccggttcaacgccgacgtaaccggcctgaacaccgattacggcaagctgcgtatcaccattgacgccggcgaacgcaccacgttcgatctggatctggtgcagttcatggatgcggactattggggcgcgggcgacccgaaatggcgttacggcaagctgcgccgcgatctggtggaaaccattcaggcgttgcatccagcgtttctgcgattccccggcggctgcatcgtcgaaggtgtgacgcccggcaatgaatatcgctggaaggataccgtcggctccctggccgcgcgacgccaacagtattcgatgtggtcgttcaagatgccggatggttccagctattcgcagagctatcagatcggcttctacgagtatttctgcctgtgcgaggacctcaaggccaagccgctgcccactctgttcgccggcatcgcatgccagtcgcccggccgcgatccgcgccacatggatatcaattcggccactttccgcaacaatgtgattcaggattacctggacctcatcgaattcgcgaatggcgatccggagtccagctcgtgggccgcggtccggcgtgatatgggccatccagaaccgttcggcctggacatgatcggcgtgggcaacgaaaacttcggggctgactacgtggccaagtttgacatgatcagcgaggccattcacgaacgatacccggatatgctgtgtgtgatgagcgccggactgttccccttccagccgacgatgaaacgcagctgggaccatgcgcgagcgttggccgcaaccgattccggggcacatgattccgccaccggtgacgcgattatcgtcgacgaacattcttaccactcccccgaatggtttgcataccaagcgtcacgattcgacgcttacccgcgttgcggcgccggcgtctatttcggcgaatattcagccaacggctattttgccggccaaccgcagaccgaacagggcgcgaacacgtggaagtcggcactcggcgaggccgcgttcctgaccggttgcgagcgcaattccgacgtggtgcgcatgatctcctatgcaccgctgctcgcgcatatcccggctaaggggtgggcgcagaatcttatcgaactcaatccggcgcatgtgaaccccacggtgaattatgaggtggagcggctgttttccacgtatctgggcgacacgacatatgccgtgtccatcgagcagaccgcgtcacgccccgccaaacatctgtatgtcagtgccaccgggcatgacggggatgacgcctgccgttacatcaaaatcgtcaatacctccgattccccggtggatgtgacgttggaaatcgcgcgcggactggccgggctgggcgcctcgccatcgcgaccggtgcgtttggaggtgacgacgttaagcgccagtccgacggcgaaaaccactatcggataccgcggcgaggcttcgggggcgattgtgccggaacgtcgggcttacacattgccgtcgccgtcttcattgctggcgatgaagatcaagccgtacagcgtcacgctggtggcttcgcgctgattgacatcggccattaggccgattcctttgccgttagaatcaccctcaaggatgagggggaatcgtgcagattcagggaataataggggctatcccccatagcgaatacaagcacgggagggcaggatggaaaccacggcggccagaagaccgccggccaacgatgaaggagtatgcggtatgtttatcaatctgttccgcaggcagcgccctgcgctcgcccggctggcccgcaactccaacgcctatcgtcagccgatggttgcggccgtatcatcgtccgcagtcggagtatccagcatcacctctgcatccaccacagccaacacagacggcgtatccggcgtatccacgctggatgccaccatcggccgcattcatgacatcccgcagtcggccatgagccgactgaccggctcccccaccgtatacgcgcggtagaccaccccagtcggcttcgccgacagcccccgtcagcggggtggagatggctgggctcagagactcggctcgatgatccagctcaaggtcagcaatacggccaaaaacagaacgttgacggcggagtagacggccagataccggcctttcttgtgcgggtattggcgcacgacgttcttgtaagaaataagcgaggccatcgaggcgatgagcgtacccatgccgcccaaattggtgccaatgatcagatcgcgccattggtcgcagaagccggaaagcagaatcgtggtgggcacattgctgatgacctggctggagccgaccgccacctccagcggatggccgccgaccagcgagcgcgccagttcgtagaattcgggcacgcgcttcatgttgccgatgaagatgaagaacatgcagaaggtgagcggcagtccccaatccacgtatttgaatacgcgccgatcggtgaacaggaacacgacgaccacgatcacgcacatcacccacaggggaatcacgtcggagacggccagtaggcagacgatgaacagcagcgagtagacgatggtgcgccagccgccataaccggcgccgtagccggtgatacgaatctcgtcgggctggtgtttgttgcgctcgggagccagcacgccggtttcgaggtcgcccaggtcgccgaccggtttgccgccaaacaccacggaaatcacgatgaccagcaacacggccgccgtgccggaatacggtgccatgatgccgaggaattccatggtcggcatgccggtcagggctttgagatacaggttgtgcgcgttgccgatcggggtgagcatactgcccacgttcgcgccaatggtcatcagcgtgaccacgaggatggtcttatcctcttgcccagccatgatgagcacggccaccgcgaacggcacaaacgtgaccagcgcaacgtcattggtgatgaacatcgcggaaaagaacgtcaaagcgacaagcgtaatgaccagtccgcgcatggtgctgaccttctccagcaatcgcgaaccgatgatgcggaacacgccgatacgctggaatccgcacaccacaatcatcaggcagatgagctggctgatggtgctggcgtgaatgtagcttttgtaatcggcgtccggcggcacaatgaaacacgaaatcagggcgagtattgcggcgacgatgagaatcgtctcatttttggctacattgatcagccagcgtcgcatccattcctccgtgaataacccaatatcgcagccgttctattctacgcgcagaccggcataaggtacgtagtcgcgttgcgctggcggacatgagtttttggaccggtgccgc

SEQ ID NO: 748 - DNA, 28546 bp, Unknown
  R14_18m  MAG No. k141_126
gtggaagcccatgcgcctccacgcatagttgcaagtctagtagtactgcgccgggaagcgctacgtgtgctggcatattgtgagatgaacggggtgttggaatgggccgtcgctaggatggaggaagttacgcatgttaccaatgcgtaaacgaatatccaataagcgattgtatgaatggttcgcacagtaaaggaggaacaatgggtcagggtcaatcatccgtttttgatctcgcggcagtggctgcggcgtccaatggggggaacaacgacccgctgctgcctccggcacgattcatcggcgatccgcagaagccgagccgtatgccgtataacaagtacgccgcctacgacaagcagatcccgtttgattacccggagcgcacgtggccgggcaagcgactgcagcgcgcgccgcgctggtgctccgtcgatcttcgcgacggcaatcaggccctcgtcaacccgatggattccgagcgcaagctgcgtttctggaacctgctcgtctccatgggattcaaggagatcgaggtgggcttcccgtccgcttccgaaaccgatttcgacttcatccgtatgctcatcgagcgtgagctgattccggacgacgtgaccatcgtggtgctcacccagtgccgcgagcacctcatccgccgtacttatgaggcgctcaagggtgccaagcgcgccatcgtgcacttctacaactccgtgtctgtgctgcagcgcgaggtcgtgttccgcaagaacaaggaagagatcaagaagctcgccaccgacgccgccgaactgtgcaaggacctcgagaacgaggccaagggcatcgacctgtactacgagtactcgccggaatccttcaccggcaccgagccggagtacgccgtcgaggtgtgcaacgccgtgatcggtgttatcaagccgactcccgagcacccgatgatcatcaacctgcccgccaccgtggaaatgaccacgccgaacgtgttcgccgacgaagtggagtacgtctccacccaccttgacgaccgtgactccgtagtgctctccctccacccgcacaacgacgaaggcatgggcgtggccgccaccgagctggccgtgctggccggcgccgaccgtgtggaaggctgcctgctgggcaacggcgagcgtaccggcaacgtcgacttggtcacgctgggcctcaactggctcacccaaggcatcgacccgcagattgacctgtccaacgtgcccgagatccgcaagacggttgagtactgcaaccagatcaagatctccgagcgtcacccgtacgccggcaacttcgtgttcaccgcgttctccggctcgcatcaggatgccatcaagaagggtctcgaggctcgtcaggtggccgccgagcgcgctggcgccgatctcgacagcttcgtgtggcttgtgccgtacctgccgatcgacccgaaggacatcggccgcacgtacgaggccatcattcgcgtcaactcgcagtccggcaagggcggcatggcctacctgctcaagaccaaccacaatcttgacctgcccaagcgtctgcagattgaattcgacaagatcgtgcaggactacgctgacacgaccaagaaggaagtcaaggacgaggatatctggcgtctgttcaaggacgagtacctgccgatcgaacagtccggcatgaccgccgccggtgtggttgtgggcgatactcatgacgcctcgctcgcgccgtggggccgcttgaagctgctcaaggtggccgtcagctccggtgaggatggctccgataccgtgctcaaggctcgcctgctcgaccgcggcgtgaacgtcggggtcgatgcgcccgtggagcgcgaggtctccggcatcggcaacggtccgatcgccgccttcctcaacgccatttccaactttggcgttgacgcctcgattatggattacgtggagcacaccatgtccgtcggcaccgacgccatggccgcctcgtacgtggaatgccaggtcggcgaggccgatgatgcgcagatcgtgtggggcgtcggcatcgattcgtcgatcaccaccagcgctctgaagtcgattatctctgccatcaaccgttcccagcgcaagcgctgagcgctaacaacaaaacaaagctccctctgattgcatcagagggagctttgttgtctgtgcttacttactactgggtgacgccgttggtgccggtgttcccgccggtgcctccggaattaccattatcgttgccggtattgttcccgttgttcccgccggtattgccgggattgttgccattgttgccatctccgccggtagtggtgccgggataattcggacactcggtggaatagctcggattggcgaggcactgctgggcgaactcctgggcctgctgttgcttcttggcttcctcttcggccgccttctgctgtgcgtcctgctcagcctgcttctgcgcgtcttcggtggactgcttgttggtgttgttggacaggccgctgctctgtcccttgcccaagccccaagtgccgtcgggtccaccgatcttgccattgtctttagcggtcgggaactgctccacctcggtaccttgcaaggcctgagccatgaactcatggaacaggtgggcggggtatccagtggaagagatgccgtatccggagaaggccggcaccgcctgcggattgcccttatcgtccgggttccagatagcccacacattcatcatgctgggggtgtatcccacgaacgacgaagccatttcgtcgttggcggtaccggacttgccggcgatgggtcggcccagcatgttggatgtgccggccgccgtaccgtacgtggtggtgccctgcatggccttctgcaccaaagcgcagtcgttggcatcgaacaccttggtgcctttgctgggcgcgttgtacatgtccttattgttggaatcaagcactttggacaccatgtgcaaggtgctcttcacaccattgttggcgatggtcgaatggccttgcgccaaatcccacacggtcagggcgttgatgcccagcacgttgtacatggagttttcatcgatatcgccctgaatgcccgcttcatgggcgattgcggccgtgcgcttcggcgtcagatgctcattgacgttcatgaacaccgtgttcaccgagttggcggtggcctgatacagattgatgttgccccagttgttctccagagcgttattcacctcttgatccaagccggtgaagtgctggtgggaattgccgttgaacaacgtatcgaagctgacgccggattgcgcggcccccagcaaagcgaacggcttcatagtcgaacccggttcgaatacggcctgatcggcattgttgagctgcttggacagataatctgaaccggcgtatacggacaatacttcaccggtcttcgggtccagcgctatgccgccgatttgcagggattcaggcatgtcgtccagacgggtgtcgccgatggactgcataaggtcctgcttgctcttgtcgatggtggtgatgatcttgtatccgccggtatccaaatcctctttggtaaaggccttggactgcaccagctcacggcgcaccatatccagcagataaccgttcggccccgcgtattcgttttgctgcgccaccgcggcagtctgcgggaacttggcatcagtgtgctgcttggcagtgatgtaaccatcctcctgcatgatgttcagcacacgcttgaagcgcgatttggccatatcggcgttatcggccggatcccacgtggacggtgacggaataatgccggcgatcatcgccgcttcagacagcgtcagatccttggcgtccttattgaagtatgccttggccgctgcctggatgccgtaggagttgcggcccagatagatggtgttcatgtaattgcacagcacctcgtccttggactcggtttgcgcgattttgatggccacgatggcctcgcgcgccttgcccacataggatgtggtttcgcccatgtaataccgctcggcatactgctgggtgatggtggaaccaccttggcgcgtgcccttggtcacattattaatgaatgcgcgggcgatgcccctcagatcaagacctttatccgtgtagaacgtacggttttcggacgccacaatcgcgttgccgatgtagtccggcagcccctcgcaagagatgattgaacgattctgttccgcgtaggagccgatcgcggtggtgccgtccgcgtaatacacggtggttttctcggccaacgcgaacttttcgggttgcgggacctcggtggtggtgtacaggtatgcgaatactgcgataccggccagcaagcccagtccaatcagggagaagaagatgcccagcacccatttcagtacacggtgcttgccttttcctgtgttctttttcttcctgttcggggctcgatggctattggaagccttgtggcttgcgtggcgggaacggctctcctggggcgtataggggccctcctgtgcggagtggtcggctctgctttgcgcggtgcgcggttgcctcagagcggggccattgcctcccgaatgtgcacgacgagtataagaagccatggtgtccaccgtaactgttggccttgaacaatcgtttgacgtgagcgtaaccacacgcatttatgccggtatttttccggaattcttacaattgggcacgttccttgatgctgcatgaatattgtctgaatgcgctggttggcctgccgtgcgacccggcgcgcacgtttcgtgtcgctgcgctggtccatacgtctccatagacttatccccagcctccacgcggcgctatgtcacccaactcccccagggcaggaatgcagcaagggtaagtggcctctgacgggtgcgtggaggttttccatttgtgcggatttggccgtgagctggcacgagcacggctccctgtccggggcgcggccgtacagtcgaacgtatgaatgacgcacagacccctagaattcgcgacccgcatgcggcggtcaatctggtcggctcaggcgcagcgcagcctgactcgtcgtcgaacgttgttgacccattggctgcgctcggcccggtctccggttcagatgcatcggcatccacatcaggctccttaggggatttcaggccgctgggcatggacgatgcggatggggcatctgatatcgaccgtggcttggcccggcttgacccgcttaccgtgcgcccgcgaatctccagccgcgtactgtgcgtggtattcggtctgctcctgatcgctattggcttcggcgtgtggtgggggtgcgtgtttaccgaaaacggacaatcgtacgacgaactggtctggaaaaacctgcacaacgatgtaccgtcctggaccaccggcatgatgaacgccgtcgcacaatcctggctggttatcgctgtcagctgcacaattgccgcaatcggcattattacggcgctgattcgacgccgctggtggttggccgggcaaatcgccgtgttcgccgtggtctgcttggccgtcacccgtatcaagggtctgttgccgcgtccgttcatcatcaacactgaatcgcctgccgctaattccgcgccttccggacacacgatgctggccgcagcctgtgcggtgattctgctgcttaccgtgcctcgcgcggttcgagctttggcgggcgtcatcggcgtggtttgggcggcgaccgtcggtgtctctgtgatatacgggcaatggcatcgcccttcggatgtggcgatgtccatcctgctggtggcgggattggccctgctcgctctggcggttacacgcaagtccggcatggacgagccgggccaccgcgtctcctcagtgagtgtgcagatcgtcggcagcgtgttgattaccgggggcctgctgttgctcgcctacagcggttatgtgatctggcaggtggtgccggggctcaatgtcagcgccagttgggcggttcagggggcgaatgtcagcgctgttgtgggcattacgggtgtggccatgctcgcattcggactgttgctggccctacgtcagatcactgcagcgcccttaagcaggctgggcctgatcggcgctccgccggcaccgcccaaacggtaaaacatgaggtgcgaacggccgaatttgcctggcacaacggcggaatttggcagttggatatgattcatgagtattatgacgccagaaacgtcgtgtgtttcgcgcaatacataaggagtgggtatggctaccaaactggtgattgtggagtctccgaccaaggcccacaagatcggtgactacctgggcaaggggtacaccgtcatggcgtcggtcggtcatatccgcgacctcgcgcagcccagccaggtgcccgcggcagacaaggccaagttcggcaagttcggcgtggacgtcaacgacgggttcaagccgtattacatcgtcgacggcgacaagaagcgtacggtcagcgaactcaaatcagccctgaagaacgccgacgaactctatctggcgactgatgaggatcgcgagggcgaggccatcgcgtggcacttggtgcagaccttgaaacccaaggtgccggtcaagcgcatggtgttccacgagatcaccaagaacgccatcaacgcctccctgaacaacacgcgcgacgtggacggcaatatggtcgacgcacaggagacccgccgcatcctcgaccgtctgtacggctatgagctgtcgccggtgctgtggcgcaaggtgggcccgggcctgtccgccggccgcgtgcagtccgtggccacccgcctgatcgtggaacgcgaacgcgaacgcatggcattcaagcgtgtgccgtactgggatatcgtcgccatgttggccgcgcctgacgcgctgggggagcgtgccgaattctccgcccgcatgatcgcgctcggcggcaagcgactcgccggctccaaggatttcggtgccgacggccagctgaccccggacgggttcgcggcgaacgttcgccagcttgatgaggctggtgccactgccgtggctgaagcgctgaggaccgccgatttcactgtgatgtcgatggaaaccaagccgtaccgccgccgcccgcagccgccgttcaccacctcgaccttgcagcagaccgccggcaatcgcctcggcatgggtgctcgcgtcgtgatgcgcgcggcccaaagcctgtacgagaacggctacatcacctatatgcgaaccgattcggtgacgctgtcgcaggaggccatcaccgccgcccgcaacgccgtctcctaccatttcggcgacaagttcctctccgccgagcccaagcagtacgccaccaaaaccgctggcgcgcaggaagcccacgagtgtattcgcccggcgggctcgcgcttccacgacccggatgagctggcttccaaacttcccggcgaccagctgcgcctatacacgctgatctggcagcgcacgctcgcctgccagatggctgacgccaccggctccaccgccaccgtgcgcctgtctgcgccggccggccccaccgagggcgaggccgtgttccaagcgtccggcaccgtcatcgaattccccggctttatgaaggccacgggggaggggcgcaagcccaaagccgccgctcccggcgctggggctggctcggaccaggctgctgccgccggcaagacggacgtcaaggccgtcaggggtgacgcctccgaatccaacacctccctgccgccgatgagcgtcggccaacaggtcgaggcaagcgacatcgaaccggacggccatgaaacccagccgccggcccgttataccgaggccacgctggtcaagacgctggaggccaaggagatcggccgcccgtccacctacgcgagcatcatctccacgattatggatcgcggctatgtgtatgagcgtggccgtgcgctgatccccagctggctcgccttctccgtgaccaagttgctcgagacgaacttccccaagctggtcgactaccagttcaccgccgagatggaaaacggccttgaccgcatcgcccacggcgaggaatccggccgcgactggctcacccacttctacttcggttccggcgagggcgccgcccgcaacgccgacgaggcgcacgaaggcctgcaacagcaggtcgcgcagctcggcgagatcgacgcgcgcgccatcaacaccatcgacatcggcgacggcctgcacgtgcgcgtcggccgttacggcccgtatctggaagacatggagcatctggacgtcgaaggcaacccgaagcgcgcgtctctgccggacaccatcgcgccggatgagctgacggtggccgtggcccgcgatttgatcgacaaccactccggtggaccgcgcgagctgggcgttgacccggtatccggcggtaccgtcgaggtgcgcaatgggcgtttcggcccgtatgtggcgctggtgccgccggctgaggcttcggctggcgctgctggcgatactgctggtgcttctgcggccaagaagggttcgaagaaggccgcggccgccgccgcgtcgcgcccgaagatggcctcgttgttcaagacgatgagccctgaatcgctgtcgctggaagacgcgctaaagctgctgagcctgccgcgcgaagtgggcacatacgaggaaaccaacgccgaaaccggtgaggtatccgaatgcacggtggccgccaacaacggtcgctacggcccctatctgaccaagacgggtgccgacggcaagtcggagacccgctcgctggcctcggaagacgagatcttcacggtcgatatcgacaaggccaaagaactgttctcgcagcctaagtacggccgcgggcgtggccgtggtgccgccaagccgccgctgcgtgatttgggcaaggacccgaacaccggcaagaacgtgaccatcaaggacggccgtttcggcgcgtacatcaccgatggcgagaccaaccgcacggtgccgcgtcagtacacgcctgaatccatcacccctgatgacgccttccgactgctcgccgaaaagcgtgcggctggtccctccacccgtggccgtcgcggtgctgggcgtgcaggtgccgcgaagtcgggagccaagggagccaagaagggcgctgcttcggctgcgaccaatgccgccgaggccaagcgcgccggacgccgtgccgaggtgaagaagctggcaaacaagggctggtccaaccagcgcatcgccgaaaagctcagctccaccgccgccaccgtcaagaaggatgtcgactggctgaccgccaacgagggctacgagcgccccgccgtaattcccaagcgtggctgagcggaattattgctctacttgcgtttcaaggggctgatttctcgttttgagaatatctacttccgcttcaaggggctggtcatctgctgaaccacgagtatgaacggctccgcgccaacgtcattccgccgttttgggacgttgtctacttgggtaacagcccctcgaaacggaagtagaccttcagaaaagaccaaatcagccccttgaaacggaggtagagctggtttaactgcctgttgggcacaactctgcgcctaacgctaaggtcaatagcatgagcggtctgtttgtttcgtttgaaggtgtcgatggcgtgggcaagaccacgcaagtcgagcggctgcgtgcgtatcttgaggctcaggggcgtaccgtggtcgttacccgtgagccgggaggcactgcgctaggcaaggccattcgccaactgctgttgcacggtgtggatgggggcgccgtcgacatcgcaccgcgcgccgaggcgctgctattcgctgcagaccgagcccagcacgttgccgaaaccatccgcccggcattggagcgcggtgaagtggtgatcaccgaccgctatttagactcttccttggcttatcaggccggtggccgcgaacttacgccagaagagattcgagccttaagcatgtgggccaccaacaacctgctgcccgaccgcacatatctgctggatatggatccggcgctttcccacaatcgtcttgagcatgccgaagatcgcatggagtcggccggcagcgacttccagtcccgcacccgtcaggcgttcctcgacttggccgtggccgagccgaatcgtttccacgtgatcgatgccagccagtccatcgaacaggtgtggtccgccatcgaagcggacattcagacactgctgcgggacaatgttgcagatgtggatacggtgatggcgcgatccggggcgtctacaggagccgtgacgatgggcggtgtccgatgagcgtatgggattcactagtcggccagcagccggtaatcgacatgctcagtcgcatcgcgcagggcgacccgggtcagatcacccagtcgtggctgatttgcgggcctcccggctccggccgttccaatatggcccgagcattcgcggcggcgctggaaagccccgaccacggcatgaacgatgagcccacgcgcgtcacccaacaggtgctcgctggcacccacccggatgtcacagtgctggccaccaacaaagtgaccatcggcatcgaccaggtgcgcgagatcatcaccgcctccgagcaaatgcctgccacggcaccatggcgcatcatcatcatcgaggatgtggaccgcatgctggagcgcaccaccaacgtgctgctgaaggagatcgaggagccggctgaacactgcatctggctgctgtgtgcgccgagtgcccaggatgtactgcccaccatccgctcgcgcacgcgcatcgtgaacctcgccgtgccctccacccaggcggtggccggattcctgacctccaccaccaatgtcgagccaaaagtggcgcagcgtgcggcccgtctggccgagggacacatcggcatcgccaagttgtacgccactgacgagcaggtgatgacggatcgcgacgaattggtggtgggcgtactgaacctcgctcgcgcctcggacgcggtgctgctggccggcagccttatcgacaatgccaaggcccaggccgaggcggacgcaagccgcatcaccgccggccaggaagcggaattccgccgcatcaacggactggcaccgaacgaccgcatcccgccgaaactgcgtggcgcgttcaaccagatcgccaagaaagacgatgtgaagcgtttggtcacccgccgtacgcgcgacgtattggatcgtgcgctgaactccatcgcctccatctaccgggatgtggcggtgctgcagaacaatgcggaggattcggtgggcctcatcaacctggagaaccgctcgccgatcaccgaattgtcggtgcggttgaaccgggccggtgccgtgacccgtctggacgaagtggcccacgcccgcaagcgtctagccggcaacggcaacccgctactggtattcgaatccctcttctgcgccctaattccataacccgacgcaaccagccccctctgacgagggggctgtcgagcgcggcgagactgggggagagacccccgtaacgcacagcccccagtacgtcacacatatgagcgatactgggacatatgaagatttccgccgatttcaccgtcattccggacgattttgccaaggccgccgcgcctgagtacttcaacggcggcgtgccggtcgtctccttcccgttctacatcggtgatgtgaaccccgaggcccgttacctgcactgggagttcgtggacccggattcgattccggtctgcggcttcgagtggattcactggtccgtggccaatctgccgattgacgcgctgatgtacgacttcaatgattcgcatgcgttggccatcccgccggacttctcccgtcagctgccggccatgattcccgagaccgtgcaaggccgcaattcttcggcctccaagttcttgggccgcagcactgacccagcggtgatcatgcggtacaacggtccgcagccgccggacaaggaccacgagtactacctgcaggtgtgggccaccaagaagccgttgcccggcttgaatcagggcttctggctcaacgagctgttgcacgcgctgcgcaacagcggcgaagcgcccgacaccgacggcatcttcctgaccggtaaggcgtgatttttagttggcgtatgtgagctccctctgatgagggagctggccgccgtaggcggactgggggagagacagctagagtgactacccctcagtctcgctttgcgagacagctcgtcctgcaattacggacgggctaccgcccgcaacatctgtggtgggacttatctcccaccctcgcctacaaacagcccaccgggctgtttgctgaacggctcagcctgacaaggggagcttgaataagagaaaggacaccatcacactatggcctgcaccacgattctggtaggcaaagacgcgagctatgacggttcgaccatcattgcccgcaacgaggattccgcgaacggcgagttcaacccgaagcgcttcatcgtcgtgaaaccggaggaacagccgcgcgaatacaaatcagtgatctcccacctgaccatcactctgccggacgacccgctgcagtacaccgccgtgccgaacgcggacctcaaggaaggcatctggggcgaggccggcgtcaacgaggcgaacgtggcgatgagcgccaccgagaccctgaccaccaacgagcgcgtgctcggcgccgacccgttcgtggaatacacgccggccaggggcgatgagcccgaggtgcccggcggcatcggcgaagaggacttcctgaccatcgtgctgccgtatgtcaagaccgcacgccagggcgtccagcgcctcggcgcgctgcttgaggaattcggcacctacgagatgaacggcgtcgccttctccgactccaacgaaatctggtggctggaaactgtgggcggccatcactggattgccaagcgcgtgccggacgaggcctacgtgaccatgccgaaccagctcggtatcgacgaattcgaccttgaggacgctctgggcgaccaggaagcgcacatgtgttccgaagaccttgccgaattcatcgaaaccaaccatttggacctcgcggtggagaacaccaccccgttcaacccgcgcgacgccttcggctcccactccgactccgaccacgtgtacaacaccccgcgcgcctggtacatgcagcgcttcctcaacccgtacgacgaggtgtgggacggcccggacgccgaccacaagcccacctccgacgacatcccgtgggcccgccagcccgagcgcaaggtgaccatcgaggacatcaagtacgtgttgagctcccactaccagggcaccccgttcgatccatacggccagctgggcgatgagcgcacccgccacatgtaccgcacgatcggcatcaaccgccagagccagcttgcggtgatgcagatccgcccgtaccgcccgcaggcctcccgcgccatccagtggatggcatacggctccaacccgttcaacacgctggtgccgttcttcccgaacgtggacaccacgcccgcttaccttgaggacaccaccacccgcgtgacgtccgagaacttctactgggccaaccgcatcatcgccgccctgtgcgatggcgccttccgctccacgtccaacgccgtcgagcgctaccaggagaagaccggtgcgatgggtcaccgcttggtcgccgccaccgacgagcagatcgcccgtctgggcttgacggccgccgaggaagccgcgcagtctgccgctgaagaggaattcgaggccgacaacgtggatggcgatgtgcagccgatgaccccggacgagaccatcgccgcgctgcgtaaccccgaggtgcgcgagattctcgccgccgccaaccagaccatggccgaccagctcaaggaggaaaccgacaagctgcttgactccgtgctgtacactcgcagcatggaaatgaagaacggcttccacatgtccgacttttagtccgtattgagctcccctccctgaggggagctgaccgcgaagcggactgaggggctaagctgttaagaaacagcccagtgggctgtttctaggcgaagaggcggcggcggccgccccaccaccccgctccgccatcatcagcacagaaaggcattaaatgaccaccatcgaagacttcaccagccagtacggcctggtccagaagatcgacgcattcggttacatgaagtacctggccgagaacccggacgccccgtgcaagcacggcaaggtggtgctcgtcaccgccgatacgccgctcaaggcatcgcgcggcgaaggcaagaccaccacgaccatcgccttgatcgacgccctgaacaagcgtggcattgatgcggccgccgtgctgcgtcagccgagcatgggcatcaccgcagccggttccaagggcggtgcctccggcggcggcaaggcatccctgacccaccccgagctcatcgactggggtctgtgcggcgaaatgggcgccatcgaggcggcccagaacctgctcgtctccttcgccgagaaggccatcgatgaaggcaagcttgacacgattctcgtgccgcgtgtctccgaggtgccgagccgctccctgcgctccaccgccgtggactacggcaagggcaacgtgccggagaaggtcgtgctcacgccgacctgcgagctcatgcagatcatggtgctctcccgctcgatggacgagatttccgagcgtgtatccaagatgatcgccggcaccaaggacggcaaggccgtgaccttcggcgagttcgtggacctgtggcgcatcaccggcattctggccgacgcggtcaagccggccaagaccgagaccgtgaacggctccccggtctacgtgcacggtggcccgttcgccaacgtgtccatcggcattccgacgctggtttccgtggaaatggcctgcgctctgcatgacgtggttgtcgtcgaagccggttacggcaccgacgccggtgcccagaagtggctggacatcgcctgtcgcgagtatggcgcgcagtggccgtccgccgccatcgtggtgacccgcgcctccacctggcgcgacgatcccgagctggcctggcgctacccgttccacgtgcagcgcctggagaacctggacattccaaccttcccgctcatcaacctgtgggaaggcgaggacgatcaggttccgtccctgaaggccaccgccgacgagctgggcttccgcacgccgatcgtcggcaatctgttccgcgacggcggcgaggcgctggtcccgcagcttgacggtttcgtcgatgcgttgcagaacggctccatgccggccgaaccgcattcgcacaagggcatggccctgaccgagaacgccaagtgggtggccgagaacgcctacggcgtaccggccgagcgcgtgatctacaagccgggcttcaccgagtccgtgtccgaggccatggaactgtgccagagcgcaggcatctcgctggatgatctggcgttcgtggcggtcaagtccccggcgaccatgaccgacaacgaccgcgcccccgaagaagagcgcaccgtgaccctgaagaaggtcgaggtgcatgccggtgccggtctggtccacgtcaacctgaccaccagcctcaccacccccatgcccaagattgtgtgatgacaggcatgaggtgaggtaactcgttttcgaggggcggatttccggttttccggaggtctatctgcgtttcgaggggctcttcgattgcgaaacccggagtatgaccattgaaattgcaatgtttatactccgggtttcttgttttaaaagccccttgaaacgctagtagagcttctgaatgttggaaatcagccccttgaaacgtagaaagcccgccaccggcgggctttctacatctgagcttccctctttgagggggagctgtcagctaagctgactgaggggagccagaatacgcaaactagttgccaccctgagccattaaacggaaagcccactgggctttccgtaggcgatgcgaacagctatgctgcgaggggaatggtggcaactagaagttgccgccattccagccccaatcggtggtggcggtgtagcggatgtaggtgcggccctcgggaatgccgagtgtggagttcagcgcggccataatgctttcggtcagcttttcccaagcagagcccggcacagagcggccgaatacgttgacctccacataggcggcgggctggtcatcgctaccaccgaagtagattggcatattgtcctcgaacgggcacatcagccagccttcggacttgcccggcacagcggtaatcgccttgccgtaggcggccttcagtgcctcacgctgctcggggggtggtggacacggacacatgagtgtgaataacgggcataattcctccttgattcggttcacttccagtctagcctcagcggctgctgttgaacatggcatgcggacgtaggaagctgcttgcagaacggaccggggcaaggccaattggggatattattggcctttccagccaatacacgttccgcagtcagcccaatagtgttgaatactcttgtgagaaaactgattgaacagctgatgaagttcggcattgtgggcgttatcgcctttgttatcgactggggtatcctcaacctattggttggcatattccacatgcacaacgtgctggctgccaccatctctttcatcatctcgctgattttcaactatctggcgagcatgaaattcgtattcaagcatcgtgatgacatggcacgctggatggagatccttatcttcgtggcgggcgctgtagtcggtctgttcatgaatgacgcgattatctggatttccacctatggtatgaaccatgatgcctatgtatcgcagcatgccgaatatctgttgcgcaccaatatcggcaagttggtggccactgccgtggtaatgatctggaacttcttgattcgcaagtggctgctcgacgatacgcacaccaatgcgatgaaccgtctgaagtccgctgaaaatcgactgaatgccgaggagcttgaagccaagtggcagaacagcttctcccacaagctcggcatctggtccttggagcacacgcccaaaggctggccgaagtagcgttttgacgtatgctaagccccctcgtcagagggggcttagcatacgtctcacacactcacttcagtcagggtcggctgctcggtggagcccttgatctgcttgaagccgatcagtgcaatcaccagcgaggccagtgccaaggtggtcaccaccatgaagcctccgtgcgagcccatgcggtcgatgaactggccggcaatcgccgaaccggcggaggagccgatagaattcatcgcacccatccacgccatgccctcggtcaagcgagagggcggcaccagatgcagcatgagctggttgccgttgatccacgtcggggcctggcatacgccaataatcaagtagatgatcatgatcacccacagatgcttggcgaacaggaacgtactgatgccgatgttcaccacggccaggcagaagtagaagcgcttccacagggcaatcgaccagttcttcgcgccatacaccaatgcgcccatcagcgagctgaaggagaagcaggcaaacacaaagcccgtgtactgcttcatattcgcttcggtggcaaacgcgatgatggagatgcccgtagccgactggaacgcgcccaaaccgaaccaggtgacgcacaccgcaatcagacccggaccccaaatggacgccttcttgcccgaacgcgcatcggcgaccgcctgcttaatggctgcgttaatcgtggcctcatcggtcacgccttcacgctcaagacggcggcgggtctcctcggcggcggtttccaccttcagcgcctcagccttggcggcctcgcgctcacggtattccttgcgggagatgccctcggcacgtgccagcgcggtctgcgacggtggctcagtggtcagctcggtcaggaacatcagcgcaccgaccaccacgcacatgccggtgaacgagaacgccagcaaaccggagatcacggccagcgtggaggccagcggattaccgatcacccacatgcattcgtcgagcacgccgcacagcgacagcgcgcggttcgtgcgctcccggtcacccttaagaatcttggtccagcgcgcgcggctcatcgcgccccacggcggaatggcggccaggaacggcgtcagacagtacagcacccattccggcgcgcggttggtaatcgccgtcaccagcgcgatggcggccacaatccaaacgataatcgtcggaatcgagacctgcctctggccgaacttgtcggtcagcttgcccagcagcggcgtggccacggccagcgcaatcgcctgaatggcggtgagcatgccggccagcgaatagttgccgtaataatgctgtacggaaatggtgatggtcatgccgaccatcgggaatggcatgcaggcgatgaccgagccgatggaataacgggcggtatgcggaatgcgcagtagttccgcatacccaccaaagactttgtggcctacttccttgatgccggccagaatggtgctcgagttcgagttggacgagttattggacataacagcactacgctcctttccgctcccgattggatgtcccccgctggcgtggcgttgccggcgaagccctcatcgaatgatgtgttgtccatggtcgcgcaaagtttgcgtcggattttcccatccgcatatttgcgtcacggatactctacgggtgtccactccgcgacacgcggtagattggagatattaagacaacgttctcatgcccttcagggcgggaagcagaaaggcggctcatgagcgctaccaccatccatttcgtccggcatggcaaggtatataaccccgaccatctgctctatgagcgactgcccgacttccatctttccgaccttggccgtcgcatggctcaagccaccgccacgtacttggccaagaatccccaaaccaatacgattgcagccgtctactcctcgccgctcgaccgtacgcgcgagaccgccggcgcgattctcgatgcgctgaaccccgtgcgcgaggctcgtggcgaggcttcgctcacgctcaccactgatgaacgggtgattgaggccggcaacgagttccgtggcaagcgcatcggccatggcgagggcgcgctgtggaagaacggcaactggaagctcgtcaccaacctgtacaagccgagctggggtgagtcctatcagcacatcgcggcgcgtatggacgacttcgcccgcgagaaggtggcccagcaccccggcgagcagattgtggtggtcagccacgaatcgccgattttcagttatcgccattatctggagaccggccaccccgagcactggatgttcctgcggcacacggcgctcgcctccgtgacctcggtgacgtacgacaacgaaaccggccgtgtgatgtcaatcacgtatgtcgacccagcagccaacgtcaagtaacggcacactggtgttaggacattggctcccctcagagaggggagccaagacgcactgcaatcgagtggtggacgcaaaggagcatagatgaccattgaactcaatcgtgaggcaatcgcacaggtcgcggcattgccggcggtaactgaggccgccgaagccggctcggcgctgatcggcctgtggccgctgaccgaagccatgcagatggacaatgacgcaaagtacgcggagaacctgcaggtgcgcgtcacccgtgcattcgcccgcatcctgaccggcgaggacgtcaccgtgccggacgccgagttcgtctacgaaggtgccgatgagattcccggtcgcccgcagagcatcgtggacgccctgctcgccgccaatgacgcctacgacacgatggccgactacgccgagtccggtgatgccaggctgatcgttgaggcggccgacgtgttgggaatcgactgggattccgcgacggcggaatcggtgagggaggcggtcgcggccatggaagcccaggtcgaggccgacgctgaagccgatggtcgtctggccacgtctgccaagcccgccgatgtggctgttcggttcgccaccgcgctcgccgtgtgcgatgcgttattgggtgaggtgtccggtgatgctgtggccgatggttcagcggacagtgtcgccaatgctgccgccaagattctgccgattctgctctacgtcaacgaactgcgcgagcagtgctcggtgccgcgcatctgcctgaccgacgagcagatcctcgggttgcttaatgcccgtgccaaagccgccgacgcagacaccctgaccgccaccgccgaatacatcgctcttctggccgttgccgaatggaacaagcaccgtgaggatgtgctctggaacccggacgaggctaagcgtcaggccaaggaagaagacgaaaagcgcaataaggaggctctggccgccaagttcgcgcatgtcaaggatgatcccggcaaagagaccgtggagttgtaaagagtaagggcgttgctctggccgatgcttcgctcgtaacggttagaggcctggtgcctctccctccgtcatcgctttgcgatgccacctccctcgtcagagggaggtggggttactgcttatcgattaccgagccgcgatcggtcagcgtcgggtccacgtagatgtggcgggttgtagaatccgggttttggatgcggttgatcagcaggttgatggccgcctcggccagatccttatcggacgagcgcagtacggtcagcgggcgggagctgggcgtggcaaagccgttgacggagatcatcgagatatcgtccggtacgcgcttgccgcggcgctccagggtctgcgcgatggcgatcgccagataatcggagtgcaccagcatggccgtcacgcccgaatccagaatggtgtccacgatttggttgacgtccctggtgttgtacggctgaatgccggtgatggtgaacgggcattcgatggcgtcgctttccgtcacgatttgcttccagccatcctgaatcagctccgaagtcggtgtatcggtgaacgccgcgcccacacgggtgtgaccgtgttgcaggaagcgcaccgccgccttacgcacgccatagggatggttggtgcgcactgaatcgacgtagcgggaacccagcagcggcagatcacgttcgatgatcactgtcggcgtcttcgtctgctcaatccaattccacgtgtatttgccgcattccggatgggcattgggggccacgacgagtgatctcaccgattactcaatacacaaacttgaggggagggctcccggaccggtgaaggaggcactgatgaacaccgaacgattcgaccttgaggatgagtctcaggactggtcggcgctcttcgccggtttgacggcctgaggcacttccctccgcctgagtgtgtgcgcaaagggcgattcctatacggggatcgccctttttctgcaattggctaattttggcatattttgccccgccggcgacggcgtattgtgtggcgaaaagagtttcgtagttcgtagtaaaacggaacatcctcatggatattctggttggtggattcggcaaactgcatcatgtggcttgccccggcatcgaacaattggtattggatgccggcggcgataacagtggcgatgccaaggtgctacgccgcgaacggctgctgtcggacgcgccgtcgcccactgggtgcagccagtgccggacggccgcgtgctgaccagcgatttgggtgcggatcgcgtttatgtgcaccattgggagcacggcgaactggtgcgcgagggggaagtcgtgcttgagccgggcactggcccgcgtgaccagcatctattgccagtcgcatccgatgatcttgcgcacgattggcgcgtggcggtcgtcggcgaatggggtggcacggcctttgtgcatcctgcggccatactttgcgattcttttttgttaaggaagtatcctatttagtgaaaagtatcgttcgcacaatgggaatgggaaacttatgggcaatggtgtcgatttgcgtatgctcgccaacaatggcggcagcgtggtaatcagcgattacggagcgcatctgttgcgctgggccccggccgggcaggcggatgtggtgtggacgccgagtacgtggcatatcgaggccggtaagtcgctcggcgggggagtgccgatctgcttcccgtggttcggcccgggttttgcgcatggcaagcagctggcactcaatccatcccacggttttgcacgtctgcgtcggtgggcgttggacgagggttcattcgacgacagccacatacggtatgtgttggattcgcagcagctgaacgacaatgaagtgccttggttcgatgacgagccgggtgctcagtttcatgccgtgtatgacgtgcaaacgggcaatgcgctgaccatgagcctgaccgtgatcaacaccggcgcggcgcctatgtcgtacgaggccgcgttgcattcctatctgcatgtcggcgatgtgtccggtgctcagctggtcggattgcagggagcgacgtatctggatgccaccgaagaagggtttccgccgaaaacacaggacgcgcaagtggtgacgtttggcgagcagccggtgaatcgtgtgtattactcggatgcgcgtctggaactgcgcgatgacatgttggggcgtgcgattcatatcagccgtaccgggtcgccgcaaaccgtggtgtggaatccgggagcggacggcgacaatatgagctacaccaagccgggcgaatggcgcggtttcgtggcggttgaagcggcggtatgccgcgaccgcatcgtgacgctgggcccgggagaatcccatgtgatctcccaaacgctctccgtaggcagcttgtaggagtagctcggcgcagcgtccatcctccaccgtaacgcattccggggaatgttgcgcgaagagaggggccgcaataacgcacaatgccctgtgtgctggaatgatccagtacacagggcattggcttactgaacggcggggaatactaccgccgcttgatgagtggggcctcattgttgggcttcatgagtgatgaggcgaacttcttaagcgaacttcgccggcgtcagtcactggccttgccagggtttctgtgcgttgtcatcggtgggagccgtgtgcggagacagcacggtggacccatcatcaacgttttcgggaatcggcggaacctggccgtactgtggggcctgagcgtcgggctggccgtactgcggggccggggtctccggctggccgtactgcggaaccggtacctgaccgtaatcgggcgtaggcacagcgggctggccgtagtcaggagccggtgcggtcggctgaccataggctggggctggctggttgaagtcaggagcgggtgcgttcggagcggtgcccggagcggcctggttgaagtccggggttgcgggagcgccgtacggtgcgccgtaagcgccctgaggcatcggggcagctactgcgtcatcgtcgaaacgtgcgccttccggcttgctgggcatagccatgaacacgatgtagacgattgaaccagcgagcgtaatcagtccgccaatggccatggcaccgaggccgccggttgccatggctccatagctggagttgctaaggctgccgaaggcgccatacagtgctgcgccaccgccggcaaccatgatgatcatgccgagggccatcgcgccatagaagatggcgacccaccagccgggcttgtccgtgtcatgcagacggcgaacggcgagcgccagactgggaatcaggatggccagactccaaatgctggaaaggaacccgagcttgtcgtccgtggcactgctgaggaggctcagcaggacgctgatgccgacagaggccaacgtccaccaccagaactcgctgcgggaggcacgtcccttgaagaccacatacttcttccagaaacggaggaatgcctcagggaaggggcagtcgtaatacggcttgttcaacggcacggctgctgtggcagtgggagcggcgtactggttgtatgcgggtggcacctgaccgtaagcgttggcgtccggtccgggctggccgtaggtaggagccgcgccgggagcggggaattgcggagccgcattcgccgcgtacgggtcggcggcgggctgaccataggcgggagttgcaccgggcgctgcgccgggtgcggaagaatcgggagcgggctgcccgtatgcgggctggccgtagactggctgtgcgggggacggagcgtcgaattgcccataatctggctgtgcgggggccggagcaggtgcgccgtattgcggcgtgctgggattctgctgggccggggtaccgttgggcgcgggcatctgcggcaacggcacgttgttgggatcggtcattgattcccctttcataagacgattgcgtcgactcctattcttccatcgtttgggtaaaaaactcaacagttgcgccaaatggtgtcgaagccttgcgtgcgggcgtgtggatggcgccaaagtaggtgtcaaaacaggtgtgaagacaggcatcaagatatcgggcactaccaaagacaggcaaaagagatttcgttggaaaatggccgttttgggatggtgttggcccgaaatgtcaataacgaagcaaaagagcgaggagcgctgctctccgcgtccggcgcgcgcggcacaataggggattatgactgatgctgaaaacaccaaacccgaactgcccaagaacgttcgtgtgcgcttctgcccgtcgccgaccggcaccccgcacgtcggcatgattcgtaccgccctgttcaactgggcggaagctcgcgccaccggcggcacgctgatcttccgtatcgaagacaccgacgccgtgcgcgactccgaagaaagctacaaccagattctcgaatccctgcgttggctgggtatcgactgggacgagggcatcgatgtgggtggccctcacggcccgtaccgccagtccgagcgtaccgccatctacaaggatgttgccgccaagctgctcgaagccggctacgcctacgagtccttctccactcccgaggaaatcaaggagcgcaaccttgccgccggccgtccggccgagttcggctacgatggctacgaccgcaacctgaccgatgagcagaaggccgccttccgcgccgagggccgcaagcctgcgctacgtatcaagatgcctgatgaagacatcgccttcgacgatctgattcgtggcaccatcgagttcaaggccggctccgtgccggactacgtgatcgtgcgcccgaacggcgacccgctgtacacgctgaccaacccggtcgacgacgcgatgatggaagtcaacgtcgtgctgcgtggcgaggacctcctgagctccaccccgcgccagatcgtgctttaccgttacctgatggagctgggcatcgccaaggagatgccgttgttcggccacatgccgtacgtgatgggacagggcaacaagaagctctccaagcgcgatccggaatccaacctgttcaaccaccgcgacaacggcttcatccgcgagggcctgctcaactacctggccctgctcggctggtcgatcgcgccggatcgcgacgtgttctccatggacgagatggtcgagaagttcgatgtgcgtgacgtcaaggccaacccggcccgtttcgacatcgacaaggccatctccatcaacgccgagcacatccgtatgctcgagcccgaggacttcctgcgccgctcggtgctgtacctgcaccgcgatggtgtggtttccgccgacaactgggatgccctgaccgaccgtgagcgtgaggtgctgaccgccgccgctccgctggtccagccgcgcgtgcgcctgctgggcgaggtcgccggcatggtcggctccctgctgtccaccgaggagtatctggagcctgcggacgacgccaagaagcagctcaaggattctgccggcgaggtgctggatgccgccatcgccgcacttgaggctgtggatgaggccgattggaagaccgacaacctgcacgagaccctgaacaaggccctcgtcgaggacgccggctacaagccgcgcctcgccttcggcccggtccgtgtggccatgtccggccgccgcgtctccccgccgctgttcgaatcgatggagatcgttggcaagccggtttccctcgctcgcctgaagggcttgcgcgagcacctgtgatgcgtcgtccaccgcacgccggcggatgatgggagcgtgacgcatggcgggcatccgtacatacggatgcccgctttcgcgttgcatggggtgttcccgcagaacggcggaaaatggcgcgacacgccgggatttgcgtgagagcagggtagtgcgtaatatatctacctgttgcgcggttcgcctcgcagccggttgaaaaactgaatatgcccccatcgtctagcggtctaggactacgccctctcacggcgccaacaccggttcaaatccggttgggggtacgacgaacaactcttcggagttgctacgccaagccaaattggggtgtggtgtaattggcaacacagctgattctggttcagccattcttggttcgagtccaggcaccccagccaataaccctcgcggatttgcgagggttttttgtttttacacgtcctgctcatgagatacggccgagagggtaatcctgaatagacaactctggggcaaagactgggctatagtcccaatccgtgactcaaaaacggcagaaatcccgcgtccgaacgtaaggggcgcgggatttctgccgtttcgggccgtgcaggaccggccgacatcgcgcgttgccgcgacttgagcgctgtccgatcctgaaaacgtgagggagaccgccctcgtcttacttcttgaccgcgttgacggcgtcaacagccttctgcagcgacgtggtgtgctcgtggtaccacgtgacctgctgttcgagtttcttggtcgcggcctggtagcccttggtgtcgtcggccacgcagccttcgtacgtcggcagttccacggtcagttccttggacagcgcgtcgagagcggaggcgtccgagacgtctgccttggtcagagcggcggcttctgcagcatcgccattgaccaagttgttgtagtcgttggtggcgttacgtacgtcttccgaggcggcggcgcaggcggccactgcactatcgtactgagacgcgctgtatgcgcgggtgccgaacaccgcgaccgcggcgataatcgccaccgccacgatggcaatcactatagcgacccacttcgtcactcgcttgttgtgcggctgtgccgtcgcttctgcttggttctgggattcgggctggttgccgttcgcctgctgtgcgtcagtcatatttacctctccttctcactgcccctgtttgtatcttgcggagggcctgtttcaaacaacgggtatccaacatatcgaggagagccgagattgccgggcgtttcctactggttgcgctgtggcgtggccgtttttgtctcatatggcgaaagtatgcgccagaggctattgccggccggtgacccacggcgcatccgaatggacgtgcggaatcatcatcgcgatgaccgccagcagacacccgagcatcaccatcaagatgatgttctcgtgtccgtgcgcctgcagaagcgcgccggtcagcgcgccagacgccagcgccagcattacgaccgcacgccgcccgagcttcgactgctggtggccgtgtgccgaagcgtctgcgacgacgccggtcagcgtcatcgtgagcacggtggtgggcaggtccggcaccgacagcttgcgggcggtggagttctggatgcccattgccggggcgagcagcacgatcagcaggatgatgtgcaggtcgatgtgccgtgcggtggggaagttcaggctcggctgtgaggcctgtgaggcctgggtggtctgtgcaagccgtgcaatcgaggagacgccggacgcatcgtctgcggggccggtgatgagctggttcaaaagatagacgccgattagcgcggcgagtacgaacgacgcctgcacgcaggtagaaaccaacagatgcttggcccggttctcctcgaatcgccggatgatgcgcccgccgataagcgcgccgaccatgaaggagacgagcgtcagcgccgacgtccaccagacgaagccttgggcatgggcgatcgaaaacccaagaaacacgatgttgccggtcacgttggccacgaacacatgccccagcgacaggtagctcagcgcgtccaccagcccggcgacgaacgtcagcaccaccaaggcgggggagagcagaccgtatctgtcttccttgcggggaaccaacgtgcgtcctgcttcggcaagatgtgatgtcatggttgcgacgaggctccttttcgggattgaaattatggcgagaac

SEQ ID NO: 749 - DNA, 4958 bp, Unknown
  R14_18m  MAG No. k141_205
cacatggtctgggttaggaagcccctgcgcatcggcggtggcgaggacgagttcggtcgcgagaccgctggtcgcccggtcaaggccggtctggccacctcgctcggcttcggacatgtttccggcttcgtggccctggttcatccgggtgccttcgaagcggccgtggccaaggccgatggcgaggccgcgctggaagcctggcgtgagcgtgccaacgcccgcctggccgccggccagcgtcacctcgaggaaggcatgatgggtcgcgccgcgctctacgagccgatcgacaaccgtcgcttccgcgaggatcaccgtggctacgaccaccacgaggtcgaaaaggcgatgctcctcaacccggacgcccgcctcggtgccgacggctactacgaggcctgattcctctggctcccctcggttgaggggagccagtagcgcaccggatctcggctcccctctttgaggggagctcccgcgaagcgggtgaggggagtttcccctggagctttctcgctggcacaaactcagtgagagaaatatgcagaacatacgaaagcccctccctcggagtgagctttctgcgtttcaaggggctgatttggcattcgccggaggtctacttccgtttcaaggggctgttgcccaagtagacaaggcgtaaaaacggcggaatggcgttggcgttatgctgcggatactcgtggtatggaggatgaccagccccttgaaacggaagtagacctccggaacggtcaaaatccgcccctcgaaacggagatagacctccggggcggggcgcggatgttttttggacggctaggcagccagcccaagatgtttgcggtattgcgcgaggtcatccagcatagtgaatcttttccccctgaaatggaaatcaggccccaattctgatgaggtgtagagattacgcgcgaagcggtacacaataggaagcatgaatacttgtggtttggggcatgacgtggtggatgtggccgcattcgccgaacagttggcggagccggggtctcgcatgcgtgcgctgttctccgtgcgtgaggtgcggcaggcatccgaccgcgcgcgccagaagaatgacggggaggccgtccatctggccgccaaatgggcgggcaaggaggcgttcctcaaagcctggtgcgattatcttggcgatgccccctatccgttcacgcttgataatttcccgtggcctgaaatcgagatcttggacgattcccgtggtgtgccgcatgtgtctctgggtaagggggcggcgtcagtcttccaaactgattacgcgaattcggctgccggcgctcgctattcccctgcttattcccttgcttccgataacgggccttatacagtgatgcaggagcggcggaatgcgcgttcggcgcagcgctcgactagcggtgcggggtcgatgccgcatatccatatttccctgagccacgatggtccgattgcctccgcggtggtgacgatttctgtggaatagcgcccgaggcccccgagtgctacatgctgtacaacgtctccatcatggttaacctgtggagcgcgctcaccggccgcgacgtgcgcctgctcaagaaccagatcgacaagctcgactcgctgcccgaaaactgctggttcgtgattctgaatgcgatgggcgccgacctccaaccatacgagtcccagctcatccatttgtgatttcgacggtttccagctcccctctctgaagggagctgtcgccgtaggcggctgaggggagtcctcggcaaagccacaatccatcaactagattggctggtcctgctgcagccacacgcgtttgccatccccgaagaaatatgtataataactcaagtcgccaaaagcgacgcttaacgcggatgtagctcaatggtagagcctcagtcttccaaactgattacgcgggttcgattcccgtcatccgctccactatttatatgttggtgtatctaattgggaataccggaagggtgagctaccccgagtagtattagtactcatggtgttgagaatcgacgaagctgaactgcgtgccaagctctttgagcacaaagagcagattggtttcgggccgattgccaatggggtcgtcatcatcatcgaaggattgttttacattcctgctgctctcacatctggactcgaccaaatgtttcaaggattgctccttgcattgagcattatcttcatattctatggagtatggagtttgattactgcttgcagaaataagtatgatgccataacactgtatgaggatatcgccaacatggatagaaccgaacgaagaagctcgatcattgcggtgaaagatgctaaccgatatcttctgtatcgtgatttaggttggggatgcgactttttccctaatcatgcaaccgcaagcagtactgatgaggatgttcgtcagctgacgacgtattttgccgatgaattcgaaattcctgctaaagactttactctgtctcacatttgtgtgaaggattctgagaagccatccacggagcatgatggagagattcgttattacgaatacacgctataccgcgctagcgtaacggtaatgcctgacgcctggcgttccactgagttccatgttggtgccaaggactgccgctggatgactcttgatgagatgcttgccgaccccggcatcaacaaaatcaatcatgatgtcgttgcgatggtgcgggataacttgtaattgttgccacttcgggcatatgacgattgagccaaagcatgttctatgtttcgataatcatcaaaagcagagcatagtatgctctacggggatttttctataccctgaaaacaccgaaaatcaggatatagggcagtagcacgaattagccaacagcggcttgtctgcgggcaataatgacgttgctcccacggattcggataaggagaatcgtagcgaggatcatggtgaggaccagggcgagtaatcgatcgtatcggagacttgcccaacacgcacgctaagatgggcatcgcaataatcggcaatgagcaggtaatcggcgaggcggtgcatggagcaggaatccaacgagcaagaacctaacgaggcgacggaaatcgtaggcggcaaagtagagaccgtcgaggtttccaagcaccccgaggcttccatacccgagaccgatttgtctctggcggatatcgagcgccgtcgttcgcatccgttgcgttgggcgctgattattcttgccgtactgtgcgccatcatcgcgccgtactggttcggccgttcgttggcggtaaataatactgactccattgtgaccgtgctcgggggagtgtctccgcaaggcatcgcgctggtcggttgggtgaccgtggtgattgcgtacgtcggattggcgatggcggtggtcgtctcgccgtcctggccgtggttgatcgtgttcgtgatcgggttggccggcgagcagttcatcgcgggactcagtatgctcaatctcaatttctggtattccacgtacgtggtctacggtaagcaggccggcctggcgaatgccgcgaatctgggcattatgggtgcggcgatcggcatcgccgtatatgccctgatgttcgtgggtctgctggtgattatccggaagacctcaccactgaacgtactgaccaaaagctgggcgagcttcattctgtacttcgtgattgaaaccatcgccctgctcgtggtgttgtttggcggattgctcaccactgtgtgagcgcgtgtgccccagtccggcccctgccgtatagttttcatttggcgtaatttcgcccgcggatagagagcgtttcgagcgaacctgcacgaaacaccgcgcaacgacacaataaggaggacgccgtggcactgacggctgacgagaagacccagattatcaacgagtacgcgacgcacgaaggtgacaccggttcccccgaggtccaggtggctctgctgtccaagcgtatcgccgacctgaccgagcatctcaaggagcacaagcacgaccaccactcccgtcgtggtatgcagctgatgatcggtgaccgtcgtcgcctgcttgactacctcaagcgcgttgacatcaaccgttaccgctccctcatcgagcgtctgggtctgcgtcgataattgaagacttccgcccgagtacctaggatggtactcgggcgttttacatatcgccagccaacggcaacaacggcaagagggttagaggataggccagcaggtaaggccgacaagagaacccgaatgaaggggttgacacgaggaacgacggccacggggccagtcgaaacaaggtatgtgacgtccgctgaagaggacagttgcggttcaagcgagtcgccaaaccgcaacacagtatgtaggaataattagaaaattaaagaaggaggaaccctatggagggtcccgaaatcaaggccgttgaggccgtaatcgacaatggatcgtttggcaagcgcacgctgcgcttcgagaccggccgcctcgcccagcaggccgatggcgctgtggccgcctacctcgacgacgattccatgattctgtccaccaccaccgccggttccagcccgaaggagaactacgacttcttcccgctgaccgtcgatgttgaagagaagatgtacgccgccggcaagattccaggctcgttcttccgccgtgaaggccgtccgagctccgaggccatcctcgcctgccgcatcatcgaccgcccgctgcgcccgctgttcccgcacaccctgcgcaacgaagtgcaggtcgtcgagaccgtgctcgccgtgaaccctgatgacgcttacgatgtcatcgccctgaacgccgcttccgcctccaccatgatctccggcctgccgttcgaaggcccggtctccggtgtgcgtctggcgctgatcgacggccagtgggtcgccttcccgcgttggag

SEQ ID NO: 750 - DNA, 17249 bp, Unknown
  R14_18m  MAG No. k141_213
gccgatgtgacggcgatgggtgagttctggcgcgagcacggcacgttgaccgaacaagtgtatccgggcatggcccattcgatcaatatgccggaaatgcgcgatattcaacggttcttggaggccaacggattcattcggtcgcagatttggtagtcaccacctcacatgacgtagtctacgtgggcgaattcggggactttgtaccatttgacggggtagccggcaccgtgggcgcagaagaccgagtcgggggtgttgtccagatcagcttcgggatcgtaggcggcggctgcgatgacctgttcggcgtcatgccatggcttgtagccgccgaaggtggcggagaaacggccatggccgtgcgtgtactggttcacgtccatcgcatagtcgcgcatttcggacaccggcgcctcgccttcgatcacggcgtattcgtcatcggtgaccggggattcgaagctgccggccatgcgctggatgtcgctcatggcacggccgatcatgtctgcgggcacttcgagccggaaccggtaccacggttccagcagtcggcagttgccctcccctgtggtgtccggccggctctcgaccggcgtctcgggccggccactgactcctgccctggcttccatcagcccttggcgaatcgcccggtacgtggcttgacggaagtcgccgccttcggtgtgcttcagatgcgcgcggccggccaccaaagtcatcttgatatcggtgagcggtgcgccaacgagcacaccgagatgctcacgctcggtcaggtgggtcagaatcagccgttgccaattgcggtccaaatcattttcggacagggccgaggccacagcgactccgctgcccggctcccctggttccagcaggatatgtgcttcggcataatgacggagcggctcgaaatgacctgcgccttcgatcggcgcagtgatggtctcacggtacaggatggagccggggccaaaggacacatccagaccgaaccggtcgtgcagggtctgctggatgatttccagctggaccgcgcccatcaattgcacatgaatctcggccatccgttccacccacaccacatgcaacaacgggtcttcgtcttccagctcacgcaatgcggtgatgaccttatgcaaggtcagatcatcgaactggggacgggccggcaagctattgtccgccgcggtctggccggcggtgtcgttctcctcattgcggccggttcccgacttggcggcatcatgctcggcatcgtcctgattcgcgctgtcatggccggctcccccacgtttggccgctcccgaggtgccggccgtatcggattccgctccggcgggcaacaccgtgtaggtcaacacgggttgcagcgacggcgattcggcgtccggttccgttcccagcccttcgccggggaaggtccgcgtcagtccggtcaccgcgcataccgagccggccggcacttcggtgaccgtctcgaatttggcgccattgtagatgcgcacctgatcgactttctcggaccacgccatgtcatcatcctcctgcgctggcgacggtgtcgacgccgcggcgcacgaggatgaggagacgatctccttggctttgagcgcaccgccggtgacgcgcagccacgtcatacggttgtgctgaccgtcgtgggcgattttgaacacgcgtgcggcgaaggcggccggccattcacgttcgcgggtgaacgtctccagcccgtccaggaattccttgaccccttcgagtttcaatgccgagccgaaatatacggggaacagctcgcgtacggcgatcatcgatcgcaatctgcccacggacagcgcgccatgttccaaatagtcgttcatcgcctcctcgtccagggtggcgatgtcttcggcgaacgcgtccaacggtagcgcgctgccctcagtggactgttccattgccggcaacggatatatcgcatcgctcagacgcctgcgcaactgagccaacacggcctcgcgggcaaatccggcggcgtcgcacttgttgacgaagatgaacgtcggcacaccgtatctggccagcagacgccatagtgtctcggtatggccttgcacgccatccgtgccggagaccacaagaatcgcgtagtcaagcacacgcagcacacgttcggtttcggctgcgaagtccacgtgccccggcgtatccagcaaggtcaggcgcaggtcgccgtgttctaccaatgcctggtgcgcgaaaatcgtgatgcctcgcgccttctccaaggaattggtgtccagaaacgcatcgccgtgatccactcgccccaatttgcggatctcaccggtacggtagagcagcgcctcggacagcgtggtcttgcccgcgtccacatgcgccacgatgcctgccactatctgtttcatcagctgtgctcccttcccgatgcgccgcatgttgccggccgcctaaccaatatatccgagaaaatccgggagggaaaaattttaccgtcagaccgggctgccggtacaataagtcaccgaacaccgactgatatgaggagcctccgtgaccacttccggcattaccgttttcggccaaccatcccagcccaatcatggtgccggcgggcgaatcgccatggacgatgccctctttcccaccgattatgtggcgctggatctggagaccaccggcttttacccgaacagttgcgccatcacggaaatcggtgccgtgcgcgtgcgggaggggcatatcgtcgatcaattccagcagctggtgaatcccttgcggccgattccgcgtcagatcaccacgctgaccggcatcaccgatgcgatggtggccgacctcgatccgattgacgaggtgcttccccgattcatcgcatggctcgctaccccggctgccggtcccaccgttgagccgattgtcggtcataacgtcagcttcgatctgcgattcctggattacaacacccggcatatcgccggctgcggctttgcctgcgcggattatgacacgatgcagatcagccgcgccctgttccccgcgcagcggcatcaccgtctggctgacctgatcgtgcgcttcggcatcgcggacaatgaggaacaccgcgcattaagcgatgccatccagacccagcagtgcttcgaatggatgcggcattatgtcaccgagcatcacgaatccgaagcaatccgttggaagcaggcgccggccagaaacagcaccgaaattctccaccagcagctagtggtaaagcggtagttacagcccgtattattcgcacatagaggaaaactattagtcgctgggctagagaccttatagtggacggattcctctcgcatatcggagaaatgcgggataccacacggttagcggccaatttggggccggcgtcccgcaaccgtgcgggacgccacgcacgtcaaacgatgcacacggctggcatcccacaccccattccacagaaccattggaattctgccaatcccacaaaccggtgacgacaccgtacatcaggttctgtgggacgccagaggaaaaacacccgaaatccgctggcatcccacaccatgtcacaccgcacctgcagcatcgcaccacaccacatcacgccgacacctattcgtgccccccatttgcataattcgacgtttttggaagatggcgcacacatgcatgtgcccccatttgcatatcaaacggttgacgcacaaatggggacacacaaccacaactcagaatcctcgaaattccgccaatcctgagatttcatcccccaacacggcaatcgccgcctctgccaccattttcgcatcaaacgattgacgcaacaatggtggcgcatgcccctttgtatcggtatgaatcagtccctgccgtcaggctctccccctattgtgagggccgactggcagggactgaacacgcataatcacatgagcacgccatgccaagcatggacatctcagtacgaacagaacctattcgcacacgttacagcccgtattctttggcgatgacggaccagaggtcggcggcggcctgatcgacggtttcgttgacgatggtgacgtcgaattcgctttcggcggcgagctccactttggcggtttccaagcgtcgggcctgctgttcggcggtttcggtgccgcggccgatcagacggcgcttgagctcttcgaagctcggcggcgcgatgaacacgtacaccacttccaagtcgagttcggcggcgcgctgcttgacgcggcgagcaccctgcaaatcgatttccagaatcgttggcatgccggcagccagatgctcctcaacaggcttgagcaatgtaccgtagtgggccatgccgtgcaccacggcggtttccaggaactcccccgccgcttcgcgggtcaggaactcgtcttcggtgaggaaccagtagttgacgccatcaacctcgccggggcgcggagcgcgcgtggtggcggagacggacacccacacttcggggtggtcggcgcgcagcttggcttccacggtgcccttacctactgcggtagggccagtcaggacgattagacggccggcatgggtgttttcagtcatgggttcctccggagatgatgtggtgtgcagcgattatgaatccaatgtggtaacggctcaccggcgagatgaccggtaactgttacagccccgacgaacagggaagaatatgaatcgtgatgcgacgtatgcaatgagatagatacgtacgcatgccgcgacatctgattccgttctgattactggttttctgcgccttcggcagtggcttccatcagcgactgacgtacgtcaagcgcaatcgactcggtagcttggctcagtgcggcgatatccggcccatgcgaggcgataaagcgggacacggtaaccagcacgttgccgcgcgtaccgcggaacacggttttcagatccttggcctcggcaccctgccaaccgtaaccgggggaaagaatcggaccggtgaacttggaggggtccacgccggaatcctgcatccattggccgatggtggcaccgatgatcagacccaccgagcccatgccttcgatatccacgttatgcttctgcgcggtggaggcgatgccgtaggccacggtacgtcccttgtaatcgccgctctggcgcaacgcggtctgcagactcatgccttccggattggaagtcagggaggcgatgaacacgccgcgtccgttttccaacgcttcggtaatcaagccgttcaacgagcgcgcgccatagtacggcagcagcgtgatggcgtcggccagcaacggtgcaccgggcttgaaataggcgtctgcgatggcggaaatcgtggtggacaggccgccgtgcaggcagtccacgatggtgatgacgcccatttgtcgtgccgcgtagagcacgcgctcgagcgcttcgaaacctttggctccgtaacgctcgaacatcgacgtctggaatttgactgctgcggcgcgcccgttggcggcctgcagcatacgcatggagaagagttcggcgccttcggcgtcgacgttgtatccccagtcggtgaggagcttgcgatgtgggtcaatgcccacacacagcggtccgtatttggccattgaattgctcagtcgcagaccgaaatccgaacgttgtgcctgcaattcctcactgctgggtgtagtcatcagaactcccgtcgctccaattcgaacagctgcttcgaatgctcctgaatgctcatgatctgataatcattatgcttcacggcctcgatagccagcagtgcggcttggaactcggtgatggtggtaaactgcggcagatcggctgcaatagcggcagcacggatggagtagccgtcggaacgggagccgcgcgagttcggcgtgttgaggatcatgtcgatcttgccttcctcaatgagctgaaccacgttcttgcccacggagccggcggcgtgatgcacctcgaccggggcttccggatcggtgtccacgcgggtgctgatcttgtccacgatgttcgactcgatgccgtaacggcgaagcacggaggcggtgccctcggtggcccagagcttgaatccaagctcttcgaggcgcacggcgagcagcggcagctgacgcttgtcggtgtcgttcacggaaatgaacacgttgccgtgggtcggcaggccaccatcgtaggcggcgagctggctcttggcgaaggcgtgcgggaagtcgcggtcgaagcccatgacctcgccggtggagcgcatctcaggtccgagcaggatgtcgacggtcttgcccaccggggtgcggaagcgcttgaacggcagcacggattccttgaccgcgacctgctggccggggtggatgtcgccgccgtcgcccttgggcagcagcagaccgttggcgcgctggtcggcgatggtctcgccggccatgatgcgggcggcggccttggccagcgccacgccggtggccttggaggcgaacggcacggtacgggaggcacgcgggttggcttcgatcacgtacagcgtgttggccatgaaggcgtactgcacgttgatcaggccctgcacgtggcagcccttggcgatggcgtaggtgccttcgcgcaggcggcggatctggtcgtcggacagggtggacgggggcagggtgcaggcggcgtcaccggagtggacgccggcctcctcgacgtgctccataatgccgccgatgtacagttcctcgccgtcgaacagggcgtcgacgtcgatttcgatggcgtcctgcaggaacttgtcgatgagcagcggggagggcaggcggccggagaccacggtatcggccttggcctcggcaagcgcgcggtccacgtacttggtgagctgcttgtcgtcgtagacgatttccatgccgcggccgccaagcacgtagctcgggcgcacgagcaccgggtatccgatgcggtgggcagcgtccatggcctcttcgaggctcagagcggtgccgtaacgcggggcgttcatctccgccttcttgagcacctcgccgaacagctcgcggttctcggccagatcgatggattccggggtggtgccgagaatcggcacgccggcggccttcagacgcgcggccaaggacagcggggtctggccgccgagctggacgatgacgcccttgaccgggcccatcctcttctcggcctcgtagatttcgagcacatcctcgaaggtgagcggctcgaagtagaggcggtcggacatgtcgtaatcggtggagacggtctccgggttgcagttgaccatgatggtgtcatagtccttgccgagctcctgcacggcgtgcacgcacgtgtagtcgaactcgatgccttggccgatgcgattcgggccggagccgaggatgatcacggcctcgcgctcgcgcgggcgcagctcggtttcgtcggcgtagcagctgtagtagtacggcgtggcggcgtcgaactcggcggcgcaggtgtcgacggtcttgtagaccgggcgcaggccgtaggtccagcgcagctcgcggatggtgttctcgccttcatcgcccaagccacgcaggtgggccacctgcacgtcggacagaccggcgagcttggccttcttgagcagcttcggggtgagggtttcggcctcgcgcaccgtcatggcggtctcgttgatgaggaagatctgcttcaggaaccacgggtcgatcttggtggccgcgaacacctgctccagcgtggcgccaccccagatggcgcgcatgagctgcaggtaacggtgttcggtcggggtgtggatggcctcaagcagttcggccacttcctcggcggacggcttctcgccatcccagttgaagcccatgtggcgcttgtcgatggaacgcatggccttgccgagggactcctggaagttgccggccagggccatggcttcgcccacggacttcatggaggtggtcagggtggggtcggcgcccgggaacttctcgaaggcgaagcgcggcaccttggtgaccacatagtcgatggtcggctcgaatgaggccggcgtggactgggtgatgtcgttgcgaatctcgtcgagcgtatagccgagggccagcttggtggcgatcttggcgatcgggaagccggtggccttggaggccagcgcggaggaacgggagacgcgcgggttcatctcgatgacgatgatgcggccggtcttcggatgaacggcgaactggatgttgcagccgccggtgtccacgcccacgccgcggatgatggcgatgccgatgtcacgcagcttctggtattcgcggtcggtcagggtgaagcagggggccacggtgatggagtcaccggtgtgcacgccgaccgggtcgacgttctcgatcgggcagacgaccacgacgttgtcgttgcggtcgcgcatgagctcgagctcgaattccttccagccctcgatgccctcttcgatcaggacttcgtcggtgggcgagtaatggatgccggcgccggcgatgcggtgcagctcctcctcgttgtgggcgatgccggagcccaggccgcccatggtgaagctcgggcgcacgaccagcgggtagccgaacttctcggcgatcttgtcgacttcctcgatgctgtgggcgatgtcggagcgggcggattcggcgccggcctcgtcaacgaccttcttgaacagttcacggtcctcgccacggtcgatggcttccagggaggcaccgatcagttcgacgttgtacttcttcaggacgccggcctcgcccagcgccatggcggcgttgagtgcggtctggccgcccagggtgggcaggagcgcgtcggggcgttccttggcgatgatctgctcgaggatcggagtggcgatcggctcgatgtaggtggcgtcggccatctccgggtcggtcatgatggtggcagggttggagttgacgaggatgacgcggatgccttcctcacgaaggacgcggcatgcctgggtgcccgagtaatcgaactccgcagcctgaccgatcacgatcgggccggagccgatgaccatcacggatttgatgtcggtgcgcttcggcatatcacttaccttccttggagttgttcttcataagttcgcagaaacggtcgaacaggtaggccgcatcatgcgggcctgctgcggcctccgggtggtactgcacggagaatgcggggatgtccacgcactgcaggccttcgaccacgtcgtcgttcagatcgatgtgggagacgaacaccttgccgtacttgccgttttcaaacggcgcgtcgacctgcttgccgatcggggcatcgaccgcgaagccgtggttgtgggcggtgacctcgaccttgccggtggtcagatccttgaccggctggttgatgccgcggtggccgaacttgagcttgtaggtgccgaagccgagcgcgcggccgagcagctggttgccgaagcagatgccgaagaacgggtagccggcgtcgagcacctggcgcagcagctcgatttcggggccggcctgttccgggtcgcccgggccgttggagaagaagacgccgtccgggttcaggttctcgatttcggcgaaggtgatggtggagggcaccacgtgcacgcggcagccgcgctcggccatgcggtgcggggtcatgcccttgatgccgaggtccacggcggccacggtgtacagcggctccttgccttcgtactcgccgcatggctcgatggtgtaggcctgcttggtggacacttcgtcgtacaggctcaggccctgcatctgcggtgtgttcttgacgtcttcgagcagctgctcgatggtcttgagcgcgccggtggcctggtcggtcagggcgtcgccggagaagatgccggcgcgcatcacgcctgcggaacgcaggtgacgcaccagcttgcgggtgtcgatgtggctcaggccgacgatgccgttcttggcgaggtcgtcatcaaggctgccttcggcacgccagttgctcacgttcggagagggatcacgcacaatgtatccggcaacccagatgcgggaggactcagggtcttcgctgttgacgccggtatcgccgatgtgcgggaacgtctgcacaacgatctggcgatcgtagctcggatcggtgagcgtctcctggtatccggtcataccggtggcgaagacgatctcaccggtcgtctcgccgagggcgccgtatggcgcccccacatatacctgtccatcttccaaaacgaggactgcatcgtccttgtcatacatcggaattgcgatggtcccggactcgttctggctcaccaaaacccccttatgtttttcgggtattcgtaccaaggttaacggccagcgcagactcacacgccgttgggcgcaaagtctcaccccgctggcggggctgtcggcaaggtgccgacttgagaatgtgtggcgacacaagtgtccgcccatgaaaaagcctcccgaatggggaggctgaacaacaaatgactaatcgaccgtcggctgaatctcagcggacggggcagcgggctcgtcggatgcaccggacgaatcgggcgaatcggaaacatcgccctcatcggtcggctcggatgcggcggcatcggaatcggacgattcctcatcggcctcttctgccgcggactccggtgccggtgctgcgttcttggcggtgcacactgcagacagcaggccatggatgaaagcgggcgaatcgtcatcgcacagggtcttggccaatgccagagcctcgtcgatggcgaccttgtccggcacatcatcgttgaacagaatctcccaagcggcgatacgcagaatgttgcgatcgaccacgcccatacggcggaccttccaacccgtggagtgttcgtccagggtcatgtcgatctgacgacggtgctcggccacgcccttgacgatttcaatggcatagtcgggaagcggggtctgggcaccgggatgtgcgatgcgctcgtcaagcagggcgagaatatcctgacttttttcgtcggcttcgtacagggtgttcagagcccttttgcgcgcggtggaacgtgccatactgctgctgtcctagtcctttatacggtcggtcgtctgttgaggatgcggagatcagttgttctcgcggccggtgtaggaaccatcctcggtgttgatcttgacgcggtcgccctcattgatgaacagcgggacctgaatctcggctccggtctcaacggtggccggcttggtgccggcgttggagcggttgccctgcaggcctggctcggtgtgggtgatggtcaggaccacggagcccggcagatcgacgctcagcggggtgccgtcgtggaaggagaccaagcagtcagtgccttcgagcatgaacttggccttgtcgcccacgagggtcttcggaaccatgatctggtcgtaggtggtcatgtccatgaacacgaagttgtcgccgtcctcgtaggagtactggagggtgcggttgtcgacggtctcgaattccatcttcatgcctgcgttgaaggtcttgtcgacgatcttgccggagagcacgttcttgatggtggtgcgtacgaaggcggggcccttgcccggcttgacgtgctggaacttcatgacggtccacagctgtccgtccaggttcaggacggatccgttcttgatgtcgttagtagtctgtgccacgttattcacctatttcaaattcaaactagcttaggcaaagcccaaaaattgccttggctattatgccacaccgggtatacaggaagtgaacgctggggtttcccacgtggcccccgactagactggatgaatatgcgatccttcttcgaagccatatccgtgtcctgcgtcatccccgcgcgatcgccggcggatgacgaacgcacggtgttcgacaacctgtccttcagcatggaacgcggcgacatcatcgacctggtgggcccgtccggctccggcaaatcgagtctgctgaccgcatgcgcccgactcaacccacacgcacacggcacgttcgtcctcgacggcgtgggcagtgacgaattcagcgcacagcagtggcggcgggacgtctcctacctgccgcaaaaaccgatcctgaccggcaaggacgtggccgaggcgatccgcctgccctggacgctcgcgattcgcggcaaggggggcagggccgcacggttgctgcccgacgaacgtatccgcacgaccctggacgcgatgggatgcgaggacatcgacctggcgcgcgcgccccatgacctgtcgggcggtcaggcggcgcgcgtggcgttggcccgcacgctgctcaccgacccgaaggtgctgctggccgatgaggtggacgccggactcgacgacgacaacgcgtccaaagtggccgcgatcatggcggacgcggccgcacacggcatggcgatcatccgcatccgacaccgtccgccggacggacgcgccacccgcacgctgatgctcgatgcgggacggctcaccgatctgacgcgggataaggaggtgcgcccatgaacggcgcctacgacatcgacacctggggtcttgttctggcgttgggcatggtggccgtggcggccatcgtcagcgaactcatgcacatgggcatcggcaggaccctgatgtggtcggcatgccgcgccctcgtgcagctgtgcgccatgggattcatcatcagctacgtgattcgttcgaacagcgtgtggatggtgttcgccctgatggcggtcatgctggtcgcggcggtgcagatcgtgatatcccgcgcgcgcggcatccccaaaggtcttgccgggccgatcttcctgagcctggtcatcacgatgctgctcatgctggcgttggtcaccgagctcatcgtgcgcccgcacccgtggtatgcgccccagctggtggtgccgctgaccggcatgctgctgggcaacaccgtttccgcgcttgctgtcgggctgagccgattctatgaaagcatggaggaacgccgcgacgaggtggatatgatgctggccttgggggcgacggcatgggagtccgcccgcccatccatcatctcgtcgattcggctgggactgctgcccaccaccgcttcgctggcctccagcggcatcgtgaccatcccgggcatgatggcgggccaggtgatagccggcggagatccgctgaacgccgccaaataccagttcgtggtcttcggtgccatcgccgcgctgaccttgctggccgacggtctgatcatggccatggtctatcgcacctgcttcactaccgacgaccaatatcagacgcctaaagcacgatagcctcagtatcgatctcaggccaagcctcaggcgatggtgaccggcgtgccttccggaatttggttgtagaaccattcggcatcggccacagtgagtcgcacgcaaccatgtgaggccggctgaccgagcttgttgccttcctcttccatatactcgccggagttcgccccggtcggcaccgagtggaagaggaacgggccgttgaatcgcacccaataatcagcacccatgccttctgcgggattgtagaagtgatcgcctctcatcccgataacatagttgccgcgcggggtcgtatcgttgagcccggtgctggcgatcatcgtgtagatggtctcaccgccggattgcacatacacttcctgcttggcgatactgactttcacgctgagatcggagtattgcgacaaatcaggctgcttgccggtgggattcgtccatcgcgcacgttgcgcttccttgtcacgctgctcctgaatcgcctggttaaagaccggtacctgctggcggctcaaggatgaggccgatgcagacactcgcgatgccgactgttgcgcggattgactcaccttctgcgcctgcccctgaacctctgcctgcccctgtgcgaccgactcaccgcggggccacacccgttgggcgtcaatcgtcgagaagacggcaagaacgcagcacaacaatgcgcataccgcaaccacaatgcgccgtacaacgtaaattcgttgacgacgaatcctcatccgtgctcgacgccgctcagtcatgtcttccttctcgttgcaaagacttttgccgtaagtattgtagccgcttttacgatacgtcgcgtaccaatatcacgcgcgctattccgctgtcactattcctattccgttgccgtccacttacgtctcagcaacatccacaggccgatgatcacggccaccacgccgagcccgatgccgaacagtcccgaggattgcgccgcgtgcgcggttccctgggattccaacagcacgtcctgcgtgaccaccagcgacagcatcgcatcgagaaggtcacgaatttgaccgacgagtcgatggggttgtgcgtcttatgcgaaatcaccataccgcgaatcgcaatcaagaagaacccgcaacttacgcagcagacggtcaatcgccttaaggaggcgttctggaagctgtatgaaaccaagccgatcgagaagatctcggtgcgtcagatcaccgaactcgcaggctacaatcacgccacgttctacctgtatttctcgtccgtgcgcgacgtgcgtgaccagatcgaagacgacctcatcgcccagcgagacctcatattgaagcagtgcatgcatgacggcacactccccagcatcgcaccgcatatgcaaatgccatcgcaatcggaagcagcgcagcagccagcggcatcaccgcaagcccagtagcgaggtcaacccacagctggcggcgcgggaaacaggtcgcgccgcccagtacacgaatccggcgagcttctaccgagtcgcgaggaagaagaaacgcgggaaggggaagatgatgctgccgtccgactgtgtggggtattcctcgcggacttgggagaacacttcggcctcgaacttcttgcggccggcgtcgtcaagcgcctgcagatacggacgcatgccggtgccgcgataccagtccataatcgcctcatgcgagggcagcgtgtgctcccgtttgaatcgcagatactgttccgaatcccgggtaaccatgctccccacgctaatcagccgttcacatatcggccgatattatctcacaattcagccaagcagggcgtcgcggcgggcgatgagcccgtcaatcgcggcctcgccttcgatgacggtgaaggtcagggacttacgttcgctggtctgcggggcgatggtgtgcaggtcgccgcgctgctcgtgccagccgcggccgtggacgctggagttcgagggttcgaggccgaccacgtagtcgcccgcacccatcgacttccattccatgaagtatgggaagaggctggcgtcgaagtcgatgacgactccaagtccgagcttgcggttgaccacggcggcgaagctgcggccgttctcgtcggcggcgagctcgtgcaggtacacgctttcggggcggttcgcctcgggtgcttggatttcgttccacggcgtggtgtcggctgcggtggtctcgtcacgcggggtggccttgcggctggggatcacgacttcggcgccttcggcgagcaacggccagccgaagttgcagtggtacatccacatcagcggctcgtcgcggaaggattcgttggtcacctcatcctcgaccgtgatcgacggctggccgtacacgctggtgatcttgcggcgcatcaccagattctcgccgaacagttcggcctcgcgcatttcgccggagacctcgagcacgtagtcgccttcggcggtccagtgggcgtcggagcccacatgctcggccggcgtggtgcggatgcggccgtgcatcgggaagctgccggccgggtacttgccgccctcaggcgtgacgtacggcgcgcagatgttctcgaagccgcaggtgaagaacaggccgcccatgatggagcgctgcgcctccagcccgttggtgtcgaactggttgcggccgttcaggcccggcttggacaggaaggtgaggttctcgccgcggtattcgaactggcagacgtcgagggcgcggtcggccatggatacgaagcgtagcgggccgttcttcacctcgatggccttgaggccgtgggcacggccctcctggtactcgatcgggcgcacgtaggcggcctgctgaaggctgcccatgcgggccaacatgtcggctcgcgtattgtgttctgtggatgtcatcgtcgtcaccgctccttgcaatcatcggcttgttgtccgtgtgcacatcatactgtaagcgttttccgcaattgtcgctatcaacaacgtatacgcatgtcgaaaagttggaccgaagaacaacgcaagcacaacgaaggctccccgaagggagccttccatcgtagcacacgttacgcgagaattcgtcgctcgcgctttacgcttccgcggcatcgtccttcagcgcacgcagcagggccttgttgcgggtttcgatgatgcgcttgccgtcctcgccctgccaagagaagaagccctgaccggtcttggcaccgaggttgccttccttgaccttttcggcgagcagcgggctcgggccggtgccgttgtccatgtcgtcgaacaggtaggtgctgatgttgtagaacacgtcgagtccgccgaggtcgatgctggcgatcgggccgaccaggttccagcggcggccgaggctgtacttcatcacgtcgtccacggtggccgcgtccgctatgccctgctggacgatgtagaacgcctcgcgcaacacggccagctgcaggcggttgcccacaaagcccagcgattccttcttgatctttgccggcttcttgccgatcttggccatgaggtcgaaggtgatgtccaccaccttcggatcggtcttttcacccggcaccacttcgaccagcggcatcaactgcgcggggttccagaagtgcgccaccacgaagcgctcggggtgccccatcaccgactgcagcgcggtggggctcaggccggaggtgttcgtggacagaatcgcgtccttgggggcggcgtgctccacttcggcccagacggacttcttgatgtcaaggttctcggccacggattcgatgacgaagtccacgtccgccacgccgctcgcatagtcggcgtaaccggtgatgcgggccagcaccgtgtccacggtgtcgccggccttgagcagtccggcttcggcgaagtcctcggcatcagaacggatcgccttcatcgccttctccagcgaggcctcgctgcggc

SEQ ID NO: 751 - DNA, 3564 bp, Unknown
  R14_18m  MAG No. k141_243
cagctgcttaccgtcgacggtcacgcgcagactgtcctgcagcagttgcttcgtgtaccagacgccgctgccggtgtcctgcatgacccatcccgccggcagttggcccttgccgtcattgcgcaccgagacattccacgacgcaaggccgcaatggccttccgccacgcccatggtctggcactgctccgccgagggggtctgctgcccgcccgccgttttggtgagtgagatccttggccgcagcggattccaagcgactgcgttgttggtgaaatagtcgcctccgttattggaacggacgaaccgcgaaatgtttttcgaagcgggatacagcacgtcattggcgaacgtcgaatcgtattgcaacgtcaacgtctgccctgcgggaatcgaatacgaatccggctggaaaacccatttccaataggttcccgtggccaatcctccggccggccatgtgacggcgggtccgcccttgtagctcggcagcgtgaccgtatataccgtcaacgtgccgtgccccatcgttgtggtcaacgtttggtacagatcgttgatgttctcagccgtgtaccatcctcggcttgacgaggtggaaccgttctgttccgcaacgttctcatacgccatccaatcctcgatcttcacgattggctggtcgatggttcccgtgttgacgtattgcgcctgccatctggtactgagcgttccgtccggttgcagcgtcggcgtgccgacgacctgcttggaggtgctgccgcttctgcggtacatggtgatggtggtggtatggccgttgccgaaatccaatacggtctgccctggattattgccggtcaccttgttgcgatcggcttcgatgtacaatcggccattgtccagtggggcggcggcgttcttgctgatggcgtgctcactgaagacgatggtcaccaatccgtctggagcgatcgtgtacgtgccgagatcgtcgttgagcgtgcccgacatggcggtaccggtgccgttgaatcccgcgatgtggtatcggaacacgtggttgtcttcggtgatgcttcctttgggtatgacgaattgcgcgtcaaaacggaattgcgctatcttcgtgctgtaatcgaacgagacattgccgtgttcatccacgggaacgttctgccattgcgtcgaattctgcaatcgatactgcaccgcggcattgctgatgcagccgaccaatcggccggaaggcttgctggaatcaacgatggcgccctgttcgtcctgattccaaggacgtccgcacgccggcgtctgttgcgcggcatcgacacccccccccgtcgacggcggcggccgtggcgaccggtacgatcatgccgacgaccagcgcgaccgccgtcgccaaccgcgttaaacgtgtgaccataccagaactccgcacatactgacggttcatcgcttcgcgcgaaccatcgtgagatagtgaccgcaagggatgcgcttgtttgaatgcgtgccgaagcacacgtccctaaacgtgaaaacgtaaccctttattcaacaaatgttatcatttgtatcatatgtcggcatatctttgtgccgggatatggaaccggtatacggccgcgcctccggccgcgcgcgtatacgaatacttcgcgccgctttccgcctctatcaggaacagttacctgaataaaccggacagttggctccatagcgacggcttgcgcagcaaatcatcaccctcgccctcgccaggcgcggtttggttcaccgcataggtgtaggcgcgtttggaactgggcttgcccaccagttcgccaaactccagcaattgcgtacgcggctcgtaagggtgacggatatcaaattcgatcaatcgcgtggcacgtttggccggagccggtccgtacgtattgaatccgcaggttggcgtagcgataagcaacagaccctcatgttcgccgacgaaaccgttgcgatgatcatgaccagctacgacgccgaaatacccctcgcgcagcgcctcaaactcgtccgactcatccgggcaggaaatgccttcccccagatacccgccggcttgagtgcgatcctcgtccagcacataataggtatccgcatgcttgcggtagccctgcatggcgaaagccgcattggcggccaccggtttgagtacctggtaatactccggcagcggcatgtgctggaacaccattgatttggctccgatatgttcgggcaaagccttgaggaaggccaatgtctcgggcgaaggcgtgccgaaaccgcctccatgcgcatagtcaccggaattcaccagtaccagtcccagtacgttgcgcgtgcaatccacatccatcaccggcaatgcaaaagtgccgggaatggtggacgcggaaatcggcgcatcggtttcttcaccattggttgccgcaggcgagccgtccttatgacacatatatacggtctgcttggccagcgcatcgctcggcggattgatgcaaccgggaaactcgcggtagattccgtcgagttcggcattgctcaaaccgcactggaaatcgtggttgccgtaggtcaccgcccacggtatgccccgtgacgccaaaggagaggtaaattgaccgatggccttgcgcaccaattcacgcgtatggttcaacgcagattcaggaatcgcctcttcgcaccaacggcgtttgcggaagctcttggcaaaggccggatcgtagccggcgatctggttgccggagaaaatcaccagatcaggccgtgtggcatcaaggctggcctcaatcagggcgatggtgtctttggagactttcggcccatcctgaatgtcggcaatctgcagcacgcggaacttgccggaatagtggaattgcagtcgtccgagacgcgcagagatagagaccgggcggccgtcttcggcatcggccggcttgatacggggtttcgacgacatcccctctggcgtacgctgtgtttccgtcatgccctccactgtacacacaaacgaaaaggcccgccggagcgggccttttctacaagttcaactactggagcagaatctctgcacaacatcatcgtcgtaacggtaagtctttccaatgcccgtccaacgtaacagtcctcgtgaccatacactatttgtgggctctgctctgttcagttgttcttgtatctcataatctattcatcactcccgtttctcgcaacctgcagagagtcgttgtgcgttttttatcacaactgttcaatcgcactttctgactatcggaaaacgagctgaaccgttcacatcgaacccgtctgatgttcggtttcgttcgtttcaccgccgctcacggcgtgtcgcgagcacgctagcacactcaaaaccaaccaacaccgaactaacatgaacacccgttgaattctggcgcgttcagtcgttttccggccacgccagagcttacgatataagctatggcacagatatttgacgcaccctcgaaggcaattctgcgcagccaaatcgcagagcatattgccgaaaacgacaacaacgaccgccgcgtcgatcaggaaggc

SEQ ID NO: 752 - DNA, 13797 bp, Unknown
  R14_18m  MAG No. k141_313
gcatagcacatcacggctgccacaccgaggatttcccgtcgggggctagatatatgcttccggagcatatactttccggaaacctacaggtcaatccgtgaaaatccgcgattccggacacactttttgacccttaaccctgttcggcgatgccgatcccagccagctgaagtctctcgccaccctgagcaacgccaaggtattcgacggccgctccggcgacctcgccgccgtcttccgccaagtcaagggcttcaactgatgctccaggtaatctgtggattcgttgtcggactgctgctcgccgggctcggtttcggactggtcggcggcggagtgcccggcctgatcgtggccgtggtactggccgcacttgggtatatcgccgcctccacgctcaccgagccggagcgacgcatcggcaaaatgctggtttccgccttgcccaacggtcagaagaccgccgatacgatcgacgcggcgaacgctcaactcaactcgatcgccatgctcaccaagcaagtacgtgacccagccgtcaaagccgaagccaacgacttcatcgccgctaccaaagattgagtgcaatacgtgacccgagacacctccgcctacccgacgttgcgccactacatcaccgtgtacggcgagcagaccgagaaactgttgcgctcctacgtggacgtggaaagttccggcgcacgcgatcagatagccacggtacgaatcgaaaccatcgaggcgctgcaagtgctcgaacagaccgccgccggcgaactcagccgggcggtaagcgccaagacgttgggcattacggccgactccgacgccatccaacggttggcccgcatggatggatacgacgacgtcgcaccttcgcctgtgccttcctcggctgctgatgaaggacggcatgcacccagtcagactccatctggcggcccggctcaccagtcggaccagaaaacggacgcacaatgaaactctccaaatcaaaaatcatcggactgatcgccctgcttgcggtagtgggcgtggtctgcggcacgctggtgtggcggcaatcgcaaccagcgccggccgaaccgaccgaacaggtgagcatcaccggctacctgggcggcgagaaaatcggcctgttcgatgacgccaagttcaaggcgcttgccgccaagcaaggcatcgccatcgactatcgcaaggccggatcgctggccatgatggatgcggaccggaaaggcatggattacctgttcccctcctcgcgcgcggccgtcgaatacggcaatgcgaaaggcgtcaaggccacccaaagcgacatcgtcttcaactcaccgattgtgctgtacacgcacaaggccgtggcggacgggctcgtgaacggcggacttatggccaaggacgattcgggcgcgtaccacatggatatggccaaagccgtggacgcgatggtcgccaacacaacctgggccgacgtcggatacacggcaggctacgggcagttccgcatcgactcgaccgatccggtgaagtcgaactcaggcaacgaatacgcggcgctgctcgccacggtgctcaatggcgggcagccggccacggtcgattcggtggcgcgcgacggcaagaccatcgcctccatcttcgccaaatccggttggatggagacctcttccgaggattcgttcaaccagttcctgaccttgggcgtgggctccaagccgatgatggtgggctacgaatcgcagctgcttgatttggccgtgaaccaaccggatgcgttcaagcagatcaaggacgacgtggtcatcgtctacccgacgccgaccgtgtggagcacccacacgctgatggctttggacgagaaaggcggcacactgctgaacctgttgaaaacaccggcggtgcagaagctggcgtgggagcgccacggcttccgcgcggccaacttcgccggcaccgattcgatcagccgattcggcgtgcccggcacgctcgaccagatccccgccgtatccgaactgcccaacaacgacgccatgcaacaactcatcgccaccctccaatccacgcaatagctcttttgccagcccccaatcggtgtttttattaaccccctctgacgagctgagtcgtatagcaaacagcccagtgggctgtttgcagacgaaggcgagcgagagcgagcaaataagaaatcggctgtaggccgtccttaattgcgttcgggctcccggcaaagccgggtggggggagagacccaaacataactatcaaaaaaggaaccagaatgccccaaaacatcaccctcgcagacctcgccaaaagctccgcaacccccatcaccaacccgttactcaacaccaaccaagccgcccccaacaccaccctcgtccccaccgccgccgaagcccaagccgccgcggccctgaccccggaccagcagatcgccaaattgcccgaagccgaccatgccacggtcaaccagatggccggccagatcgacttcactcgcgacggcatcgaatccagctacggcaaggacgcccagcgcgccacctccgccttcgccgacgaaatcctctccgacacccgctccaaagacaccggcgaggcgggcgaactactgaacaccatgctggtcaccattgacgaggctgacctcggcggcttccgcaccattccgatcatcggccaggtggccgtcagcgtggataagctgcgccgccgctatcagaaagtcgacgcgcaaatcgacgaaatcatagtgcgtctcgaatccgcgcaagccaaactcgtggccgacatctccatgtacgacacgatgtacacgcagaacgcccagcaataccgcgagctgaaaatgaccgtactggccggcaagaaggcgctcgccgacttcaacgccaaccagctgccagcgctggaggccgaggccgccgccagtggcgacgccatgcaggcgcaagtgctgaaggacttcaagtccaagctcgaccgttttgccaagcgactcgacgacctcgaccgcatcagcgtggtcaccttgcagaccgcgccgcagatcaaaatcatccagaacgcggaccagaccatcgtggacaagatcgacaccaccatctccaccacgattccggtgtggaagagccagatggtgatcgcgctgggcctgtccaaccagcgcaaggccctcgacctgcagaacaaggccgacgatgtgaccaacaagctgctggcgcgtaacgcggccgccctgcacaagggtgcggtggacgcggaaaaggccaaccagcgttccgtggtggaaatcgacacgctggagaagatcaacgccgaactcatcgccaccctgaaggagaccgtgcagatccagaaggaaggcaaggccaaccgcgaggccgcccaggtcaagatgcgccaaatcgagtccgacctcaaaaacgccttgctcgaaaacgcccagcagatgtgagccgttcgcgcgccagcatgctcccgttggcagaggtatatgagtacgcctactggtgtgcgtatatatgctcccgctggcgggagctggcagccgtaagactggctgagggtggtcacggcgctcggctcggccggctttaccggcaaccattccccgccgcaatttctctgtgggcataatcccggaatgattgccgcgctcgggaattgggtgaagtgaaggttaaaggttgagagcccgggagggttccggaaccggccacgataaccgctgctagccccgcgatacgggttggcggccggcatccaagccgattctctcctaatcaaggagtaccgattatggcaatgtttccggctttgatgaatgacacgatgttctcggatctgttcgatgatccgttctttgagggttggcgcaacacggacaacacgatgagtgccgcaatgcctgccaacatgatgaccaccgatgtgcgcgagaccgacaagggttacgacgtcgacatcgatatgcctggctttaagaaggaagatatcaaccttgagctcaacaacggctatctgaccgtgtccgcctcgcgttgcagcgagcatgaggacaaggctccggccgctgagggcgaggcttccgacagcaagtgcgcttgcgcgtccgattcgggcaagtggctgcgtcgcgaacgctacatgggctcctgctcgcgtagtttctacgttggcgaggacgtgaaggagtccgacatccacgccagctaccggaacggcacgctgtgcatccaggttccgaagatgcaggcccagccgcaagtcgagtccaagcaccaaatcgcgattgagggctgacgatacttgattcgtcccgaagtcccgcttcgagtagctttgccccctctgacgagggagctcccgcgaagcgggtgggggagagataaatcgtaaccaaaccatgcttcccacgccgcctgccctacgctttcaacgccgactaacctgacagacggcgggaaacatagccaatgcaaatgccgagtagggatttaccctacccggcattttgctgtttcaatcaccgaaccccaccctgttcgcgcgccggtcgtgtgccgttctgcagctgtacacatccgatgagtagaatgccttcgaaacgaggcaagagaggcggacatatggcgaacggcgcacagaacgcaagcggcacgccggccccggcggcaagccgttccggcggccacgtcgtatccgcgcgcgccacgaccatcggcctgatggcgatcctgctgtggagcttcatggccggcaccgtgcgcatcgtctccgaaaacttcggtgccacgcttggttcggccctgatctacacggtcggcggcatcctgctgctgatgttccggcgcccggccccgattcgcgagttccccaagaaatacttgattatcggcggcctgttgttcgtattttacgaatcgtcgatatccctctcgctgggtctggcctctaccgacgcatcctcggtggaagtgagcctggtcaactatctgtggcccacgatgatggtgctgctgtcggcgggcgtatcccatcgcaagcacgcggtcgtcaaggtgctgccgggcgcgattgtggccactgccggcgtggtgctggcggtcggcggtaattccgggctcgactggcatgcggccgtgcagcatatcgccgccaaccctttgccctatgcgctggcgttcgtgggcgcgcttgcctggtcggtgtacgcggtgttcacgccagccatgagtcatggggtggacggcacttcattgttcttcccctgcgtggccgtggcgttgtggattatccacttcgcgtccgggcaggggtggccggccgagccgccgagtctggtcgcatggctgtttgtgttgattgccgcggcggcgattggcggcggttatgcctgctggggctatggcattctgcatgggtctatggagcggctggctattgcgtcctatgccacgccggtgctgtccaccggggccggtgcggtgctgctgggtttggcgctgtcgctgccgttttggtgtggcgcgctgctggtggccgccggatcggtgctcaattacttggtcagtgcgcgcaaatagcggggtggctttgctcatggggcggtaataatcccatggggcggtaaaaccctcatggggcggtatcccaaaatggctttattctgccgtttcacaatttcttcaaaccgccccatgggtaaattaccgccccatgggtaaattaccgcccgatgggcagcagcaacttactcgccgcggcgctcggacgggcggcgaatcgggtcaagcagcgtattcggatcggagatgccgaacatgctgcgcccgccggtggattcagggtgcttggcgagaacggccagcgaaatcgcccccggaatcataatgatcaccgaaagggccgccaatccccagttcacgaagaatccgagccccagtacgatggccaccacaaccaccaccgtgacgataatcgtcaacagtgctcgacgtgggttggtttccctggtccaagaggtgctggctgcgggttttgctgttgaactggccgcggcgtttgtggctgttgtgccatcagccgtgccggtcgtgggccttgccgccgcgctcgtcgcggggtcagtaggggcgtcagacacgttatcggcgacattgccggtcgctgctggacgttgttcgtttgcgtgagtcatatccaccaacatattccctgcttccggctaaagctgggacaaacctgcgcaccgctaatccagcgccgacactggccttgagctgcggacgtccaggccggatgtgaacaggagctgaacggagtctggggaaaccatgagaactcgcgacaatttttgtgaaattgggtgacgctctatgaatcgcgcgctagtattgcgtgagcttacaagacgaggagcctggagcgcggggacgaaggatgaagaactccgtttggaagacgttcatggaattgtcgctggtccgcggaatcgtgccgtggaccgtgttcggactgaccgcgatcgtggcaatcatactgattgttgggctggcattgagcaagaagcgcggcccggcagcagacggcctggcaccgggcggcctggcgccggacggcgaatcgtcggcccaatcgcccgtcgacccagataaccagccggccaaccagcctacgaacgcggctgctacggcgtcatccgcagcttcgacggaagagacgtttatttcccatggcctgcgtacgccgcaacgtcgtcacttgcatccgctggccgccgcgctggccgccgccgtgctcgccggcgcgggcggactactggccacatggctgatgtccgacgtgttcatggtgttcggcgtatcgttgggctggccggtgatcctcaccgtcgcgggaggcttcgcgggcctcggcttcgtgctggccgccgccgtgacgttacggggggcccgtcgcgcgctggccgtcgtgctggtgccgctggtgctggcgtccaccgcgctcggcgtggactcgatctacggcgaataccagaccatcggcagtctcgtcggctatacgccataccccccgctcggttcggtcaccgtgcgcaaagcctcgatgagcgtcggcgagtggcgcgacaaggcgcgcaaggacgctctgccatccatgcccgactcgggcagggtgttcgtcgtcagcatcccgaacaccgaatccaagttcaaggcgcgcaaggcgatggtctacctgccgcccgccgcgctgtccgaccgcccgccggccctgccggtgatggagctgctcgccggtcagccgggcagtcccggtcgcctcatcgacgccggcaacatcgccgccacgatgaacgcttacgccgccgaacacgacgggctggcgccgatcgtgctcgcacccgaccaaaacggttcggccatgcacaacagcctgtgcgccgacaccacccgaggcaacgccgaaacctacctcaccaaagacgtggtgaactgggccagggcgacgctgccggtagccaagtcggcccgtatgtgggcgatgggcggattctcgcaaggcggcacctgcaccacgcagctggtgccgcgtcaccccgacatctacggtgcgatgctgccggtggatggtgagctcgagccgaccgacggcagcgtcgagacgatggttcggcgatatttcgccggcgaccgcaaggcctacgacgggcaggtgccggtcaacgccatcgccgccaccggcacggccggccaggcgctgttcgccggcgccggcaaaggggatcggaagtcggtcgccaacatgcgcaccatcgccgcggccgcgcgcgcggccggcatgcagaccaccgaactggtcgtgcccggcgccgaccatgactggcatgcggtgcaggcggtctggaaccccggtctcgactggttcggcgcgcgaaccgggctgggcgaaatgacgaaatcgttggaggaatacccacaagtggaggtgttgcaatgagcgaagaacaacagcatgggaacgcgcggccggcggccatgccgcagacgcggcggcccctgcgggacgcggaaccctcgcggacgaagcccgccacgacctcccgcgccaccaaaccgcatacggcaaggtccagccatgcggcggaaagctggcgtgaactggccggtgacgtgcggcagtgggcggacgaccaccggctggccgtcaccgccacggcggcgctggtggcgctgaatctggcggcgtggctggtggccgcgatggccggattcgcgtttccgctgcggctcagcaccagcatggccgcattcaacgccggcaaactcatctgctcgctgttcctggcgcgcggcgtcatccaactcatggtcgacgccgtcctgtggctcgtcatgctgtcgatagccgaaccatggctcggccgtgtgcgcaccgtcgtcaccgcgctcgcctgcgcggccggcggcgtgctggcgggcctgaccctgtgcgcggcggccggatggatgttccaggactccctgttcgtctcccgcatgcggttcgcattgagcccgctggtgttgccggtcggcgcgctcatggcggccagcgcgttctgcagccacctatggcgcaggcgcatccgactcgtcggctatgtggcgatcctggtcacgttgctctacagcggcaaccccagcggctactgcatactcgccgccgcgctgatcggccatgccgccggccgtgtgatggccggtccgcccgcgcacgtcgaagccgaatggcactggctgcgcagcacctccttcgaggcgcggcgcatattcgcggccatcgccgtggtactggccctggggccggtcatcgccatcacctcccataaccatgcgggaccgctcagcacgatcggcctgctcatgagcccggtttccgtcgacgatggcatgctggccaaatgcctggccggtgacacgcacggcggatgcttcctgcagttcgatctgttgcgggcctcgatgcccggcgcggtgctgcgctcgttgctgcccaccgccgtgaccctggtgctggcgtggggcctgtatcgcggacgtcggttcgcggccatctgcaccgtggccatcaacctgttcacggtggccatcgccgtcgcctactatctggtcgtgccgctgagcttcgcgccggacggcatggcctccctgctgcagcacggcgcgatcgtggcctgcgtggcgaacgtcctgcccccgctgctgttcgccatcgccctgctggcggcgatgaaacacttcccgatccgcatcggctggtgcaggctggtcggcggcatcggcgccatcgtgctggcctggctggcgtgcgccgccatatacctgatatacggcatcgcccaacccgccaccttctcgccacgcgctacggcctcgtcgctgctggccgagctgccgggacgcttcctgcccatcggcttcctgagccatatgaagctgtcgttcgtgccgcgcactccgatggcctcgatcatgtaccaaggcgtcggcctggtgttctggatcgtggtgctggccgtggtgatccactggatgggcgacgtgagcgaatcgaacgagcgagcccgggcgcgcgccgaacgtctggtcgaaaccggcggcgaatcgatgagcttcatgaccacgtgggaaggcaacagctactggctgtcccccacgggcagatcggccgtggcgtatcgcgtgctcaacggcatcgccctgacctgcaccggaccgttcggcgatccggcggaatggatggacgatctgaacggtttcgcccagcactgtgcggaacgttcgctgtcgccggtgttctacggcgtgcatcgggaacagcgcgacgcgttgctggaagccggctggaactccatcgaggtcggcagcgaaatggtggtcgacccgcgcggctggaagacgaccggcaagaaatggcaggacgtgcgcaccgccatcaacaaggccaagcgcgacggcgtgaccgacgtgcagtccacattcctggaagcgtcgctcgatgtgcgcgaacagatcgaggacatctccgaggagtgggcgcagctcaaggcgctgccggaaatgaagttcacgctcggcggcgtcgaggaactgcgcgacccgcgcgtgcggctgctttacgccatcgacgcggacgggcgcgtgctgggcgtcaccagctggttgcccacctggcgcgacgggcgcatcgtcggctggacgttggatttcatgcgccatcgcaccgacagccccaacggcatcatggagttcctgatcgcgcgcatggccgagcggctgcgtgacgagggcgaagccgatcccacgcacgccgtggagttcatgagcctgtccgcggcgcccctggccggcatgaatcccgatcgggacaacgccggggaggacggggcaccggccagcgaaggcacgcaggtgctccaacacgcgctgcagatcgtggccgactggatggaacccgcctacggcttccactcgctgttcaacttcaagcgcaagttccagcccaccgaagcgccggtctacgtgtgctacccggacccggcggcgttgccgcagatcgggctcgcggtggtgcgcgcctacgtgcccagcgtgacgcccgccgaagtggccggcatgctcagcacgctgcggtcgtgaaggtgtgcacacgggtacgcaggttagccgattcgagcctgagacggggtatctgctttcagagaggtacatttggccccttgcggacaactaactgccttcaaagaggtgcctgaactctgaaatctcgagtatgagcgttgcaatgacaacgtttgtactcggggtttcccgtattcggggcctctttgaacgaagatagcattctgcagaagcccgaatgtacctctttgaacggagaaagcctgacaaggagggcgcggcaagcgctatctccgtttcgaggggctgatttggtctctcccggaggtctactcccgtttcgaggggctgatgccgaagtattcacgctccaaaatcggcggaatggcgttggcgcggatgggtttttacatgcggtctagcggccgaccagccccttgaaacgggagtagatttccggcgggggtcaaatcagcccctcgaaagcggttttgccggtgcagaggtgtcgttgactgcatcgcgagccgcctcgacgtagtaacgtggggcgtatgagcgaacgtaacgaacacaatgacggaaatacgcaaaccgcatacttcgccggcggctgcttctgggggctggagcgctacttccagaacgtcgacggcgtcacggacaccacggtcggctacgcgcaatccaccgtcgaatcgccgacctacaagcaggtatgcgcgggcggcaccgatgcggccgaaaccgtgaaagtcgagtttgacccggcacaggtcagcctgcggacgctgacattgctgttcctggaggtcatcgacccgttctccgtggaccagcagggcgaggaccgcggccggcagtaccgcaccggcatgttctacacggacgagacgcagcgcgccgtgtatgtggcggctctggagcagctggtcgaccgccagccgcagcgcccggccgtactggtcgaaccgctgcgcaacttctacccggccgaggcacaccatcaggactatctggtgaacaaccccggcggctactgccatgtaccgatcgccgcaatcgcgaacgtaaaacgccgtcagaagtacgtggaacgcatctgggatctgacgcttgagcagttcgcggtcacgcagaacgccgctaccgagcgcccgttcgtcaacgagtatgacgaggagtttgagcccggcatctacgtggacatcgtcagtggcgaaccgctgttctcgtcgcaagacaagttcgattccggctgcggctggcccgcgttctcccgcccgattgccggtgacttgctgaccgagcatgaggaccaccgcattccgggccgcgaccgcatcgaagtgcgcacgtcggacacacagattcacttgggccacgtgttcaccgacggcccggccgaccgcggcggcctgcgctactgcatgaattccgccgccctgcgcttcgtgccgcgctcgcgcatggccgaggaaggctacggcgactggattgcggttgtggatggggacgatcaggcatgagcatggagaatatcgcgggcgctcgcaagcccgccaagcgtgaggatgagcacacggtcgccggcgagcatcgcatgatgcgccgtgcggaccgcgaggtgaccgatcccgagcggatcgccgcgatcatcgccgcctgcgacatcgttgaagtggcctatgcggatgccgagggcctgactatcgtgccgctgaatttcggctttgattacgacgaggcgactggcaagctgacgctctggttccactccgcgccgcgcggccgcaagctcgacgcgattcgcgccgccgccggtggccgactgcccgtggctttcaccatgcagaccgactgcgaggtggtggcgggccgcaccacgtgcaattggggtgaggcgttcaagtcgatcgtcggcaatggcacggcgtcactggtcgaggatctggatgaatgccgccacggcttgcagacgctgatggcgcagcaggcgcatatgccgaatgtggaattcactgatgcgcaggtccgcagcgtcacggtgtggaagattgagtccgactacttcaccaccaaagtccgcaccaaacccgtgcccgcacacatgcatcagcgttagccggggatagcgcgccacctccccactggcgggaggcagcgcgcagcgccggtggatggcccacgtccggacccgatagacttgccgccatggcagcagtgacagtggtaattaccagctacaatcagggcccgttgattcacgaggcagtcgagtcgtcattggccccagacggttcgtccggaacggatcatcatcgtgaacgatgggtccgatgaccacgcatccgtcgagatgctgaacgccactctcgacgattgccggcacggggcgatggatgcgaatggtgtggccatcgacctcatcggccaggcaaacgccggtccttccgccgcgcgcaaccgtggcatcgccgccgccgaaacgccgttcgtagtggtgttggatggcgatgaccgtttgcggccggccttcattgagcgcacgttgtcgatgttgtccgccgacaaaacgatggtcgccgcattcggctggctgcagactttcggtgtcctggaatcagtggcccagccgactggtggcaatgccgccgcgttcgtgtcgcataattgctgcccggccacgtgcatgattcgccgtgtcgcgtgggagcgctgcggcggctacgacgagtcgatgcgcggcggcttcgaggactgggacttcttcctgtcgttgttggagtgcggattggcggtggaaaacgatatctgcggtgctggggttactggcggtactgagcatgtcggaggttttgggagtgcctgggatacagagaatcccgcaaaagacgcggcccatatcggcatcgcccccgagccgctgatcgagtaccgcacggccccggcctcctcaaacgtgaccagcatgaccaagcgcctcgatctcatgcgcttcctgatcgccaagcaccgcgatctctacgccgcgcacatcgccgacgccatcctcggcgttgaagccatctccatgagccgcttaaccatgtgggaatcgttgatgtgcggtgacacc

SEQ ID NO: 753 - DNA, 2607 bp, Unknown
  R14_18m  MAG No. k141_353
atccatgccgggttggaacgaggatatttcccaaatccacgacttcaatgatctgccgaagacctgtcaagattacgtcaagcgtcttgaggatctgtccggctgccgtatctccgtgatcggcaccggcccacagcgcgatcatgtcatccagatcaattcgctggtcgactgaccgtctgcaacgaatttcccggcttgactggtaacgacgcggcacatgatatccgccggctgattccgcgattcgaccacttgaagtggaagatggcggcggccggcatagtcattggtctggtttcaggattgctggttgtcgtataccgtctcggcatcgaatacggcacggatgcgtcccgttggatatatgcgcggattcgcgagaccccgtggctgattgcgccgtgggcggttgccgcggtggcggccgcgctggcaatcgcgtggatggtcggcaaggagccgatggctggtggcagcggcatcccgcagaccaacggcgtggtgatatgcggcttgaagatgcgttggcagacgattctgccagtccgtttcgtcggtggactgttgggcgcgttgtttggtctgtcgctcggccgtgaggggccgtccattcagattggtgcgtcgggcgcgcagtgtgtatcccaccgtttgcgcggccgccgccgtgaggacatgcaggagcattatctggtcaccgccggtgccgcggccggcttgtccgccgcgttcagcgcgccgctgtccggcatgatgttcgctttggaaggggtgcatcggagtttttcccctgcgattctgatgggtgccaccgccgcatcgctgaccgccgatttcgtctcaaaatactgtttcggtctgcgtccggttttggatttcggtgatatcggtcagctgtcgttggaagagtatgtgtggctgattccgttgggattggtggccggtttggttggttcgctgatgaaccgctcgttgcttggcttccagacgctgtacggcaaactgccggcatggagccgcccgatgattgcgattgcgatcgcgttgcctgtcggcatctggttgcccgatgtgctcggcggcggctcgaatctgattgataccgccgaacatgcgcgcgtcggcttgggaatgctgtgtctgctgttcgtggcgaagatgctgttcacatctacgagtttcggctcaggcgcgcctggcggtattttcatgccgattcttgcggtcggttcgttggccggcggcatctgcggtgaagtgttgcatcgattcggtgatctgccatccgacgcagtggcagtgtttgcggtgtgcgtgatgacgggcacgctcgccgcgtccgtgaaaacgccgatcacgtcgattctgttggctgtggagatgtctggaacgttgacgcacatgctgccggtcgcggccgtcgctttcatcgcgctgttggtgtccgatttgctgcgcaccaaaccgatttatggggagttgctggagcggtacgtgcgcgcgcaaggcatgcagatggcgatcgcaagccatgtgggcagcggcattatggaactgccattggaaatgggagcgattgcggacggcaagcgggtgcgtgacgtgcgttggccgtctgggtgcctgatcatcggcctgcgtcgcggcgaaagcgagatcgtgccgcgcggcgatacacggctgcgtgccggcgactatctggtggtgctgttcagtggcgaggaggagcgcgaggtgcgacctgcgatgcggcggctgtgtgatgcccggcttgactgagcctggctgaattcggctggactctggatgtacgaatttgcggaatcggacatccagggtgcatacgttggcgctccgtgtaaactcatatgcgttaggaaggtggcaaccgcggcccagctcgttgttgcacggcctatgggcggaacaacgctgtccgcggaaggccagtacagggggagcgcaatggaatcgcaagaacaatcgccgggagacgtggtgactgcgggtgaggactcacatcccatcacgcaggcaatcgacactgttgaggtgacgcatgctggtgcaaccgcgcccgccgctaacaccatggatccgcctacgattcccctggcgccgatgaaacgtatgcaggcgcggttcaatccgctcgccgacggactgatgtatgttgtggtgttcgtcggtggatttgttggagtcggctgtcggcatgcgttggatatgctcctgccgtcggtcagcgggacgccattcgttgtgggcacgtttgtgtcgaatatggtcgcctgcttcctgttcgcgatgctgaccgaattcatggcgaccgcttcgtggctgcgtcgccgggtgcggcaggttgtcagccgtggcgttgggctcggcttgctcggcgggctttcgacgatgtccggcgtgatgctggaaacggtggaaggtctgcacgagcggcatatcgccagtgcgcttggctatcttgcgggaaattttgcaggcggtttgctcactgccgccgccggcgtggttctgatgcaggcactgctgtcacggagtactcgaaagcgggttcggggtgcgttttcagctgtttccgtgtccgat

SEQ ID NO: 754 - DNA, 3104 bp, Unknown
  R14_18m  MAG No. k141_373
cgttcgagcacaatcatcgtgtgctcgaagacgtccttgtggcggtggtgttcgtcgatctgcaattgcagggccggaatctccgggaagacgatgtccgcaagaccggattcgaccaacgcctcaaggccggcgcgcggacggtcggagagcagcagcttggtcagttcgtcgcgcacgcgctcggcggatacgatgtcgatgcggtcgcgcatcgaggtaatcgcctcggccgcgtccggcgcgatacggaagcccagctgggccacgaatcgcacggcgcgcatcatacgcaacggatcgtcgtcaaaggactgtcgcgggtccaccggcgtgcgcaacacgcccttggacagatcgctggcaccaccgaacgggtccacgaattgcaggtcgggcacgcgcagggccatcgcgttgacggtgaagtcgcggcgggacaggtcgccctcaagcgtgtcgccataattgacctcgggcttacgcgagtccggatcgtacgtgtcggagcgataggtggtgacctccaccttgacctcggtgccgtccgggcggcggcgcatggcacccagcgtgccgaacttgcgccccatgtcccagaagccgtcatgcccccaccggcgcagtatcggctcgaactgctcaggccgtgcggatgagcagaagtccaaatcgtggctctttctatggagcagcaaatccctgaccgggccgccgaccaatgccagctcgtaaccctgttcggcgaacagtcgaccaagttcgatggcttcgggccatacttcgaaatccaatgggcaccttcccgcgtgcgacgtttttctgccctaccagcataccgttaccccacctgcacacggggttgagtaaggtggagaatatgattacgcccgccgaccttgcccgcatactggggcaaacaccagattcggcggatagccatacccaagaccacctgctgtatacgtccgaaactccgcatcattccgccgattcgggcgattcttccgatgtcggcggcaccgcgagccactccaccaatcaggccgttcatcaagacgaagtagacgcagtaccgactgcgcaacattccggtgtgcccggcacgcccgcaacgcccgtcacgcccgcaccatccgaatccgaaatatcggacgccgccagcgacatgcccgcaccgaagccgatgatgcccacaccggccaccgtcttcggcatgcatgccaccgtcaccatcgccactaccagcggcactatcgaagggcaggccgatggtatcgccggcgaggccggtgccgagacgattgccgaggtcgagccgattatcgccacggcacaaacgtccgtaaccatcgtcacgaacgatcccgcggcgaccgcccacgcggccgtagatgctgccgttgcggtcgccaaggccgccgccgcgcacaccacagcgataccgactccgcgcgacgtgctgatgccgcctgcggcacgtaccgcaccggccgcagtgccggtctcagcgccgtctgcagcaccagtgaggcccgtaacgtcagcgcatcccacgccggccacggtcttcggccggcatccgtctgcggatgttgcctcgccggaaccggcagtgccagtagaaccggtgacgccatccggcccgactccggccatgatgccgcaacgccgtacgtcggacggtccgaccacattcgcttcactggatgcccaggaactgccggtcgtacgcgaatattcggcaggcggtctgattttcgatgaccagaaccgcgtggccattatcgcccgtcattcccgctccggccatctcgaatggtgcttgccgaaggggcatatcgagaaaggcgagaccccgcagcagaccgctgtgcgcgaagtgcatgaagagaccggcatcctgggcgaggtgatcgattccatcgccaccatcgactactggttcaccggcaccacgcagcgcgtgcataagctggtccatcacttcgcgctcaaacagaccggcggcgaactgacggtggaaggagacccggatcatgaggcggaagacgccctctgggtacgttttgaagatttggatgacgtgttgagctatcccaacgaacgcaaaatcgcgtggctctacgccaggaagaagaacaggcaggcaaacgagtgaacctacccggagtcttacgacattgcacacgtctggcacacgcactggcggctggcgtcgccgttgtggcgatgctggccgctccattgaccgtctacgcgaacgatacgacggacacgaccgattcatcatccgatacgacggacgcaacgggcaatcagaccgagaatcagcccaagcagagcattgccatcacgcaaagcacccccatcgtcacctccaaatcgggctatcatgtcaccgcggtcatcagcaatacggacagcacggccacgtcaagcggcacactgcacctgaccaccaatacgctgttcacctttgtctcgcgcaccgatattcagaattgggctgagaacaacgcccgcatccccacccccaacgagttgggttccgttgacgtgccatcgattcccgccggcggcactgccaccgttaccgtcgaggtgaacgccaatcagcagacccttgcctccatagggagctgggggccgaagccgctgatgctgtcgtatatcgttggcaatcggatactcgccgatttgccgagttttctgacccgatcttcggaggggctcaacaccgcgacaacaccggccatgaacctgaccgtggccatgccctacaccgccagcggctggcaggtcgataataaggccatcagcaatcgcattgccgaaaccaccacttcctcgacatcaacatcgtccaagtccaacggcacggacaaggccgacaagtccgataacgccgacgccagcaacgcggccaaaggcactgatacgcaagccatatccttatccgggcaggatgccgataccgcgcgatcccttgggcagacattcgccaagcaccgctcgctgcaagtgatcgcggatcctctgtattggcgccagtccgcagtgcaaccgtccattgccggcatcatgcagcccgccgactttga

SEQ ID NO: 755 - DNA, 12694 bp, Unknown
  R14_18m  MAG No. k141_535
cccttcaatgctcccggttcctctgactcctttgcgagcgccgcggatgggatgagcacgcttacgtatggggttgcgccagacaggacgtcgtcgtagaagcgctgtttggcgtcgatgaagtcgatggaatcctggatttccgcgagctgctcgaccagccgcgcccgcttgccggcgagcatctacttgcgttcggggatgctcggctcgtggaggagcgtaaggggcgcgagtaggggttcgcggctttgttgcggtctctccctcacccggctatactgggagctccctcgtcagagggagcttaaattcggtctggttataggcccatgggcttcttgggctttttgtcgctcatgagcatgaggaagctgcgggactgggcggtgatcatgaagcccgcctcatagctcagttccggcccattcgggttgtgcgtatccacgaccagctgccatttgcggccgtatcgctcatccggcagggtgaacataatcggctcgtaatgcgcgttgaagatcaggatgaagtcattgtcgaccatccggttgccgtaccagtctacctccggaatatccgaaccgttcagatagatcatcatggagaacgcatgcgtgttctgccagtcgtccatatccatgatcgaaccggtgtggtcgaaccattcgacctgcggaatcatgttcgaatcgtcgccgggctcacggcctgtgaagaagcgacggcggtgcaacaccggatgatccaaacgcagatgaatgagtttggaaacgaaggcgagcagttccttgcgtcccttgtcaagatgccagttggtccaggagatctcgttgtcctgacagtaggcgttgttgttgccctgctgggtgcgggccacttcgtcgccaccgcaaatcatcgggataccctggctgaacagcaacgtggcgaacatgttgcgcatctgacgctgacgcaagtcgttgacgtccggaatattggtcgggccttcaacgccgcaattccaagagcgattgttgctctcgccgtcgcgattgccctcgccattggcttcgttgtgcttttcgttgtagctgaccaggtcgttcattgtgaaaccgtcatgcgcggtgatgaagttcacggacgccaccggtcgacggccgttgacctgatacagatcggaactgcccatcaggcgcgaggcgaattcgggcagcgtggagggctgcgagcgccagaagtcgcgcacggtgtcgcggtagcggccattccattcggaccagctggacgggaagccgcccacctgatagccgccggagcccagatcccacggttcggcaatcagcttcacgcgcgagatgatcgggtcctgctccacgatgtcgaagaacgcggacagcttgtcgacctcctggaactggcgtgccagcgtggcggccagatcgaagcggaagccgtcgacgtgcatttcggtaacccagtagcgcagcgaatcggtaatcaactgcagcgcgtgcggcgagcgcataagcagcgagttgccggtaccggtggtgtcgaagtagtgctgctggtcgccttccaccagtcggtagtaggaggcgttgtcgatgcccttgaagctcagggtggggcccatatggttgccttcggcggtgtggttgtacaccacgtcgaggatgacctccatgccggcgtgatggtaggccttgaccatggacttgaattcgttgacctgctcgccgcgctctccggaggaggagtaggcgttgtgcggcgcgaagaagccgatggtgttgtagccccagtagttcgacaggcccttctcctgcaggaaggagtcgttgacgaactggtggatcggcatgagttcgatggcggtgacgccgagcttcttcaggtattcgatgacgctcggataggccaggccggcgtaggtgccgcggatgtccggcggcacgtccatgttgaggttggtcatgccgcgcacatgcgcctcgtagatcaccgaatcgtgatacgagatgtaggggtgctggtcgttgccccagtcgaaatacggattgatgacggccgacttcatggtgtgggcggccgagtcaaggtcgttcatcgccgaggtgtcgtccgggcttttgaaccagtaggagaacaggctttcgtcgccgtcgatgttgccttcgatggccttggcatacgggtcgagcagcagtttgttggggttgcatctgaggccgtgcatcgggtcatagggaccgtagacgcggtagccgtagcgttggccgggctggaggccggggatgtagttatgccatacgtatgagttctgttcggtcatttcgatgcgcgtttccgcatcgtgctcgtcgaacaggcatagctcgactttctgcgcaacctgtgagtacagcgcgaagttcacaccggcgccgtcatagctggcgcccagcggatacattgatccaggtctgatctgcatagttttcagtatcccactttcttgtgtcactgatgtgccggggagttgaacgtcaggagaacagcgacggcttgtctttgtcggagttcctggcgatgagtctgcgtaacgcctcatgctggatggcgatcatcgaattggatgaggtgatgcgcgtggcggcaaggtcgctccacggaatccacgcggattccacgtgctcgtccgcgtcgaaatggcgctgctcccgtctgaacgggcccaaatgcaacaccatgatgtgggccagttcgtcggtcatgccttcggacgagtagaaatcgcccacgaagtcaacacccatggtgtcacggtccggcaccacgccggtttcctcggccagttccctcagggccgcgtccatgatgtcctcgccctcgtccatgagaccggcgggaagcccgtaggcgaacatgtccgatccggcacggtattcgcgttcgatgaggtaacggtcggtggacatgtcgtgcacgagcatgaccacacagggggcgtgacgcagcacctggcggccgatctcgtgttccttgccctgcttgtcggtcagagcgatgcgcatgtcgtccacgtggaagatgcgcccggtataaacggtttcgctactgatcactttggcgggcacgtccatgtcgatgccgtccgaggaggcgttcagcttatggtcgagccgatgctccagttgttcctgcttgcttcccccaaacatgtcatctcctcggaaaaaacgttttcgccacgtcactatagcgccttaatctcgatgcgcggtaatggacagcgtccatggatcggtcgtgtcgtggaaccactcgacttcaggccttgctccggtcgcttgttcgatggcggctggcacgtcatcgatcgcgtagttgaaccacatggattcgatggcggcatgaggggtgttgatgaagcagggacgcacatggctctcccccgccattccatggccgagcatgatgccttgggccctcatacgggcttcataccgggcttgttcgatggcgtcggtcaccgggtggtgacgcaaatcgctggttacgtacacgtccgcaccggtggcacgcacctcgttgaacagggagtcaccggagccaggcagaatggccacatactgaacaaaagtgtccgaatcgccgcatacctggatgccgagcgcggtggtcatgccatgatcggacacttcgtcgaatacacgctgagcgaaatccttcagggcaacaggcttcggcaaacgacccacacgccccaagccgaccggatgagaggcgtttgcatcgtcaatcggcacgagtggtttctggtcgatgagtccgaagtagtcggccgccgcctgccccacgccgcgatacgcagcgtcggcattggtgtgccctacccacagcccgcagccgtgctggtagagcctgcggacgatgtcgccccggaaaccgagtccgctcgtctcgtgtacggaacggaagaacaacgggtgatgggtgatgagcaggtccgcgccggtggcgatggccttgtcaatgatggcggaggtcgggtcggcggcgaacacgatgcggtgcacgtcgtggctcagatcgccgacgatgagacccggctcatcccattcctcggcgtagcgcaatgggtacagggtctcgagaacgtcgatgacttgcttgagattcggcatatgtcccattgtagtgggctattgcggcaagggactcattctgcaattgcggacaagccatgctcgtgctcttcattgctcgactatcgtctcgtcttcgcctacacacaatccactggactgtttgctcaacggctcagcacccctcacccgaggggagctagaaattgtcagtgtgcggcgagctgccagtcggaaccgatgccgcacgatacgtccagcggcacggcaaggtcgacggcgtgttccatggcgttgcgtaccagttcggtgacctggtcgccttctcccggcgcgatttccactaccagttcatcgtgaatctgcagaatgatacggctcttgacgtgggcctctgccaaggtctgctcggcgcgaatcatcgcgatcttcatgatgtcggcggcagatccctgaatcggtgcgttgagtgccgcacgttcggcggcctcacgcgcaacacgattggtcgaatgcagggccgggaagtagcgacgccgtccgaaaatggtttccgtataccccttctctcgggcattggccaccagcgattcaaggtaatcgtgcaccttgccgaaggtatcgaaataccggtttttcaacgcttccgcttcacgtggcgcgatcttgagctgctgggcgagaccatacgtgctcagaccataggccaatccgtagctcatggcttttacgtggctgcgctggtcgccggtgatctggtcgaccggcagcttgtagaccatcgaggccacgtatttgtggaagtcggctccggagcggaacgcttcgatcagcgcctcatcaccggacagatcggccatgatgcgcagctcgacctgtgagtaatcgcagctcatcagggcctcgtacccctcccccggcacgaacacgccgcgaatctcacggccggcggcgttccgattggggatgttctgcaggttcgggtccacggagctcaatcgaccggtggcggcaacggtttgctcgaaagtggtgtggatgcgttcatctgatgtattggtggcatcgatcagcgtttggacgatctgcttgagcttgttgatctctcggtggcgcagcaacgccccgaggaaaccgttggcccgctcattgtccactgatttgacatacagatcctgcaatgcggccgcattcgtggtgtatgagccggacttggtgcgtttggtgggcttcaaacccatatcttcgaacagcaccttctgcaactgcttgggactttgcaggttgatttcggtgccggcatactcccaagccatttcctgcgcctgacgagcctcggcggcaaactggtcacgcatggaaacgagtcgaacgctatcgactttggctcctgtgtgctccatgccgtgcagcacgcgggaaacaggaagttcaatcgcgcgcatcagccagcattgttcacgctcgtcgataatcggcccgagcgtgacggcaaggctgcggataatggccaaatcgcgcagacgatgttcgttcggatcttcttcgacctgatcgtcgtcgaagtccaacgtgccttgcgaaggctgttcggtttcggtgaagtggatgtcgaggaagtgctcggccgcctgcttgaggctatcggcgtggaaatccggttgggccagatacccggcaagcttggtgtcgaacatcggcaggtccatgtcaagatctaccgcgcccagaagatgcagcaattctttatacccatgcacgatggtgcgggagtgttcgcttttcaggaaccgcgcaagctgtgctcgcagggtatcggtgattggaaggggcactatggccgctgatgttgccgtggcaacggcaatggcttgtgccgtggcacgacccggcctttcgtcgccccatgcggccacggtccaagcgtggccgaccgcgtcgccgcagacggtatgccgctgcgatccatcgccatagtcggaaaccgtgaaatcggcgatttcaccgggaacattgatctcggcgcgatgggccttgacccattcgtcgaactgctccgaagaggtgatgctcgtgggttccggcaggttcagatcgagactgttatcctgctcgtcctgttcattattcgtagactcgccggctccgtatgtgttggaaaccttggcaccggtattgaaggttttcagtacacgactcctggtacgcggtccgaattcaagctccttgaacagggcgtcgatttgtgccacgtccacggtgccgaatgtcagatcctcaatatcgacgccaagatcgacgtctcgtaccagtgcgttgactttgcgattgagcttgacctggtcgatattggccctcagcgattcgccttttttgccgccgatttcatcggcgtgctcgcaaatgccgtcgagggaaccgaattggttgatccacttggccgcaaagccatcgcctacaccgggcacaccgggaatattgtcggcggtttcgccgcggagcgccgccagatccggatattgtgcgggagtgactttgtatttgtcgatgatggactgcggcgtcatatgcttcaggtctttgaagtgatgacccgggtacaacacggtgacgttgtcatccaccagctggaaggcgtctcggtctccggacaataccagtgtgtggtagccggccttgtctcccatggtggcgagggtggcgatcacgtcgtcgccttcgaatcccggcttctcgatgtaggtgacgccgagggccgtgagcatgcgttgaatcaatggcagctgggtgagcagctcttcgggagccgcctcacgggtgcctttgtattgcggaagcatctcattgcggaatgtgccgcccttcacatcgaaggcgacgcccagatggtcggggttctccgcatcgatcacctgcgcgagcatggtggcaaaaccccagacggcgttggtggcctggccgctggaagtactgaagttgtcgaccggcagggcgaaaaatgcacggaaggccagcgagtggccgtccaccaccagcaatgtttcattggtgggtacggtcacgctggcctctcccatagtgtgtttgtattgctttacgactcagcacggtgatgccgataatcagcgttcgcccgaatcagaaggcttcggatcgccgtacttggcgatgatggcctgagccaggcgcttcttggggatgcgctggtccatggaggtcttctgaatccaacggaaggcaccctgctcggagaagtcagccttgtccatcagcagacccttggcgcggtcgacgagcttgcgctcctcaagcgtgtcttcggccttcttgagcttctcttcggtttccttgagctggtcggtggtttccttgagtttgcgttcgctgcgctccacgttgtccagcagatcgttgatctcggcgaaacggcccatggccacctcgagggtcggcagcaacttggattcctcgtacggcttggtgacgtatgccatggcgccggcaccggtggccttcttcaccagatcggtctgggagaatgcggtgagcatgacgacaggggcgatgttctcatcgcagataatgccggcagcggcgatgccgtccatacgcggcatcttgacatccatgcacaccacatcagggcgatacttgcgggtcagttccacggcttcctcgccgttggcggcctgaccaacgacctcataaccgttgtcttccagcatggcgaccagatccatgcggttcacggcttcatcctcggccacgacgacggtacgcggaccatcctcggccacggccttgcgctcagcaggttcgctttcatcggctacggccttgagttcttcgtcggtcagcacctcatcgacgttgatactcggttcttcggacttcttccttgcagccatgccaacctctttcttgaattacccaacaatggggttcgtaataatttcagcgaactcctagctaaagtgccctcggtgggactcgaacccacactgcgcagattttgaggctgcttcctctaccaattgggatacgagggcgtgcctaagcactctgaagagagtagcataccgattcgactcctgcgacacaagacacgcgccagtcctccattccccccggtaaaacaggcgaaacacgtcgatatcgtggacggcgtacccgtgtgttgcccgttcttctgcgtggtttcaccgcttacaatgggctgtagtttcgatgtatcgcttttgttaggagggcttatgagcaacgaaacttaccgtcagttcgatccctggcgcccctctccggtcaaggagatttcccgtagacagattgtggagacgcattatttcaatgtcgatcacgtctcctatgagtcgaatcagatcggttcgtttgaacgctactttgttcaggagaacaatggcgacactgtggctgtgctggccgtcaccgatgacggcatgattccgctggtcgagcagtatcgcatcgccaaccatcgttggacgttggagattccggcaggccacgccaacaacccgtccgaacgcccgaccgatgtggctaagcgcaagctggccgaagaggctggtttcgatgcctccaagcttacgcagttcacccgttttatgaacacgccgagctattccacccagcacaccgcaatcttcttcgccaccggacttaccccggcttcccgtcaggaaatcggcccggagactccgcgttccgacgtgcgtatggtgtcggtggacgatgcctatgagatggtggtcaatggcacgattgtggatgccaagaccatggtcgccattctgcgtctgaagagcggcacgctcgatcatctcaacgactagtcaccacgctcgatcatcgcggtgactacgtgccattgcaatcaccgcacaatcgcaacataacggataacgaaagccccccatccactttctggatgggggggctttcgcgtgctatgtgctagctgtcagcagctaccagcggcctgaaatcagtcgcaagcgccaacggtgtgcacgtagatggagtcggtgcggcccggctggtgatcgccctgagcagagctcaggatgacgatcttgtcgccgtcagcaaccttgccggcgtccttgaggatcttgtccgtgtagatcatgagatccttacgggacttgtcgtggtagtcctccttgagcaggaaggcttcggtgccccaggacagagccagccagtggtaggtgtgctcgttgctggtcaggccgtagatcggggcggccggacgctcacgggagacgcggtgcacggtggcgccggtctgggtgtaggcgacgatggccttggcgttgagcttgtcggccaggtccacggcggcggaggagacggcgccggtggaggacatgtcgaggttcttgagctccgggatgcggtcgaagccgtggtcggtggcgtagccggagatgcgcgacatggtggccacggtcacatccgggtacttgccgacggcggtctcgttggaggtcatggtggcgtcggagccgtcgaggacggcgttggcgcagtcggaggcctctgcacgggtcgggaccggggagttcaccatggagccgaggacttcggtggccacgatgaccggcttggcatactggcgggccagctcgatgatgcgcttggtggccagcgggacctcttccagcgggcactcaacggccatgtcgccacgggcggccatgacaccgtcgaaggtcttgacgatctcttcgaggttctccagagcctgcggcttctcgatcttggcaacgatcgggatgcgacggccttcctcgtccatgatctcgtgggcgcggtcgatgtcggtggcgaaacgcacgaaggacatggcgatgatgtcggcaccggtgcggatggcccaacgcaggtcagcctcatccttctcggtcagggccggcagggagacggcgacgcccggcaggttgatgcccttgtgggaggacacaggaccggccacgacgaccttggtgtacacgttgttgccctcgaccttggtgacctcaagacgaaccttaccgtcatcgatcaggatcgggtcgcccgggtggcaatcgcccggcaggcccttgaaggtggtggaggtgatgtgctcgtcgccctcgacgtcatcagtggtgatgacgaattcctggccgagctgcagctgaaccttgtcttcgccatcggcgttcttcttgaaccaaccgcagcgaatcttcgggccctgcaaatcaacaagcgcggcaacgttgcgaccagtggcttcgctggccttgcgcacgttgttgtagaccttgaggtgatcctcgggggtgccgtgggagcggttcagacgagcaacgtccataccggcttcaacgagcttcaggaggttgtcgtaatcctcggtggaaggaccgatggtgtctacgatcttggctttacgcatgaatgcctgcctattcttgttcaatttggttcgaggcacgattgccccatttgccgaaacccagtctactagcgcgagccgactcatgacaagttttcttcacggtgtgttgtgagcgctcacattgttgtgttgactaggtttaagggttgtattctctaacggtttcaggccttctcggcgctttccatgctcttcatcttgatcacggaagccacggatgcgccgccaattgcgaccacaatcacagccagcgacagccatgtgggcacttccggcacccaatggatgccttcgccgccgttgatgaacggcaaggtattgccgtgcagggcctccatgatgagcttgacgccgatgaagcccagcaccacggacaggccggcaggcaggtagacgagcttgtcgagcagagcacccagcaggaagtacagctgctgcaggccgagcagggcgaacacgttggaggtgaacaccaggaacggatccttggtcaggccgaagatcgcgggaatcgagtcgaaggcaaacatgacgtcggtggtgccgatggtcaggaacacgatgagcatcggggtccagtaacgcacgccgttcttggtggtgcgcagcttctcgccgtcgtagtcgtcggtgatcttgatgatcttgcgcagattacggatgatgccgttttcgtgatattcctcgtcctcatcgccgccgagcaccagtttgacggcggtgtagatcaggaaggcgccgaacaggaagaacacccatgtgaagcgggtgatcagggccgcgccgatcagaatgaaaatgccacggaagatcaaagcaatggtgatgcccaccgaaagcacgtacttctgaatctgcttgggcaccgcgaagttcgacatgataatgacgaacacgaacagattgtcgatggacaacgagtattcggtgagccagccggaatagaactcgatggcgggcttggagccggcgaagaaccagatgcatccgccgaagatcagcgccatgaccacgaagaaggcgatatgctgcacgcattccttggtggagggcacatgcggtcggcgcccgatgacgaacaggtcgacgatgaagaacagcgcgagcaccacgaaggtgatgatttcaaatgcgagtggggtttctgccatgattccctacactaacccatgtatgtgacgggtcatcgccccgcctcggtcatctgccggagctccttcttgagatcacggatctcgtcgcgcagacgggccgcaagctcgaactggagttgttcggcggcggtgtgcatctgttcgctcagttggcgaatcaggtcggcgaggtcctgcgcgggcaggccggccttcaggatctcctcgtggcgtttgtctgcctcgttgggatcgagtaccggcacgcccaggtgtgtgttgccggccttgcccgcgttgcggtagccaccttcaagcaaggtctgggtgtccacatcctccttggcgagcatgtcgttgacatcgctgatcttcttgatcaggggcttgggatcgatgccgtgttcccggttgtaggcgatctgcttggcgcggcggcggtcggtctcgtcgatggcttgccgcatggcttcggtggtctcgtcggcgtacatgatcaccgtgccggacacgtttcgggccgcacggccgatggtctggatgagcgaacgataggagcgcaggaatccttccttgtcggcgtcaagaatcgccaccagcgatacttccggcaaatcgaggccctcacgcagcaggttgatgccgacaatcacatcgatcttgccttcgcgcaacatgcgcagcagttcgacgcggcgcaacgtatccacatcggaatgcaggtattcgaccttgatgccgcgttccagcagatagtcggtcaaatcctcggccatcttcttggtcagggtggtcaccagcgcacgctcgttcctggccacacgggccttgatctcggcgagcagatcgtcgatctgccccttgaccgggcgcacgtcgatcttcgggtccagcaggccggtcggacggatgatctgttcgaccaccccgtcggacaagcccaactcgtagtcgccgggcgtggcggacagatacacggtctggccgacgcg

SEQ ID NO: 756 - DNA, 2719 bp, Unknown
  R14_18m  MAG No. k141_595
gctgcgaggatatgacaaggagaaggttgatgctgccttcgacgctactcaggagagtgtgaagcgtgcgcagcagacgttggccagcatgcgtgagcagattgcggcggatgacgaccgtattctgcaactgcaggcccagcttcaggaagagaagaacaagaagccggaaggcaacagcttcgcttccctgggggcgaacgcccagcagatgctcgcctccgccgagcagacgagtaccgaactgctggaacgcgccaagcaggacgcatcctccatccgtaccacggctcaggctcaggccgaaacgctgatcaacaacgccaagctggatgcccagcatattgttgacgacgccaatgccaaggccgcctcgattctgacgaacgccaacaatcaggccgaatcagtgaccacctccgccaacgaggacgccgcacaactgcgctccgaaaccgccaagaccatcaccgaacagcgtcagaccgtcgagcttgagctcagcaacgcgcgcgaagagcacaccaagaagatggcttccgaacgctccacccaagagcgcgaaatcgccgatatgaaggcggaagctacccagcaggtcgccgcaatgcgcaaaagcgccaatgaggagatcaccaagcttaagtccgattccaacgatcagattgaggcggcgctcgccgaggccaacaagaagctcgccgacgtgcgcgagcaagtgtccaagatgatgaccgaagcccagcgcaaggccagcgaaatcattgatgcggccaagaccaagggtcaggaaatcactgatgaggccgaggtcaagcgcaccagcacgatgagccaggtcaacgccgaagtcgagcagatccgtcacgacatcgccgctcagcaggatgaggccacgaagaaggtcaacgaactcctgcagcacctcgaagagcgtcgtgtggcggccaagcgggaagccgatgagttggtcggccaggccaagaacactcgcgaccaagccgattcatatgccgcgtccaagcgcgaggaggcggacatccaggccgccgcaatcgtgcataaggcgggcgaggaagccgatgcgcagatcgaggagcgtcgtgccgccgcccaaagcgagcttgacggtctgtccaagcgcatcgccgatctgcaggaacgcgagtccgtcatcacccagcgtgtttcggaactgcgttctatgttctcgcaggcgttctccggattcgctttcggtggtaatgcggcggcctctggtcagagtcaggaagccgctgccgtggcgtcattgccggtggtcgcgcccgtcccggaagtccagcctgtacacaacgaggccgatgatcagccgggtgagttgagcggaaacgagtcggctgccgacgatcacaatgagacagatgcggcaccggctgattcggctgattcagctgcgcagaatgagcagtccgaatcgtctgagccgtccgagcaccagacacagggcgaaccggaggccccgactcaggagaatccagccgtatctgagcagaacggcgaatgacaggccttcgattagactactagcggtaagaattacggcacctgcgctttcgagccaggtgccgtattcgtttggatctgcgccacaagcgcaccatcacagaaggagtatgacatgagtgaattgacgcctctgaccggcgaagcattgaataccctgcgcggcgatttcgcacagagcggcaccaaccgtctggccatgaacgcggtgaccgccgccggcatcgacaaggtggctcgcaattatgaccgcgctcgtctgatgcagcgccgtttctccaccatcgttgacaatggcgaagccacccatcaggatcgctccggccgctgctggctgttcagctccctgaacgtggcccgtttcgtggccaagaagaacatgaacctgaaggagttcgagttctcccagaactacgcgatgtactacgacaagctggagcgcgtcaactacttccttaaggatgtggccgctctggtggctgccggagagccttccgactcccgcctgatgcagcacctgctcgccgacgtgatgggcgatggcggccagtggaccatggccatgaacgtgtacaagaagtacggcgctgtgcccaaggacctgttcccggagaccgaatcctccaagaacaccggtgaaatgaacacccagctgcgccacatgctgcacaccgccgtggcgcacatgtacgccgctgacggcgatgcctccaaggtcgaggcgattattgccgacgccactgctgccggccaccgtattctgaccatccacctgggcgagccgccggtctccttcgactgggaatggaccgacaaggatggcgaattccaccgcgacggcgagattacgccggttgagttctggaagaagtacgtgggtccggctggtcttgaggactacgtgtgcctggtggatgatccgcgcaccgagcacgccaagggcaagaagatcggcatcgagcacctcggcaatgtggctggcggcgacgccaccgagtacctcaacgtgccaaaccagttcatgaaggactgtgtcaagcagattctcgttgagcagggcatcccggtatggttcggtgccgactgccacccgttcatggaccgtgagaacggcgcttgggccaccgacctgttcgagtacggccgcgtgtacgacgtggacttcgatttggac

SEQ ID NO: 757 - DNA, 15406 bp, Unknown
  R14_18m  MAG No. k141_633
gaagactgtttccgcggcatcatcgatagaaatccccaaggtgtgattatgcagcagatgggcggtctgaccactcaagcgaagtctttgttgaaatcgcgcagtattcccgtggtcatcatcgacccaatcgataccgtcgattcggatgtgatgagcgtgtccatcgataactggaccgcaggataccaggccggcaaacacctgctgtcgctcggccatcgacgcatcgccgttatccgggggccggcgaacctacagaccagcatcgcgcgctatagcggattcaccgccgctctgcaacaggccggggtggatctgccggagtcctatatcgaacagggcgactacttccccgccgaaacaagctatgaagcagcctgccggctgctggaactcaccgaccgacccaccgcgattttttgctgcaacgacttatctgcagtaagcacgtatcgtgccgcacgagagcataagatcgcgttgccaaagcaattgtccgtcatggggttcgacgacattttccccgccggccaactcatgccctccctgaccagcgtgcatcagccgttcagcgaaatagcccaacgcgccgtgcagatgatcatcgacagccgcaagggcaatcagggtgatatgcacgtcatcctccccaccagtgtcgtcacccgggaaagtaccgtaccgcctcaatcatcggcccgataatcggccagattcaagctggcggccacccgattggacgcgaacgcacccaccgaaaccagcgcatagcacagcgcaagcccgccgaagaagctggccagcgtggccggttcggtcatcgaagcggcgaacagaggggccataagcagcatggaacagccgccggccacgatcaccacgatgttgagcggggtgagtacctcgatgaatcgcgcacggttcaaggtcttgacatcagtgccctccaacaccagcatgcgatattcgccggcctgatcgtacacgctgccggcctgcatcacaccggagctgaccgcggcaagcacagcggcgaacactagcgtcaggatgccgccggtgccgatgtcgcgaatgaacacggtggacgggtcgttggcgtcaccgaccacggcggccgagccaaagaatccgcagatcgaggtgatgccggcgatgaacacggccagtgcaatgccggacacattgcgccaggcgcgcttcggattgtcgagaatacggcgcatggcaatcatcgtggccgcatccttggggcgcttggccttggccttggcgcgagcggtgaccacccaggagcccacgaggttcaccagcgcgaagcacagcagcatgaaaccgatgatcacgccgtacatcactacttcaccggcctgagccagcaccatcggattcttgaacagaagaacggcaatcaccatgatgacggcgaacaccaccacacgccagccggacggcagcgtagtcgcaacgcgtgaagtgacgccgagtggcgtgatggccacgcgccgaagcgtgaccagcgaagagatcagcgccaacacggtcacgccaacaagcgtaatgatcaaggcaatcggccccacccacagttgctcgaacgtaaacgtctgattctggaaatgcagcaacatgattagggggatcaacacgcagtaccccgcgatgccaatcagcgcccccaccaaggcctgcccagccgcatcaagcgccgtaaggcgaataacttgccccgtggtcgcgcctgccaagcgcagggatgcgagccgagcgtcacgacgggacgcagccaatcgcgcggcggaaccggcaagcgccacgaacggcacaatcagcagcaggcaggcaaagaacgccagcacgacgtatgccgtggcgtattgatccaggctgtggggattggcgatacgctgcttccagatttccgctgttccgggtttgcaagcgtcgagattgattgcgcatccaatggtgtggtcggcggaggcgcgccacatgaacccatgcacgccgcccaaaacggtgagaaagatagtggtggctgcggcaaaagcaatgatggccaacaccgaagtatgacccgcactgccacgcgagccggggcgatggaacaatcgccacaatgcgaaagcgctcatcgtacgcctcccagctggccgtcctgcatggtcacggtgcgcgagcagaacgaagcgacgttggggtcgtgggtgacgacgaccacggcggaaccgttgtcccgcgcggcggccatgagaatgcccatgacctcgcggccggtggcttggtcgagcgcgccggtcggctcgtcggcgaagaccacggcaggtttgacggcgagcgcacgggcgatggcgatgcgctgcatctgtccgccgctcatctcccccggccggtgcgtggcgagcgcgcgcaatcccatgcgttccagccacaggatcgccgtgtcggtggcggtgcggtagggcatgccgtcgagcatcatcggcagggcgatgttttcgacggccggaagttcgggcagcagttggccggattggaagacgaatccgaagacattacgacgcagtttggtgcggtcggcgtcgctcatatggctcaggtcagtgccacggaagacgaccgtgccggcagtcggcttgataatgccggccaacgcgtgaagcaaagtggatttgccggagccggacgggcccatcacggctactgtctcaccctcccggagcgtgaagttcacgtggttcagggcgagcgtgtgcatggtcggcatggcgaagccgggctgggctggctgggatggctggccggcctgaatggcacccggtccggccgcagcgggattcgccgacgcataaccggctcccgtgccggctggcatcacgccggtgacgccgtgccctgcctgtgcgcgggccatgctggcggtgtagtccatgaccaggtcgtgcgcctcgatgaccggggcccactgctgggtgtgcgatgccggctgctggaactgttggggttgctgagactgctgaggctgagccgccggtcccgacgccggctgaggctgctgcaattgcgatgctgctgtgttcatactcccgagcgtacggagcgaacgcccagccgaccatcgggctgcggtatgaacctttctggatcaccggcccgctcctcatccgcaaggattagagatacgcagtcgacgcgacaatccatatatcagatgttcattgctcgagaagacgaggaacagtggaagaccggttcggaagctggaaccacaacagaccaagcaaaggagcccacatggccatcgcaatcgacatcccgcacacaccaatcatgtccgtacaaaagtcgtacaacaggagtatgactacagagaataacaagaacagtcgttttgaaatgagactcacctaagagcaacgttccagaatcgaccaagcggccgagtccaaaggcatgacttcgttgcaatgggcattatcgaatctgctcgccgccgcagatcgggacatccatgaagctcatatcattcggctcaacagtaaagcgtggaatgatttcaccgcagcattaaacgaacctatgggcccacgtctgaatgaattgttggagcgtgatcccatatggacgtgaccaacttcactgagcctcggcacctgactgcgagcgaggatatttctggtttcgactgtggcctgccattggtcaatgattggctggtttccacacactaagtgcatacagcattgagcattcggaagcccggttggctgaggcgaaatagtccgaaccccattcccgtaattttgctaggcatgatgggcgtggatatcagatttcaaaccatgcacgtcgacagtcagttactccgagatgcggtacttcattctctgaacgatatgattttcggcatatccctgaatcatctagaatgtttactccgctcaatgtccacaatcaccaatgattaatggctggagaccgctatttgacgccgaccattgtctgaatcgcattcagacacaacactcctcattgcgcgcagaccagcgagttccgccgagtcggcgatgtgtctcttcggcggttgatttaggattttccgcatgcgacagctgaccacaccgctaaaaatgccattttcgcactgacttggggcggaggtcgtggcgaaacgcacgagggaacgtgtgtcatccgatatggtcatgcccgccaggcattgaagcgtcctgtctatgcgcggttgatgtcccggtggcggggtcaatcgatcgacatacgaaccgggacagattcggctgtcccggttcgggatctcggcctcttttggcgaaccgggacaggcccttccatgaacacccgatatatgcaaatccaaaaccccggaattccgccattccccgacggcgaccatcgcacgatagggcgtcaggtgaatgagattctgtcccggttgcccaaaaagaggcaaaatgacgaaccgggacagcgaaatctgtcccggttgtcccaaaagagacgaaatgacgaaccgggacagcagaatccgtcccggtccacacgcggttcacacgcattacccaggtaaactcatcggcaaaacattggcccagccaacaccactaccgatgtccagcacaggccagctcgtccaggcgggcggcgaagcggggccagtcggtcttcatagcggtgaggagcttgcggttgggcacgtcgtcaatcgggacccagcagatttccatgctttcgtcgtcgtttgccttgggctcgacggtgtggccgggcttttcaaaggcaaacacggtggtgtaggaccacgggccatggtcctcgcggtaggagccgaccacctcgatgtcttcgggggtgatgttggcttcctcgtagctttcgcgcagcgcgccttcgatggacgattcgccgtccgcagtggcaccgccggggataccccacgtgccaccttcggcgctccacgcggcacggtgctgcatgaccacgtgagtcaccttgccgctcgccgggtcgcggcgagccagcagaatgccggacgcaccgttggtgccccaatgcttgcggccgcaggcgcagtccacccagccatcgccgggctgatgcacgttttcgaccggcggcagaatgccagcgtgctggttgcccgaggccttgctttccggctccagttcgccacggccgacattccacaggtcggtccacgtgatgcccagttcgccggccagatgccgggccagcggcaggctgaggccgatgataccgtgcggatcgccctcgatgctgtcgatgaacgcgccgccgaagccttccagcgtgaacgatccggcgacttccagcggctcgccggtgacgatgtaccgttcgatgtcgtcatcggtgaattcgccgaaatggactttggcatggcttgcgccgcgcacggtacgtccggtcgcgaaatcgatcaggcagtggccggtccagagttcaccggtcgcgccgctcatgcgcttcagtcgttcgcgggccacggcttcgctgtgcggcttgccgtagcattcgccgtccaggaggaacatcgaatcacagccgagaatcagcgggccgaccgtcgcctcggtcagtcccggctgtccggcaatagcggtggcgatgggttcggtgatggtcggcatgtcgatgccggagaagtcgcgcgtggtggcgacttccgccttggaatagtcgatgggccggccagcggcggctttgcgcaggtcttcgacgacggcttcgcgttccgaatccttgatttccttggccttgagcgggtaggcaatcacgcgatcgccggttgcggcggcggcagtattggccacatcgcgatacgcacggtgaacggcctcggccttggctgcggcaagaatcatcacacgctgcttgatgctcaaatcgtcgacggtgacaccttcctcacgggcggccgcttccagcgcagcaggctcatccacgtgcgagacgcgaattgtggggcagatacccgccgaatacagcacgtcacggcgaggcttggacttggaagcaagaattagcggaatggacatgacttaagtccttatgctcccgctggcgggagctgtcgaacgaagtgagactgagggtggtctctgccggtatggcggaccactctcagaccgcctgcggcggccagctcccgccagcgggagccttctcctcgacttagcgacgctcgatttcgacgccggcggtgttgatgggcaggtgaagcacacgccagtggccggaagcaagctgctccgatgcgatctggtcgatggcttcgcgggcgttgccgtagtgcagcacgagcacgcaggggccggcaccggagacggcggcggcatagcccttggagcggaagagcgcaatgagctcggtggacggcggcatcagggtaccgcgatacggctggtgcaacttgtcctgcgtggcggtgaacagtagcgcgttggactgggcctgagcggccgcaagctcgtcagcgaacggcgattcacgggttccgccagcgcaagcgcacgtatcggcatcctgagccggggcagcggcgacgccggacttgccctgctgggcggcctgggccagcaccatgggattcatcgcagcgggcagcagacccacgcgagacacgttgtagacggcgtccttgtatggcagttccctaggcagcgcctgacgggccttctcagtggacagctcatagtcgggcacgaacacggcggcggtgatggacgggtccaccgggtagttgacggcgtggaatccgccgtgcagcggttcaccaccaggaacggcgaccgagccgacgccttccgcggtttcgaagtcccaagagacggtcaggccaccgaacacagccggggccacattgtccgggtggccttcgatctgggcggccatatcgaagatggccggacggttgaggtcaccggtctgggcgaaggccgcggcggcggcgatgccggccacaatggcctcggcggaagagcccatgccacgagcctgagggatgttgttggtcgcttccagcgtgaagccgagtcggccgaggccgaacgtggcacaggcacggcggaaggtggagaccacgaggtgggtttcgtcgcgtgggagggtgtcggcaccctcgccgtggatgatcacgtgggcaatgccgtcgttcgggtcgtcgttgagcgtgaaagtgagctcgtcatggtagtcgagcgccagacccacggtatcgaagccggagccgaggttggcggacgtggcgggcacgcgcacgtgaacgctattgcagattgggttcatggttgttccttaaaaaggagctccccttgtcaggggagcttgggtattcagctttcaactcacgggcagccgttcgaccgcctcatcagagggagcctagatggtgtcagtccagcacgcgcaggatggacgggtcaccggtgacgaagtcgagcgcctgcacggccttgacggtgttgcgcagggtttcctcgtcggtcaggtgggtcacgatgcgcaactgctgaatctcgccgtcgtagccggggtcggtcatggtgggcttcagatcctggttcacaccgttgatggagacaccgttcttggcgaactcggcggcgatggcggccagcacgcccggcttgtcgtggatcaggaagcgcacggcgaatgcagccttggaggcggtaatcggagccttcggcagattcttgtacagcgggatggacgggccggtgcagccagcagcaatgtggcgggcttcggtcaccacgtcgcccacgacggcggaggcggtcggagcgccgccggcaccacggccgtagaacatgaggtcgtcggcggcctcggccttgacgaacacggcgttgaaggagccgtgcacggaggccagcgggtggttctcgtcgatcagggccgggtagacgcgggcggagacgccggcctcgccgttctcgaccacggcgagcagcttgatgaccttgtgctcggcggtggcggcggcgatgtcgtcggcggtgatcttggtgatgccttcgacggacacgtcgtcgatggtcacggaggtgtggaagccgagggtggccatgatggcggccttgttggcagcatcgtagccttcgatgtcgccggtcgggtcggcttcggcgtagcccttggcctgggcgtccttgagcacgtcgtcgaactggagacccttggtggtcatctcgtcgagaatgtagttggtggtgccgttgacgatgccaagcatgttggtcaccttgtcgccgaccagggactcgcgcagcgggcgcaggaacggaatcgcaccgcctacagcggcctcgaagtagatgtcgacgcccttggcctcggcggcggagtagatctccgggccgtacttggccagcagcgccttgttggcggtgaccacggaagcaccggattcgatggcggcaagcacgaacttgcgggccacggtggtgccgccgatgagctcgatgacgatgtccgagttggtggccacgctcaaagtatcggtggtgacgatggactggtcgatccacgggaacttctcggtttccttcgggtcgaggcaggcgacgccggtcagttcgatcgggcggccgatacgagcggacagttcgtccttctgctcgacaatcaggcgggcggtctgggagccgacggtgccggcaccaagcaggcctacgcgaatcggggtttcgctgttgtgagccaattcagggtccttccaaaaagttttctatatcccacgcctattttacggattatttccgacagcagaccgaaagtactcatcaagctgacggcccttttcgtattatgacggttttggccgcacattacagactgtcaggcgctcacctctgcacgctgattactcgctgacgtcgaggttgagtaggtcgtctacggtctggcggcggagcatgacgtgcgcgccggactcgctgacagcaaccaccgccggaatcagcgcctggttgtagttgctggccatggtgcggccgtatgcgccggtaaccggcacggcgagaatgtcaccgcgcttcaaatcggcgggcaactgcacctcgtgaaccacaatgtcgccggattcgcagtgcatgccacacacgcgggcaagcatcgtttcagcggaaccggtgcgattcgccagacgcgcggtgtagtcggcaccgtagagtgccgggcgaatgttgtcggacatgccgccatccacggacacgtacacgcgctcggcaatcgggttgccggcactgtctttggcatcggacaagtgcacgtgcttgatggtgcccacgcggtacagggttacgccggcgggtgccacgatgtaacggcccggctcgaagctgatggctggcgcgggcatgccgagcgcacggttggtgctgttgaccgcatccgccaagcgagtgagttccacgtcaatgtccattgaatcttcgccatcggtgtaggccacggagtagccgccgccgaggtcgatttcgggcaggatgtaggcgtcggtggcccacagggtcttgcgcagcagcatcatgcgcttggccgcgtgaatgaaggcgtccgcatcgtggatgttggagccgatgtgcgagtgggctccgaccagttcgagtacgtcctggttggcgaggatggtcttgagcacggcgatggatggaccgtccgcaatggcttccatcgcggcggccagcgccttgtctgtgtcggagacttcctcgtggctcaggtcgtacgggtacttgacgtcgtagtgcagctcgcgctctgatttctcggtcttttccgcgccattttccggggaatgcgtcgcagagatacgcgcgttggtagcggcaggcgtcacgtctttgagggcgttcagcacgtcgagcacggcggcgtcggccccggcggccagcagcggcacgccgaacttctggtcctcgtgagcagtggagatgtactcgtggccgccggcgtggacaccgacggtgacgcgcagcatcacacgggcgcgtttgccgagcctgcgggcgatggcggcgacgcgctccggctcgtcgggctcgtcgatcacgattttggcgaagccctgttcgatggccagcgcgatttcctcatcggacttgttgttgccgtgcagtaccagacgacgtccgggaacgccagcggcgagggcgattttcatctcgcccatcgtgcaggtgtccacgaacatgccggcctcggtgaccaatcgcacgatttctttggacaggaacgccttaccggcaaagctcacgtgcgtagtggatgtgttgaatgcttcggcggcagcgcgcacgaagtgcctggcacgtgcgactacttcatcagtgtcgatgagatagagcggcgagccgaactcgtcaagcagcgattcggcggtacgaccgtggaatgtaatggcaccgtcggcattcacagccgtagcggccggccaaattggagaaatgggcataatcacatcttttcgggggcggtgacgccgaggaggtcgaggccgttggcgatgacctgctggacggcgtcattgagcttcaggcgggcggcggcacgggccggctccggattcttggcgatctccaaggccttgcgagcctcatcgtcgccacgggtttccggatcggtcagggccatcggcaccacgcgctccacgttgtaccacttgtgataggtggcggccagctcttcgagataacgggccaccttgtgcggctggcggtcgtcggccgcagtggcgagcacgctcgggaactgggcgagggcggcgagcacttcgccgtcggcctcggtgtcgagcagggccaggtcggcaccctcgtagctgatgccggcggcggctgcgttgcggtccacgttcttggagcgggcgtgcgcgtactgcacgtagtacaccgggttgtcgttggtgtgcgaggcgagcagggccaggtcgatgtcgaagttctggttgtagtcggagcgggccagcgagtagcgggcggcgtccacgccgaccacggagaccagatcgtcgatggtcacgacgttgccggcgcgcttggacatgcgcacgggcttgccgtccttcatcacgttgaccagctggccgatgagaatctgcatgttcttgccgggctcgtcgccgaaggccgcgcacatggccatcatgcggccgatgtagccgtggtggtcggcgccaagcatgtagatggccacgtcagccgggttttcggcgcgatgtcgcttgtcccagtagtaggcgatgtcggcggcgaagtaggcgaactcaccattggacttgatgatcacacggtccttgtcgtcgccgtgcttggtggattcaaaccaagtggcgccgtccttgtcgaagatgtcgccgcgggacttgagctcttcgatggcgtcgtcgaccttgccgtcggcgtacaggctgttctcatggaaccagacgtcgaagttcacgcggaagtccttcatggacttctgaatctcatcgaacatcatcggcacagcgcgcttgcggaattcctcgcgcacttcggtgtcggcctcgccgagcggttcaccgtcgtcgttgaggccttgatcttggtgggccagtgcggtcaggtccacgccgtcggactcggcttcggcctgaacacgggcggcgatctcgttgatgtaggcacccttgtagccgtcgcacggggtttcggtctggtaaccggcctcgccgaggttgttggcctcagcccaagcggcgaccagcgacttggcgaaacggttgatctgctcgccgtggtcgttgaaataatattcgcgcaccaccttggcaccgttggcctcgagcacgcgggccatggcgtcgccgacggcagcccaacgagtgccgccgatgtgaatcggaccggtggggttggcggagacgaactcgagattcagggtctggccgcccagatgggcgttgcggccgtattcgttgaccttgttgagatgcttgtcggtgtcggtcacggcaccggcggcgagtacggtgtccaccacggcggcggccgaggcggagtcgagcgtgatgttgatgaagccggggcctgccacctcgaccttggcgatgccgtcggcttcggcgagcgcggcggcgaacggctcggccagatcgcgcggcttcatgccggccttcttggccagctgcatggcgatgttggaggcccagtcgccatgcgcgcggtccttcgggcgcatcacggcgagcttgtcgacgggcggaatcagctcgtcggtcaacgcgccggcctggccggcggcgacgaggttgtgggcaatgctggaaatcagttcacttaaggcttcagggctcattcttctaaggataccggcgatggcgacaccatgccgcgtccggtcattgtcggcggccataatggaacgacgcgcgaaagaggtgcatatggccgggctcaacccccaatcattggtcacgttgtggcagatcgaacagtatggttcgttctccgccacggccaaggccacgggttggtcgcagccggccatcagccagcagatcaaaaagctggaggcacagtgcggttcgactctggtgcaacgcacctcgcatggtgtggaactcaccgccaccggttcgatgctcgcccgccacggcgaggccatcgccgatcggctggagcgggcggcccgtgaggtcgaggattatcggcatcatcggtttgctcacctgcatttggtggccccaccgtcaatctgctctactatcgcggcccgtaccgtggtcaagctcagtatgttcacggacatcgagctgagcctgattcagatggagccgccggaggcgatcggtctgatttcccaaggcaaggccgatgccgccgccgtgttccggtacagcagcatcccgaacttcctgcacatcggcgacgatctgaccttccagtcgctgggttacgatccgatgcgattgttggtccgccgctccagcgacatcgccaaacgattcgaggagaccggcgaacccgtgccgctgtccgccgccaaagacgagcattggatcgccggctgccccacctgccgcgcaaatttggtgaaactggccacccgtgccggattcaagccggatatccgccactgcacggatgattactgggccacgcagaacctggtcgaggttggcatgggcgtctcgctggtgccggcgctcgatacacatatcaatctgcaaggcgatctggtggcctgtcccatcgccgacgattttgcggcgcgcgaggtcggcatcgtgactcgtgccggcgaccatcgtcccgcgctcggttcattgctcgaagagctcgagcgcacggcactcaaatatttgagtgccaagtagtcggacagcgataagcaagcttgcgaacgccatcacgatttcggggagccagaccgttgagcggcccttctgcaccgggaacaatggcatgttatgagcatgaacaacattccccagtcaacgactgtgagcaacgcaaccgccggcgcctcttgctttgatgccaatcacatcgacgtgacgaccatcgaagatctggagcaggtcggttcggataaatggacccgttaccccggctgcatcggcgcattcatcgccgagatggattacggtctggcgccgtgcgtggccgaagccatcgaagaggccaccgaacgtggcgcgctcggctacattcccgacccgtggaagaaggaggtcgcccgctcgtgcgccgcatggcagcgtcgatacggctgggatgtggatccgacgtgcatccgtccggtgccggacgtgctggaggcgttcgaagtgttcctgcgcgagatcgtgcgcgccggcaactccatcgtggtgccgactccggcctatatgccgttcctgagcgtgccgcgcctgtatggcgtggaggttcttgagattccgatgctgtgcgagggcgccggcgagagcagcgggcgcaatgatgaatggctgttcgatttcgacgccattgagcaggcgttcgcgaacggctgccatgccttcgtgctgtgcaacccgcacaacccgatcggcaaggtattgacgcgcgaagaaatgctgcgattgtccgacctggccgccaagtacgacgtgcgtatattctccgatgagattcacgcgccgttcgtctaccaaggccacacgcatgtgccattcgcctcaatcaaccggcagacggccatgcaggctttcacctccacttcagcctcgaagtcgttcaatattcccggcaccaagtgcgcgcaggtgattctcaccaatccggacgatctggagctatggatgaggaacgcggaatggtccgagcaccagacggccaccatcggtgccatagccaccactgcggcctatgacggcggcgcggcatggttcgagggcgtgatggcatatatcgagcgcaatatcgcgctggtcaacgagcagatgcgcacgagattcgccaaggtgcgctatgtggagccgcagggcacgtatatcgcgtggctggatttctcgtcactgggcatcgatgacccggccgactatttcttcaagaaagccaatgtggcgttgacggacggccgcgaatgcggcgaggtcgggcatggatgcgtacgcatgaacttcgccatgccctacccgctactggaggaatgcttcgaccgcatggccgccgcacttgaggcggacgggctgttgtaaaaaattgtggctcccctcagagaggggagccgaggaacggccgaattaatcgaagtcggcacccaacgcttcgagtttgccgcggaagtcggcgtagcctcggtcgatcaggctgatgccgtgcacgtccgaggggcctgacgcggccaaggccgcgatcagatggctgaacccaccacgcaggtccggcacgtcgatgtcgcgtccggtcagcggggtcggtccgaagatcacggcggaatgcttgtagttgcgctgccggaaacggcacggcagcgagcccaggcactcgcggtacaactggatggtggcacccatctcgaccagcggcttggtgaagccgaaacggttctcgtacacggtctcgtgcactatcgacaggccgttggcctgggtcagggccaccacgagcggctgctgccagtcggtcatgaacccgggatgcacgtccgtctcgatcgccacgggcttcaagtccccgcccggatgccagaaacgaatgcccttgtccgtcacctcgaatttgccgcccaccttgcggaacacgttgaggaacgtgatcatctccggctgggtggcacccttgacgaaaatgtcaccgtgcgtggcgagcgcggcggacgcccaggacgccgcctcgatgcgatccgtcagcgacgtgtgcgtgta

SEQ ID NO: 758 - DNA, 23282 bp, Unknown
  R14_18m  MAG No. k141_705
cctgaggaaaggcggtatacgctccgccaatcagtgctggttgttgagacggtggtacatctcggacagctccagttccttctcgaactggcgagcggtggtgttctcgtcgatgacggcgagctcaacaccggcgatgcgggcgaagtcttcccaagcctcacgaccgacggaggtggtcatgcaggtgtggtgagaaccaccggcggtgatccagcactcaacggcggtcttcaggctcggcttcggctcccagacggcgcgggcgcacggaagctccttgagggagccctgcggctcaacgacgtcgacgacgtccatgagcaggcggaagcgttcgcgaacgtcggacatggagaccacgacggcgtccttggtgggcttgccggagaagaccaggcggaccgggtcggccttgccgccgatgcccagcgggtggatctccagcttcggcttggcgatggtgccgatggacggggaaacctcgagcatgtgggagcccatgtcgagctcgtcgccctcggtgaagttgtaggagtagtcctccatgagggaggcgccaccctcaaggccgtagcccatgacggcgccgatgcgcacgaggacggcggtcttccagtcgccttcagcggaaaagccccagccgtactcggacgggaagcgctgtgggccaacgcccggcagctgtggcagagcgccgaggtcctcgaaattgtcgacgccggcggtgcagccgttggcgcgcatcatgttgaccatcgcggcctcttccttggcggcgatgaacagggagtcgtacttggcgtccagcagagccgggtcgacgtcgtacttggccttgtagtcctcgatgatctccttgacctggtcgtccttgacggcgtcgtacgcagcgacgagctcgttgacggcccaagtgttgatggaggcgccgaacacgcgctcggcctcggtcttgtcgccctcggtgacggcgacgttacgcatgttgtcgccccagcgcatgaccttcatgttgttggaggcatcccagccggcgcaggcgcgggcccaggtgccgaccttctcgactacctcaggatcggtgtagtggccgacgacaaccttgcgcttgatgccgaggcgggagacgatgtaaccgaactcacggtcgccgtgggcggcctggttcaggttcatgaagtccatgtcgatggtctcccacgggatttccttgtggtgctgggtggccagctgcagcagcggcttggtcagcacttcgaggcctcgaatccacatcttggccggggagaaggtgtgacaccaggtgatgacgccgatgacgttcgggttggcggaagcctcgaccatgaactccttgacaccgtcggaggacttcagggtgggcttgaggacgatcttggccggaatcttgccggtgttgttcaggtagtcgaccatttcagcggagtgaatggcgacctggcgcagggcttcctcgccgtacaggtcctgcgaaccaacgccgaaccagatttccttgccctcgaaggggttttccataaccatagggttacttcctttacttctttgtttatgggggtttgtttaagtttcattcgccgaccgaggctcccctcagagaggggagccaagacaccaccgtgctggcggagtcagcgctgatttgatgtgtgtgcccgcaaggcgcggaaggcgaaggcgtacgaaggtacgtcgagccttccgcaacgcggcggacactccatcaaatcagtgctggccgtagacgttctggtagcggtcgttgagcttatcgatgtcggcctggtcgatctcgatgatgtcaccgagctgacgggcggcccacatggtgtgagcgacttcctcggtcatggcagcggccttgacggcgccttcagcatccttgccgatggtgaaggggccatggttctgcatgaggacggccggggacttcgggtacttcttgagggtctcgacgacacccttgccgatcgcctccgagccgatcagacggaacgggccgaccggcaccgggccgccgaactcgtcgcccatcatcgtcaggccgcacgggatgttctgaccagtggcagcccaagcggtggcgtaggtggaatgggtgtgcacgacaccgtagacgtcgggcatgttgcggtagatgtaggcgtgggaagcggtgtccgaggacggggcttcggcaccgtcgaccacgttgccgtcaaggtcgcacacgaccatggaggacggggtcaggtactcgtagcgcaggccggagggcttgatgacgaacaggtcggcggtgtgcagacgctgggaaacgttgcccgcggtccacacgaccaggttccacttgatcagctgctggtgcaggttggagacgacctcacgaacctgcttgacctcggcgcgaacctcggggccgtaatcagccaaagttgccattattggttttcctttccactgtgatggatggacgttttttcaaaatctcaaggacctctctcaatagagggaggtcagaaaggcttacttatcttcgaggttgatggtttcgatggcagcgtgctcgatgggcaggcccttggtgaagcgggcgaagaagtcctcgaaaccaaccacatcggaagccaccggcttctcagtggtggactgggcgtccttgaacacgaaaccatcaaggaagtcagcgaggttgctgtgatcctcgttggtgttccacaggtagttggcgagcacggccataccccaggcaccaccttcggcggcggtggacatgaccttgatcggggtgttgaaggcagcggcgagaatcttctgagccaccttcggagtggtgaagatgccgccgtggcccacgagagagtcgacctgcacgtgctcctgcttggtcatcacgtccatgccgatcttgaccggggagaacgcggagaacagctgggcgcgcatgaagttgccgagggtcatgttggcttcggggctgcgggcgaacagcgggcggccttcaggcagaccggccaggaattcgccggaacggaacggatagttcagcaggccgccgcagttggcgtccacgtcgtcggcgatggccgcgcggaacaaggtgccgtacagcataccggcatcaaccgactggccgatggccttggcgaactggccgaacaggccgacccaagcgttgaggtcggaggtgaagttgttggcgtggctcataccggccagatcgccggccggggtggtgaccaagtcaacctcagggtggagggccttgagcttgtgctccagaaccaccatggcgaagatggaggtgccggcggagacgttaccagtgcgtacgcgcacggagttggtggctaccatgccagtaccggcgtcgccctcaggcggggcgagcacgatgccgggattcagggcaccggacggatcgagcagcttggcgccttcctcggtcagctcgccagccggagtgccggccacgagcggctcaggaagcaggttctccagcttccacggctgggctgcgacctcaggcagagcgtcgaacttctcgatgaatgcggtttcgtaagtgtgagtggtcgggtcaatcgggaacatgccggaggcatcgcccacaccgaggaccttctcaccggtgagcttccagtgcacgtaaccggcgagtgtggtgaagtaagccacctcggagacgtgctcttccttgttgagcacggcctggtacaggtgagcgatggaccaacgctcggggatgttgtactggaacagctcggagagcttcttgtgagcttcggaggtgttggtgttctgccaggtgcggaacggcaccagcagttcgccggcctcgtcgaatgcgaggtaaccgtgcatcatggcggagaagccgatgtggccgacgtgcgtgagcttctcgccataggcggtctcgacgttgttggccatggaggcgtaagcggactgcaaaccgccccagatctcctcggtggtgtagctccacagaccatcctccaagtgggaggcccagctgtagtcgccggaggcgatggtctggaagttgtcgtcgatgaggacggccttgatgcgggtggagccgaattcgatgcccagcgtggtcttgccagcgcgaatcttctcggcgatgtgggcggcctgctcggccgcgttgtcggttgctgccatatctttcctttgccttggagcgccggcgttgttatccccttccttggggaggatgttagcgctcacaatttcaaaaaaacattgtaccgataacctgcattcgacacaacttataccgtgtcacgcatcataacggtttgataacagcgccaatttaccgccggggagccggccccaaggaccgccgagcacgcacctcggcgggaatcagccccacgccgtgctgggtggtcaggaaggtcggctcgccgccctcccccagcaaacgcagcgtctcgcgcatggcggccacgccaagcccctcgaaatcgggatgcacggtggtcagcggtgggtacatgttatccacgccagacatgtcgtcgaatccgaccacgctgatgtcttgcggaatccgaagcccatgctcatgcaacgcgcgcatgacgccgacggcctgattgtcgttcgcggcgacgaccgcagtgggtaacgccatgccccgacgcccatactcatcaatgagatgattcatgtgcgcatatgcctcagaggcatcccacgtatggcagcgcacgatctgtgaatcgatggatcgggaggcggcgagcttgcgccacgcatccagtcgggtgtgggcgtcgcgccattcgttgggaccggcaaaatacagagccgatttgtgcccgtattcgcccagcaaggccaccactttggccattgcaccccactggtcgataccgaccagtgcagtgcgacgcttgttttcggtggagataaggcccaatccctcacgcacggtcatttggccgtgggtggcggtgacgatgacgcgtggctgagtgactcgcgcacggcaggcggcggcgaacatcacgtcggtcggggtcaggaagatgaaggcgtcgacgttctgctcgttgaaggtgtcgcacaggttgtcgaattcggactgcatgcacaaggcctcgtggaccatcatcacgctcatgaacagaccgtgttcgcgggccatggattcgatggatgagatggaggaaatcgggccgaagaatttgaggcctccggcgatcagccctatggtgcgcgaacggcgggaagccagtgcgcgcgcggagttggaggggcggtagccgagttggtcaatggcggcctggactcgcgcacgggtggcgtcggaaacgtccggcgagtcattgatcacacgggagacggtttgatggctgactccggcgagcttggccacttcgaacatggatggacgtttgcttggcttgcggccggtcaccatgctacctaacctccccgctggcggccggcatccgtgcacggccaggcttgtaccttaatcaatactgactttagcgcgtccacaacagttttgcgttagcgctcacactgtcgtgtcgcacgcggctcaggtcaggtgccatgagacacgatggagcggagtcggcccgtgttcggcgatggcggcacggtgtgcggcggaaccatagcccttgttatgagcccattcgtaggcggcgtaacgtgggttgctttgcgcgaggtcgaccatcagccggtctcgggtcactttggcgatgaccgccgcggtggcgacggtggcgcaatgctggtcgcctttgactttggtcgttatatcggctggaatcggcacgtccggcgcgtcgaacgtgttgagcgccttggtgatgtaatcgctcggcccgtcgagaattccggcgactttgggcagggcgcgaacgctttccccacaatttccaatggattcccctacggagtctcccggacgaccttccacaatctcccccgcagccttttttgccgtcaatccccctccaagccgtaagccaagttcgcgttcgacttggctgagcgcgcgcagggcggccacgccgagcgcataggtgatgccccattcgtcgatctcggtgttgctggcctggcctacggcgtaggccgcgcaccagtcgcgcagttcgtcgaaaatcgcctcgcgcctatgttcggtgagcattttggagtcggccacgccgtccggcacgccgaggtaggtccgcccggacagttcgacggcatcatcgccatccaacggctccaaatcacgggcccagatggcggcgcacccgaccatcaccgggccggcgagcgcgccgcggccgacttcatcgaatccagtaataaggtcatagccctgggccgcaaggctgcgttccaagtcaagtgtcggggtaatcatgcgcggctcccatcgtctcacaatggttaggattcagacggtccaggttcaaatggttcaggattcagacggcccggaactcaatcagttcaaagactcacacggttcaaaaaagactcaggaattcgagccggaagcgtcagacacgtccttgaagacttcgtggtggtcatcaatcgcaccaagccggtcaagcggccagtatctcgcgattccgactccgaccacatcggagatgggaaccaagccgcgatcgccgtcatcctgatgatagcgggagtcggcggaattggcgcgattgtcgcccatgacgaacacgtggtcctcggtcacggtcaccgagaacgggaaggcgctcgggtccacgccggggcgaatgtaggaggtctcattgatggccacgccgttgatggtcaccggctggcccgcgcccttgcattcgaccacgtcaccgggcaggccgatcagtcgcttgatgaggtacccgccaccgggagcgctgctctgctcctcgttcaaccagttgttgggatctttgaataccacgacgtcgccgcgctgcagatcgaagatcttgggggtgagcttgctggtcaccacgcgatcgccgggcaccatggtgtccatcatcgagcgcgaaggaatctcgtaaaagccgacggcgaaaatgcgaatcagcagcacgataagcacgggaacgccgcaccacaggaaaaagtcgcgtagggtgaagtggtcatcatccatcgatgatgctgccgcggcattcgcgccagcggaagaagcggcgtgcgccgggcgcgccggtgccgggggaaccggggacggggcgatgccgtggtcggcgacttggaacgtacgggaatcgcgggcatcggcctcgtcatcatacgaggtctggttgctctccggattgtcggaaatcgggaattcgccgttatcctgatcgtcctgcataccatctcctcgcgattcatgctgccggatatgaggggtgccggcgcccgtccatcatacgtggaaaatacggaaacagcccgaaaccgaaacggttccgggctgaatttcacggtttattcgcgcacctgcatcatcaggcccacgattgcacccgcgaatcgactcacttagcggagttgtcgcggcgctcggcaatacgagcggccttaccgcgcagagcgcgcaggtagtacagcttggcgcggcgcacacggcccttacgcacgagcttgatggagtcgatggacggggagtgcaccgggaagcgacgctccacaccagtgccgaagctgatcttgcggaccacgaaggtctcacgcacgccagcgcccttacgagcgatcaccacgccggtgaaggtctggatacgggagttgttgccttcctggatcttcacgttcacgtcgacggtgtcgccgggacggaaggccgggatttcctcagccggcttcatgtgcttggcgtcaaaagcctcaacagcgttaaccattgttttccttcagtgctgccgcatatcagccacagatctggggccatccacgcgattgcgcatcacgtgcgttggcctgttctcgttatccctcgggtttgcccttgggaagcctgccgatccgccgaaagtcaggccttgcggccgttcggactggacccatggagacgtgggcttatgcggcggcccacttctcgacacagcaatcgtcaattgtacggattattgcggacagaatggctgcctgatggcattccaacaccaaggcactgcgacgtagttgacagacctgcaggcgggctttatcttgggagcgtcggtaggcgaggctaccgcagggatatgggttgctgccgctaacagtggagacactgcacgcaggtcagcagttcttgtcggatcaaggcatgaactaacgcaattccaccgccctgcgatgctgaagcttgaacgatggctcgaatcggcggattcgaatactttccgcccctcctgctggtcgcatggataccgacgatggtattgatctggcgtttcagcgcacggcttgaaggaggtgagagtccgatggacggtgattattccagtagttccgccgccggcaacagtcatagttgcggtggtgatgaccatgttttcttgtattccgttatccggaagtcgggctctcgcctgtagtgttccttggctccccggataacccttgcataattcgtctttcctatgcatagggaggtcttttcatgaccatgttttcattcaatcgcgtcggcgcgcgtccaaatgcgtcggcccgcaacccttccaccgccgcgtccgaccgccagccattcgccgtgcgcctggcctccgacgtactggtcgcggccggtattctggcgctgttcggtctgatcgcttggattctgccggcgatcggcgaaccgatcggcccgaaaggcgtgccgtcacaagtcagtacgcatctcgccgacctgccgtattacgcgctgcgctcggtgttccgcatgctcgtggcactgttcttctcactggtgttcacgttcatctacggcacggcggccgcgcgctgccgccgcctgagccgcgtgctgattcctctgttggatattctgcagtcggtaccgattctgggctttctttcggccaccatcaccatctggatggtgctgttccccggctcgatgctgggcgtggaggccgcgtcgattttcgcaatcttcaccagtcaggcctggaacatggcgttctcgttcacccggtccctgaccagcgaaccaactgaactcgacgaggcggcccgctcactacagctcacacgctggcaacgattctggacactggacgtgccgaacgcgatgattccgctgctgtggaactgcatgatgagcgtgggcggcggatggttcttcctgaccgcctccgagatgatctcggtgaacaatcgcacctatgcgttgcccggcatcggcagcttcgtggcacaggcggcggccgaggagaatctcgcggccatctgctgggccatcgtgacgatggtgctggtggtgctgcttatcgacgtactgctgtggaagccgttgaccgcgtgggcggagaagttccgcattacgcaaagcgagtcggcggtgcgcaagaccagtgtggtgctgaccatcattcgtcagtcacatatcgatgagatggtggcctggctgttcaggcctctcggcgacctgttcgacacgctggcccgcccgttgggtcggaccggtggacgttgggcggcggacgtgaagtccgcacgcagccgcgcgcttgacgtggtattcacagtgctggtgttggcagcgtgtgcgttcggactggtgcagcttatgctggtgattcatcgcgatgcgggattcggcgagctcgggcaggcgttcgtgttgggcatggtgacgttcctgcgcgtggcgctgcttacgctcgtctgctcggtgatttgggtgccgattggcgcgatgatcggcatgaatccgcgcgtttcgcggtttatgcagccgattgtgcaggtgctggccagcttcccctcgaacttcacgttcccgttcgtcacgctctggttcgtggcatgcagcgtggatatcaactggggcagtattctgctgatggcgttgggcacgcagtggtacatcctgttcaatgtgatcgccggggccagccagattcccgacgatctgcgtgagatgacgcgcagcttccagctggggcgctggcagcggtggcgcgatttgattttgccggcggtattcggctcgtgggtcacgggcggcattacggcggccggtggggcgtggaatgcctcgattgtctcggaaatcgtaagttatggacggcatacgctgaccgcctccggcttgggcgcgtatatcgccgaggccaccgaaagcggcaacaccgtgaggaccatcatcggcgtgaccgtgatgagcgtgttcgtggtggccgtcaaccgcctgttctggaacccgctgcagcgcatggccgagcgccgtttcgcactgaactaaagacttaaggagaataatatgactgttgcaatggaaaccattcgttcgctgcgggcgatgaccccgcagaacaccatcatcgaagcccagcacgtcggccagcgcttcacggccgacaacggcaccgaactcaccgtgttcgacaacatctcgttcaacctgtacgagggcgagatcgtggccattctgggccgttcgggtgccggcaagtccacattcctgcgtgcgctggccggactggtcaagccgaccagcggcacggtcaagtatcgcggcgaggccctgaccggtccgaatcccggcatcgcactcgtgttccagaccttcgcgctgatgccgtggctcaccgtgcaagacaatgtggaactcggtctgaaggcgcgcggcgtaccacgtgcggaacgcaccaaactggctctggatgccatcgacatgatcggcctggacggcttcgaatcggcgtatccgaaggaactgtccggcggcatgaggcagcgcgtgggcattgcacgcgccttggtgctgcggccggacgcgctgttcatggatgagccgttctccgccctggacgtgctgaccgccgaaaacctgcgtcaggaagtgctcaagctgtggtcgagcgaacagcgcagcatcaagtcggtgcttatggtcacgcataacatcgaggaagccgtggagatggccgaccgagtggtggtgttgggctcgcacccggggcatctgattgccgatgtgcgggttgatctgcagcgcccgcgcgaccgtcacagtgtcgaattcgaggcgatggtggaccgactgtacgcgattctgaccggacaggcctcgcagcctacgcaacaagccgaggctctatcgccatcggcatcgctcacgaacgcacccgtcacggacgcatctgtcacggacgcatcagaccttcagcccgccaagaccatcgagaaaatcaaggagcatccgctgcccaacgccacgccgggcgggctcgccggtctgctggatgtggttgccgagcatcctcacggcatcgacttggcagatttggcctcggctctttcgttcgaggtggacgacctgttcccgctggtggatgccggtacgatgctgcgcgtcatcgtggtacgcgacggccatgtgcagatcaccgaggcgggcgacgcctggcataaggcggacattctgcgcgccaagcaggtgttcgcctcactggcgatggaacacgcgccgctggtgcgcaacattgagcatgcactgcggaagtctgcggaaggcaagctccgcggcgagctcatgctggacctgctgcgcgcccgttactccaacgacgaggcgcatcagcagttcgccatcgccgtggagtggggccgttacggcgaactcttcgattacgatgccgatgacgatctgctgagcttggatgaggcgaataagggcgaataagcgaatcagccacgtgagttggccagatagtgcctttatgcctgcaaacagatgccgaagcggaatatgaccatgttcgactcatctgactgacagcaatccgtatatgcaaagtgcccggcatccgaagatgtcgggcactagtcgtgagagagactccctcagtcagctacactgacacctcctctcacccgagggggcaccagaggaacgaatcagaactcgcgacgtgggcagtcgccagactgcccaccagacagcacagccgcggtcgcgcgaatcacgaattctgaccgagcaaagcgaatcagaactcgcgatttgcgcggtagaacttgatcaggctctgggtggaggcgtcctgggcggcgagggcgtcgtcgtcctgggagatggccggggtgatctgcttggcaagctgcttgccgagctcgacgccccactgatcgtaggagtcgaggccccatacggtgccttcaacgaaggtgatgtgctcgtacagggcgatgagctcgccgacggcgaacggggtcagagccacaccgaagatggaggtggtcggacggttgccggtgaacacgcgggccgggacgatctcctccggggtaccctcggcgcgcacttcgtcggcggtcttaccgaacgccagggccttggtctgggcgaagtagttgcccaggaacagctcgtgcacgtcctggtcgccgtccttggtcgggttcggggtgttgacgaacgcgatgaagtcggccgggatgagctgggtgccctggtggatcagctggtagaaggcgtgctggccgttggtgccaggctcgccccagaagatctcgccggtctcggaggtgacgggggtgccgtcccaacgcacggacttgccgttggattccatggtcagctgctgcaggtaggccgggaagcggtgcaggtactggtcgtacggcagcacggcgtgggaggcgaccttgaagaagttgcggtaccagacgttcagcataccgagcagcaccacgacgttcttctcgaacggggtgttggcgaagtactcatcgatctcgtggaagccgtgcaggaactcctcgaaacgagccgggccgaagacgacggccagggaggtgccgacagcggagtcgacggagtaacggccaccgacccagttccagaagccgaacgcgttgttcgggtcgatgccgaattcggcgaccttctccaggttggtggagacggcgacgaagtgcttcttgatggcctcggcgttcttctcgtcggatccgtcgatggcgcccttggccttgagctcttcgagcagccaggtgcgggcttcacgggcgttggtcagggtctccagggtggtgaaggtcttggagacgatgatgaacagggtggtctccggatcgaggcccttggtcttctcggccaggtcgttggggtcgatgttggagatgtagcgggcggagatgcccgcgtcggcgtacggcttgagggcctcgtacaccatgacgggacccaggtcggagccgccgatgccgatgttgaccacggtttcgatcttcttgccggtcacaccggtccactcgccggaacggaccttgtcggcgaaggcgtagatgcggtcgagcacctcgcgcacgtccttgacggtgtcctggccgtcgacgatgtacttgccctcgtcttcgaccgggcggcgcagcgcggtgtgcagcacggcgcggtcttcggtgttgttgatgtgcacgccggtgtacatagccttggtgcgctcatcgagcttgacggccttggcaaggttggcgaacagctggagggtttccggcttgatcaggttcttggacagatcgaagtgcaggtcgccggcgtcgaaggacagcttgtcgacacgctcggcgtcttcggcgaaccacttcttgaggctcacgccttcggcctgaagctcgtcatagtgcttctgcagggcagcccactcaggggtctgggtggcgtcaacgggcggattgatggccataggattccattcctttcatcagtgactggagcgccttcgctcacggctcggatgcgctccgtatcaccaaacagaatactcacaaattcggacatgaacagaacaaaaatcagtcagcgatgtcggattgccatcgtttgcattatcgaacagttcgtggcgcggcacaaccgtcatcttcaaccgagcggtcacgacacaactgccaagccgccgattggacttttcgcggagatgtcttatacttaatttcttgtgcgcggctggcgaaatgccttccgcgaaccaagccactttagctcagtcggtagagcggctcactcgtaatgagcaggtcgtcagttcgattctgacaagtggctcggatgccctaggctggctggtctgtaatggctgtccggcctagggttttgtatatcttccacacctgtggaaacgcggatatgcatgcgcgagtggcggaattggtagacgcgcaggatttaggttcctgtgtctttgacgtgtgggttcaagtcccatctcgcgcaccggcttgagcctcctggaaacattggatcgccaacgattccgggaggctcttcgtatatgcgtgaggcaattgcaagcccttgcggacgcctctacatatggcaatgccaaggcggcaaatataatggtcacagcattgtgggtctgagcctgtgcgccgtgagcctgtgtgagccaaggagagaagtgtatgtccgccattcttacgccggttggcctattgctgatcattctcgccggctatctgttcaagcggttcggcctgttcgggcagaaggattatcgcgtgttgcaaaccgcggaattcaacatcgtgctacccggtgccatcgtatactcgttcgccaccaatccgcatgacatctcgctgctgcttatttcggtattcgcattcctgtttgcttttatcccgatcgtgttcatctttctggccacccgcaagcgcaatgtgaccgaccgcgccttcctgatgctcaatggcgccggcttcaatctcggttgtttctctttcccggtcgtccagtcattctggggtgcgggcgcggtggtgccggctgcgatgttcgatatcggcaactgcgtgatggtggccgccggcaccaatgtgctcacccagcaactgctgcatattcagcccggcaaaacacttgccgaacaacacgccggttcggttcccaccttgccgtacgaaaagcccaaggatcgcgacgccaaacggcttgcccgccgcgcattgctgcgcaccatcggcaagagcttcttcggctcggtgccgttcgacacgtatctgctcatgatcgcgttgaccgtcgccaacgtgaagattcccgattggatcgcctctataacccagccgttgagcggtgccaacgcgctggtgtcgatgctgatggtgggcatgctcatggatttgccccagtccaagcatgatgtgaaggaagtcatggccgtcatcgcttggcgtataccgttcagtgtcgccttcgcgttgatctcgtggttcctgctgccgttctcggcttcgattcgcgccgtgatggtgatctgcgcgttggctccaatcgccattttctccacgctgttcaccgacaaagtactcggcaacgccaaactggccggcttctcgctggcaatcaccgcgatgatttcactggtgatgatggcatttgctcacgcgctgatgggcgtgtgagcaaatgcgcgagtaggcacacgacgggcacacggcgggcacacggtcaggcgagacgcagcccacataggttcgtcccccggccgccagctgctaccggtgcagcagcttgtgcgccagattgctcacgccgaagcggaacttgtccaccggcaacgtgaatttgcctaccatctgctcgacgtagccgttgaagccctgcttgaattccagcacgccgcggccctcgtcgttcggatcgtcgaacacgccggaaatgccgtagaagttgtagcggctcacaccctgttccacacacaggtgcagcatcgcttcgtactgaatcagcgccgaggcgtagaacggcttgtactcctccaacgaaccggaatactgatagaccacctcattggggtgactgacgaacattgaagccgctgccggcagcacatcgcccttcttggcatatccctccacctcagccagacgcttgtcggcggccgcgagattgcgcgattcctcccccagctgacgttcgatgcgcgtggtcggacgttcatcgtatttcgcctgcagctgtgcgaccttagtctgcaatgcctcgcgcttggcggtcatatccgccacatattcggcgatgtggatttccgcgagcatgaaatgcgcatccgcgccatacgcctgcttgaactggcggaaatagtccgcgccgcgcgtcgcgaacccgcggcgttcaccggtccgccgttcgatatcggcgaacacgtcgaactcgtcggggccgatttcgcgaacgtgcacacccatcgactgcgcccgcttgacgctccattgagcgcgtttgccgaatgatgccagcagttccttgccgttggtgatgccggtgagatccttgacgtacatccactggcagaccacgtcataaccggtatggaatccgccatgcgcccagcctgcatcggcgaatccggtcagcagtgcatcgttcggctcgccgtcgggctgtccgtccgaggaatacagacggtaggcgacgttaggccagcatgccacggaaacagcatggtggcgacgggccgattcacgaatcgcctcggtcatggtccatagcagagccggatcatcgctaatgccgatggggccgaaatatacggagccatctgcaccgaaacgaccattgaggtacagaatcacgcagccggttaccagattgccggatgcgtcgcacacgccaacgcattcggcttcatgcccacgaatcttggcaagacggacctgcccggaccattgctggaagctgccctggcttgtggcttcggaaagccggtcgagctcttcgggcgtaatcacgccaaacgtatacgtcgtatctgttcgattcacagtcgcgctcatctcgtcgtcacctgtgccttatttctgtgtccgtgctcgccactgtttgtcagcgatgcagcagcttgtgtgcggcttcggatacaccgaagcgcagtccgtccaccggcagcgtgaacttgcccggaagctcttccacgaatccgccgaagcgagtcttgaactgccagacgccgtaggaaggatcgttggcgtcgaaaatgccggaaatgccatagaagttgaagcgctccacgccacgggcgatgcagtcaagcatcgcctcgaagtggattagggaagacgggtagtaatccatgaaacgatcgtcctcgccgctggacaggcagacgacctcgttcggatgccagaagtagacaccggcttccaccggaatgaccggaccgtccgaggcgatgatgccattgacttcgccgatggtcttttccagcgccgcaatcttcttgtctgcggtggcgatgcgcttttccagcgttgccgggtcggaagcacccttcttggccgtgccttccggctgctgttgcgcgcgctggagcaggcgttcgaggttgcgcttgtctttggaggccgcattcagcttggattgcagggtgtccagatattcgtcgaaatgggtttcgaccaccttgaactcgatcaggtcgccgaaggtatcgaacagacgctcatagtaggccagatcgcggctcttgaagccttgacgtgcggcgctcatatcgcacagcttgacgaaagtgctcagttcgccgcgttccagccggcgcacgcgcagaccggaatcctgggcgatgcggatgttcttacggcggtacttggagaacgaggccagcagttccttctcattatgaatgccgtcaagccccttgacgaagttccagcggttcaccacggattcgtagcccacggtgaagccgccatgtttccaaccgaagcgggccatgttgtccatcatcgtggtgtccgggtcgctggtcggcttgccgtccagatcatgcagacggtagactgcggccggccagcaggatacgctgatggcgtgatgggccttggccgaacgacgcaaggcttcggtcatcgcctcaaccacctgtggattgtcataatcgcacagcggtccgcaccagactgagccttccaaaccgaaacgggaccgcgtgtacaccacgtagcaggcggcaatcagcttgtcaccgcgcttgacacccacatagtccaccggaccgttgaacgcacccatggcggccatctgcgaggtctgctggaaactaccttgcacttgagctgcggagaacgcatccagctcggcaggagtgatcttggtaggggtgagcgaggcgacgcctgcatcggattgcgtcataatcgaaccttcttacttgtcgttactctgatcgttactctgggctctggaatggcctgtgtgctgcgtccgtttaccgcgacagcagcttgtgcgcaaattgcttcatggcataggcaaccggtttgaccggcagcacgaactcgcccggaagttcctcgacatatccgttgaagccctgcttgaactccagtacaccacgaccctcgtcatcgggatcatcaaagacgccgtcgatgccgtagaagttgtagcgagacagcccgtgttccacgcagaaatgcagcatcgcttcatgctgaatcagcgcggaggcgtagaagggcttgtactgctcgacgctaccggagaacaggtagatgacctcgcgcggatgctccacgaatagtgatgccgcagccggcagcacatccccgtctttggcgaactcggccgcctcgttcaggcgcttttcggctgccgccagattgcgggtctcctcccccagctgacgttcggttttggtggtggggtgttcggcgtttttggcggtcaatgccgccaccttggccgaaagtgcttcacgcttggccgtcatgtccgctacatattcgtcgatgtggatctcggcaaccataaaatgcgccttgttgccaaacgcttccttgaaacggtggaaatatgcttcgccacggtattcgaagctacgacgttcggcggtttgctgctcgattcgtgcgaatacccccaactcgtcgtccgacagctcacgcacatgcacacccatcgattgggcacgcttcacgctccactgggtgcgcttgtcataggacttcagcagacttttctcatcggtaatgccggtcagatccttgaggtagcgccaacgtggaaccgccgtgtagcccacggtgaaaccgccatgagtgaagccgatcgcctcgagccgttctatcagcttattgtcgggagcgccgttctggtcatccggcaaagaagctccattggtgtcgcgaaaccgatacggggattcaggggtgatttccagctgtgaagcaccctttgccttggcatggcgtttcagcgcatccatgaagaaggtcaatgcttcggtgtcgtgatagtcgcacatcgggccatcatggatggccgcaaatgtagagaatcgagagcggtgagtttcgaacagcgccgccgcgacgatcttctcgccctccttgagggccagatattcgacgtcgatcccctgcgcggcgcgaaggcgtcccatcgccgaggtctgttggaaattgccttgtggatgcctggcggagaaatcatcgaactcttcgtctgtcaacttcaccagcacaaaatcacgcatgcttccctctgcctccgagtcaatcaggctcaccatgctagcataacgcgcacacgacgaatggggtccgagcagatgaggtgtgcacatcgttcgcactattgcctccacaatggctcaaagaacaatggcccgaagatgctgaacgtccggcttgcgttgaatcaaacgcagtgctatattctctacttggctcttggagccacgccaccttagctcagtggtagagcatccccctcgttcgtgggaaggtcggtagttcgattctatcgggtggctcttgttcatcaagaaggccgacgcactaagcgccggccttctttcgtatcgcccttgctaggtcataggcgcttgctagacacttgcccgattcgggaggggctgagttgctgagccgcgactcaactgtggcttagtcgcggctcagtgcagttagacagcctagacgacttagtgcagcagcgcctcgatagcggggaccaaggctttcagcgccttgcctcggtgggaaatcgcattcttctcggccggagtcatttcggcgctggtcagcggctcgccttcatggtcaggctcagtgctgacgcgaccggcaggctggtcgtccgggacgaacagcggatcgtaaccgaaaccgtgttcgccacgagcctcgcggatgatacgacctggcatgtcgccgagttccactgtctccgacttgatggcgtaccgggcatgcaccggggcagggctcccatctgcagccgtggtgtaaacggtgatgccgtcggcagccactccaccggtcacgtcggcactggcctcggtgtccgggaccaccagcgcggcggcgcagcggaagcgcgcggtacgcttgtcatccggaatatcttcgatttgggcgagcagcagcgcattattggccttgtcgtggccgtgagcacccgcccagcgagcagacagaatgcccggagcgttacccatcacatcgacgatgagacctgaatcatccgctacagcgggcagaccggtacggatggccacggcgcgggccttgagcagcgcgttctcctggaaggtgacgccggtttccaccgggtccggcaggtgaaggctaccagcggacaccagttcgatgttttcggcatccgcgccaagatcctcttcgagaatgcggcggatttccacaagcttgccttcgttatgggttgcgacgacgatttgcatgggttctcctttaagaaggctccccttgtcaggggagctggacattgcagaccgtacggcttccagccgacaacctcccctaaaggaaggggagctggcttagtctagggacaaagcggcacgctgggcggcttgcagttccttgttgcccttttcggccaagtcaagcagggtgccgagttcggcacggttgaacggacggtgttctgcggtgccctgaatctcgatgaaggtgccggaaccggtcatggccacgttcatgtcggtcatggcctgactgtcttcaatgtatggcaggtcaagcatcggggtgccgttgatcacgcccaccgatacggcggacacatagtccttaagcacgcggctggcggacttgatatggcggtgcttctccgcccaattgactgcgtcgaccaaagccacgtacgcaccggttacggaagccgtgcgagtgccgccatcggcctgaagcacatcgcagtcaagctgaatctgattttcgccgagcgccttcatatcgatgacgccacgcaggcagcggccaatcagtcggctgatttcgtgggtacggccaccgattttgccacgtacggattcacggtcggtgcgttcggcggtggcacgcggcagcatcgagtattcggcggtgacccagccgaggccggagtccttgcgccaacgcggcacaccaggggtaaaagtggcggtgcacatcacgcgcgtgttaccgcattcgatgagcacggagccttcgggggcgtcggtgaagtggcgggtgatgcgcacggggcgcagctcgtcgaccttgcggccgtcggcacgaattatttggtgattgccaagcatgtctttgatttcaaccatgcgccccagcatacgccatccgctctatgcctggatagcaactcgtcaaccatcatcaaaccccagcgcaatgtcattccctgcttacatatccattccatgacacttggctgcacgccactattttcttatgcaccactcgcttacagagtcaatgcctgcgtacctgatgaggattgggaaagatcgtccgctggaataagaatgccatattccatgaaatcttggttgaattgcttgcgctgcatagcgttgagttcgtaatcgattaacggcaaatatgtatagtccatgtcatgcaacggctcttcatatcgatgaagcacgtgcataattgccgcgctcggcagtggggaccaccatccatccaagccataccggtacggaggaaccaatgtcaagcgtctgttccttgggttgatatcccaacgcagaaaacggtataaaccagcgagaaacgcaatccagcacgcatcgttcacccgtgcaaccgctcggacgaacgatatacgttgatgttggacattccgagcatgaatcagattgacgcagagcatcttcaacgtagaccaggtcgctccgctttctattgcatcgaaatcaggaggcctacgcagttgcgccaacaacatgtgcaattcgtcttccggaatcgtttgcgagggggccacggcttctaggtgaagaccaaaaccagcccgctcaagcccctcggccaaaacatcaaacaacatacctctttgcccacgcaatacgcgaccaattgcagaccgatccaaaccagtacgctgtgcaagctcataggcattccaaccagtctgcgacatcacttcattcagcacagccgcacacgaattaacagggcaaccagataccacaccgtgatgcacgacatcgcactgttctaacgctcgatgctctacagcgcgccgctctgatacgtcatcgttgcccgccgcgttctcatcattgagagtttcactcatcgaagtcaccttgcctcggccgatttcccggtcatttcatcaaaccgcaatcatcatatcccacaatcccatgacgatacgattcgtcatatcccacaattcagagacggtatgattcgtatcgcatcagttcacacgattcttcaacgattgctccgcaaacgattgctctgcacgcatcgcggcattctatcggcacactattcctcccaatcagcccaacgcaacatcacacgcaacacccctcacgcaacacccctcacgcaacactgcgccatctctgtaacatcaccgacaacacggcaatcccacaacgtctcggtgcaatatcctctgaaatggtttggtttttcactccacctcgtcggcatcctgaccaggataggaatatgtgtcgttccgcaccatgtacaaaacgttgtcaactgacaacgttcttcaaatcaattggataagacaaatggccatttcccgccaattcatctgaatcaagacgttgtcaactgacaacaaaatgtacattgcaacagcatgcacatatacatatttcccc

SEQ ID NO: 759 - DNA, 7484 bp, Unknown
  R14_18m  MAG No. k141_841
tgcgacacttcggcgtcaaattgcgtttgaccgcactccgtactatattgttgcgagttgctttgcggagcaaagtaacatccaaggggctgtagctcagttggtagagcgcttcgttcgcatcgaagaggtcgcggtttcgactaccgtcagctccacgagaccctctgcattcattccaccgcagagggtctttttatttgtcttcgttgaaattctgccatctcgcgtttcaaggggctgatttggggtttgccggaggtctacttgcgtttcgaggggctgatggtcaagtagatacgccgccaaaatggcggaatagcgttgcgtcaaagccgtttgtactggtgcttcaccggatgaggagccccttgaaacggaagtagacttccggaacatgtgaaatcagcccctgcaaagggagaatgcctcgattccgccatggattgtcgtggattgctctgtggtatgggcaatactgggagtatgacaagcgcagatgagttgaatgagcagtatgacgctgacggtagcgtgacgcaagtgcctgaacgcaatgatgaagttcatgccggcgaatccgccgccacccaatcccgcgaatcggccgtgaccgtccccgccggcaccgtggtgctcgccgcaaccccgatcggcaacgttggcgacgcctccgcccgtctggtggccctcttggagcgggccgatatcgtggccgccgaagacacgcgccgcctctacgatctcgcccgtcgcctcggcgtctatgtgaacggtcgcgtcatcgcctatcacgaccacaacgagcgcgacaaggccgacggcctgctcgaccaggtcgaaaccggcgccaccgtgctcgtcgtgtccgatgccggcatgcccaccatcaacgaccccggcttggccatcgtgcgccgtgccatcgaacgcggcctgcccgtcacctgcgcgcccggcccctccgctgtgctcgacgcgctcgccctctccggcctgcccaccgaccgcttctgctacgagggcttcctaccgcgaaagcattccgagcgcgtgcagtatctgcgcacgctgttgcccgaacgccgcaccatcgtgttctacgagacgcctcatcgcattgccgattcgatggacgatctgctggacgcgttcggcccgaatcgcccgatggccctgtgccgcgaactcaccaaggattatgagcagattcgtcgcggcccgattggcgagattcgccaaagtgtgattgatgatccgccccgtggcgagatggtgctggtcgtcggcggcgcgtccaacgaggaggccgaagcggccgcgcccagtacgttgagcgtggatgacatggccgtgctggccatcgaccgtgctttggaggacggcctgcgtatcaaggacgccatcgcgcaagtggtgcaggagcatccactggctgacggatcgttggccaatcgcaagcaggtgtatgcggctgtgctgaaaatcaagggatagcgcagcagccggcgattatctccccgttacgcttccatcgactcgaacaatatttccaacgcctgccggaccccaggcccaccacgctgcgagaccaattccagcaaaggcgcgtcggctttgggattggcaaccagccatttacgcagttcgggcacgtgatatgcgatgtgccagagcacggcaacatccgtatcgggcgaacatgccaccgcgggcgtaagtctgatgggtggttcaggcggcgcggtcatatccgagattgcgcgcgatgcggattcggatgagtgtgccgccgccgcgtggcgaggcaaccgttgcgcctgccgcaaatgccgtaaacggtgagcggcatggcggcctctgcgatggcctctggcaatgaatcccctcgtcatgcgcattgctccaaagccggttcgtcaatctccttctgcaccgattcaaaaaacatgcgtgcgcgtccggcatacttgtgatgccgatgctccttgacgatttgcagacagtcgtttggccgaaactggtacgcggacatcagttggcacaccagcgcgttgacggtggaaggatcggggatgtcttcaggactcatcaccaggtcgcaagccgtacgggctggcgtggtgacaggcagcccgccgagcttgatgatttgctccggcaacgtcaatcttttgaatacgcggatgcggcggctgacggatgccgagcggaagtgcgatgtggagatcacgtctatggtgctcggaaagtcggggcctcccagccatacccaagcggcggtcatcgaacacaccacagtgccaaacggggcgacctccgcgacgatttttgcgcgaccatacagtgtgcccgaatgctcgatccagtagccggcggaatcgtcgagcttacgtaacgcgccgaaggcggccagacggttaaggctgagcggtcccggcagattcttggtaaacagtatcggcggcaccgcgggctgcgcggttgccggcgaggtgactgttgtgatgtccgtcatcggacctgctgtgatatccatgatcgaacaatatgcagaagtacggcttgcgcgccaccggataagcgaaaacggtggataagtgcataacttcactaggtgcgcgaatgatgtggataactcggtggatatcgacaggcggaagtgtgtgcggatgtgcgtggacgtgcgtacggatgggtgcgtggacgtgtgtacggatgcacgtacggatacgtgtgcgaatgcgtatgcggataagcgcgcaagcggtgtacggataagtatgtgggggaagttacgggtggataggtgagtgggatgaggatggcggcgcggcagctatccgggcgtgtccccgccgcgccggataatcaagccttatgagtcatgttttggtgaatgttgcttggccgtatgcaaacggcccccgtcatatcggtcacgttgcaggatttggtgtgccctccgacgtctacgcgcgctacgagcgcatgaagggcaatgacgtgctcatggtgtccggcaccgacgagcacggcaccccgattctcgtcgaggcggagaaggaaggtctcactgcccaggaactggccaaccgttacaaccgcgtgatcgccaaggatctgtgcgacctcggcctgagctacgacctgttcacccgcaccaccaccggtaaccacgagcacgtggtgcaggagatgttcaagcagtgcttggagaacggctacatctacaagggcacccagcaggtggcgattagcccgtccaccggccgtaccctgcccgaccgctacatcgagggcgagtgcccgatttgccacgccgaaggtgcgcgtggcgaccagtgcgacgcctgcggcaacgagctcgacccggacgagctcatcaaccccgtctccaagattaacggcgaaaccccgcgcttcgagcagaccgagcactacttcctcgacctgccggcgctcgccgaagccaacaaggcatggctggagacccgcaagggctggcgcaccaacgtcatcaacttctcgctgggcctgttcaaggaggtcaagccgcgcgccatcacccgtgacatcgactggggtatcccggtgccggtgaagggctggatcgacaacccgaacaagaagctgtacgtgtggttcgacgccgtgatcggctacctgtcggcctccatcgaatgggcccgccgccagggcgacccggagaagtggcgtgaatggtggaacgatccgagctgcccggcctactacttcatgggaaaggacaacatcaccttccactcccagatctggccgtccgaaatgctggcgtacaacggcaagggctccaagggcggcgaaaccggcccgatgggtccgctcaacctgcctgagcaggtggtggccagcgagttcatgaccatggaaggcaagaagttcagttcctcccgcggcatcgtgatctacgtcaaggacatcctcgcccgctaccccgtggacgccgtgcgctactacatttccgtggccggccccgaatcctcggattccgacttcacgtgggccgagttcgtgcgccacaacaacgaggagctcgcctcctcgtggggcaacctggtgaaccgcgtggccaacctcatcaacaagaacttcggcgagattccgccgctggacgaggattcgatgaccaacgaagaccgtggccttctggaagaggcttccgccgcgttcgacgtggtcggctcctccatcgaaacccaccaccagaagcacgccctgtccgaggcgatgcgtgtggtcggcgacatcaacaagtacatttccgccaccgaaccatggaagattaaggacgaccaggctcgtctcggcaccgtgctgcacgtggccgcccaggccgtgtctgacgcgaaccacctgctcgcgccgttcctgccgcactccgcacagaaggtgtgggaggcgctcggcggcaccggtaccttctcgccgctgcctgagctcaaggaagtcgaggatctcgacaagcccggcttcacgtacccgatcatcaccggcgattacgagctcggtgtgaacgtgcacccgtggaagagcgaggcgatcgaggtcggcgccgtggtgcctaagcccgcaccgatcttcgccaagattccgaccgaggccgtggaagaggagctggctcgcttcgatgaagcgctggctgctcgccgtgccgccgaagccgagcgtctggccgccgagaaggccaaactcgccgccgagtgattcggcattgctagctcgtagctgacgggccacctcgcacatgaagtgttgcgaggtggcccgttgccgtatgtgcggtcaagccccgacaatgcgaggccggttgtcggcgggcgtcacaaattcgtcacactccgccaagacttttcccagacaagcacatcaattcgccaagcatggggcggttatatagaagatgtcaacggaatgaagttcataccggtggcgaggttcttcgaaccccataactgaacccttcttctctcttctctctcacccggcggccccctccgccgggtttcttttttttttaatgctgggaatgccatgggccgcatattgaaaaaaggattatggcagagtgctgtctgtttacaataaggcattgctgttctagaaaataacaaagaaggggggactgatgatgtataccgtcacattttcgggcaacctgactcaagcggaatcggccttggtcaagcgaggcgccatacagatcgccgcgttgctggccgcaaaaatcactggccgcggactcatcatcaacgacggtgacaccgaatactcatgggatttcatcctggtcgatgccagcagcgatgagcggcacacctttgacgagaggctattgcggatgctgtccgactacatccacgccggtttccccgatgccgtgatccgccacgccaaccacgaggctccaaagctcggcaaataatattggtcgcgtggtgagtcccatacttccgtcggaatatcgctatcgcgatatggtcgcatgcctgttgcgcattgaagcgttcgacctatgcgcagttgatgttccggtgatgacggcaaccgattgacgcgattaccgggacagatttcgctgtcccggttcgtgatttcggcttcttttcgggaaccgggacagccccccttgtaaacgcccattatccgtaatcccaaaaccccggaattccgccgatgtacgatggcgaatattgcacggtggggtgataggtgaatgaaattttgtcttggttgctcaaaaaggggcgaaatggagaaccgggacagcgaaatctggcccggtccacacataaatcgattgacatcgctaccgggacatcggacacggacaccgagtcgcgcagcgtcggcgcaacatggatactgtacgactttcgcgataaacgttatattcttcgtcgcctccgccgggcgatctcatcgagtggcgttgccgtcaaagtgaaatcgaatacggcacctcgcaatgccaactgccgcccgacccggtaggcgagttcggcttgggatggctcatcggccatgttcgcggcagtggcgatgatgacgatccaatgatgatgtcgcagcagttcgcgcttgtcgttgtcccgccgccactggtttttgtcggtgcgatgatgatcgccgtcatattcgatggcgacgcgaaattcgggccaagcgagatcgagcgttatcggcgcgccgttgctgaatgtcgcgccgggcaccgtgtaatttgtcacggctggcggaagcccgtatttcgtcgtcgcgatgcgggtctttgattccatcggagagtccacgcggggcgtaatgaatgcaagagcgatcatgcacttggattttgcgttgaatttcgggagtccagtgacttgccgcacgaagtcctgataaatgccgtcagcagtgcggccgttcgccagacccggcttgcgggcgattgccgtaaggattgcgtcgccaagtatgaccagcgattcgagcgatatatgagcggcgagttgtgcccaagtgtgtatcagatccagtgcgtacacatgtttgttgatacgcacattgtgcgcatcgctcagcggcttccagatgtgtggtgtcgttggcggcacgatggcacgtattcgtgtgcggtgtgagtcggagacggtatggagctcggcggggtcgatatcgcaatccttgggaagcggcacggattggagtatcagcgatgtggccatgccgaagagcaccggttgcccgagctgttgcgcggcgtccgtgcatcgtttaagcatttcccgcttacgttgggtgagggtttcgctcattgctggcgacacaggacctgtaatcacagttggcgcggaactcgccatacgtggtgatgaacgtagctcaggattgatggtgcgcgcagacgcaacgcccggtgtgtggggccgggtccagccggacggttcgtcgtcgaatacgccgggcggtggagtgggcaatatgtcgttcatgacgccaccgtagcgcagcggtcacatgctcgctatgaaaaccggggtatgtggctctagcttgcgtgagatgtggataactctgtggataactagttcggaacaattagcgaggccggaacctaccggcaattggccgatgatgacggcacttttgctcagctcagccgcgatagtctcgaataggtgcggccgggcgtactcgcataacgtaatgccccttctctctgaacagagagaaggggcattcgaatatatgctcccgccagcggaacgtcagcggcagcggcgggtgaggggctgccaagggtcgagctcgaccggttcggcggtgagcagggcgcgggtggcgtcgtcgaggtattccttgcggatgatgagctcggtgacgtagcggtcgaaccaggcgtcggacatgacgtagtagccgtccttgccggcgtccttgccccagctgttctccaccttcca

SEQ ID NO: 760 - DNA, 42222 bp, Unknown
  R14_18m  MAG No. k141_1083
gcgtgaacgacatgcaccaaaggctcgtcaaggcgcggcgcatgatccgcaggcgcatccgggagggccaaccgttcatgttcctcgacgaggggctcgcggcagccggcccagtgccgtccacgaacaacctcgtcgaatcatggaacgcgcgcctgcgcgacatgccgcgccgccaccgcggactgcggctggtcagacggctgaaggcgatctgctggtggtgccaccagcacacggaacggcccgaaagcgacgcgtggctcgcggccaacgcgatgaccgacgaacgactcgagcgcctctaccggcgggcatgggagagaagcccgcagagcatgcacgagacgttcggcattcccatgagacacggcaccggcatcgactggaacgagttccacaccagggtcgaatggcagtcgaacgactagaccgccggacatacattttggcctataaccccgaatacggacgttcgcatcaaaaacaaaaagggttccgggacaaaccccggaaccctaaaggcggataaggcgagattcgaactcgcggaggctttcacctcacacgctttcgaggcgtgctccttagaccgctcggacacttatccatgctgccaaaatggcaacttgttcattatgccacattctgccgacctggcaaatcggagtttcgctgagcaagtctcgagtgtatgccgcttgagacatgtcagatcacaatcccggaattcgcccgaagcgctggcattgcgtttacgcgccaagcactccgacaggaattacatacactccatcatcgcgttgatacgcgaactcgccgacccccaccaacaccgccaagaactccggttcacgggttcgcgcactcggatttctcagcagcttatctttcagtctgcatagatttgccgatgcctcagggactttatcctcactggacttaatttcgatgccgccccaccgtccatcggacaattcaataatggcatcacactccagaccggaatcgtcacgataataccgaaccggttctatcccaatatcgaggagagatctcgcatacaccaacagatcacggatgcatagattctcaaacagaaacccaaaagtctgccaatcgccgataagagcggcaggactcatgcccaacattgcggccgcaatggaaggatcggcaaaataccgacgcgccttggtctggagtcgctttggatcccgtgccggcgggacccagccctttatcggatcgatgacgaacatgttctcgaacatggccgtatacccggataccgttctctccgaaatgaaatcgtcaaggttttcttcagtaccgtacatatccttacgtaaggttttgaatgtcacagcttgactgatattgcgcgcaagcgaatccagcagacgacgagccacatcaggatccttgccttgcctgggcacactctcagtcagcgtgagtcgcttgtattcccgaatcagaatctgtgcgtcagatacaggcagagccaccgcctccggccatccacctcggcatacggcatccaacaacatttgtgtacttatctctgattttgcagcggcgaacttatgttcaaacagtccactgagacttaccgcacctgtcgagagtccggactcatataaagtcagaggattcatacggatacgtccgattcgtcccgcaccactatggttcggccgattctcattgagaggagtggatgaaccggtcagaatccactgacctttattcgcggaatcatcgtcgacgcgatgacggacttcatcccatatagctggagcgagttgccactcatccacgatatgaggcctatctcccagcagcatcaatgacggatccgccttagccgcagccaaattgttattgcgatccacataggtaatgctggctgcatgggcccgcgcagaccaagttttcccgcaccacttggtgccggtaatctccaccgcgccaaagatgcgcatatatcgttcgatctgtgcatccacgatacgagggcgataggctttcggcttgatgtcgctcgccagagaatcggccattccgcgcacctcccgttatttcacgtccgccatcgcaataatccgaatttctcaactaccaaaatccgaatgttgcaacgacgaaaatccgaactttctaactacaataatccgaatttttcaactaccaaaatccgaatgttgcaacgacgaaaatccgaatattggtggtggtagaagcggtgacgggaccactctgcattgagcggtctctctcagtctcgctacgctcgacagctcgaacgcaatttaaggacagctttccagctgccattttatttgctcactgtcattcgccttcgcctaaaaacgcctccggcgttttcttcacggctcagctcatcagagggggcttgaaattttgtttacgccacctgttcgtggacggaggcattgacccattgggtctgctggacgttgtagccggagaagatgccgatgtcgagcatgcagtcgcggtaatcgcggccgtgggcgatggtgatgtagctgtcgtccaccaatcggttatgcgtgggatccagtccgacccatcggccatcctgatacacctcgacccaagcgtgggtcgcgccctctcccccaagcaaaccggcaatgtagcgcgcggtcaatcccacatgccggcacacggacagcattacatgggcataatcctggcatacgcccttgcgctgggccaaggcctgttcggcggtggtgcgaatcgtggtggaaccgggcgtatacacaaacgccttgtagacctcatccatcacttcggcggcctgctgcaccggagtggcgtcggcaggcaacgcagccaagcgttcgcggcatacgtcgatcatcgcctccacgttcgggccgggaatggtgagcgctgaattgaatcggtacagcggtttataggcttccttatggatatgcgcattgtccacgaaggcgatgccggtcaccgaatagctgaatatgtcgtgcggctcggggatgaatccggtcatcaccacggagccaaaggagtcgatggtggtttcgagttcggtttcgggctgaatcttcacttccacgtcaatcacctgttggcgagggccagtggcgggaatacagcgaagctggaacctgtgatcggtgaccggtgcgctgaaggacagcttcatctcatagtcgaacacgagttttttcacaacgtctcctgcacttacacacgagccggcaaccggcacattctcgggataacgacactacagccatggctgaggtatggtccgcgcgctcacagtccacgcatatattccggcaattcgccgatacgcatcggccggcactcgggcgcacggtttttcgccataccaccatagcatttgaacccgtcagggcgaacgtcgggttaggggcgcttggcatccatgttcatggagctcagtgagcccatgtctttgatggccagggcgctgacacggccggaataatcgtcaaggtacttcttcagcaggtcggcgacttcctgatacccgcgagacggcagctgaccgaccagccagctcagcccatcggcgaagcaactaggcaacggcatgccgtcgaggatcatcgagtaggaggcgagcttcctaagcggggcttccatctcctccatcgtcaggccgaagcgcgtgtacaggtcgatgcgctcaagatacttgccgatgaagatgaacgccttcagcgtggggtcgaccggcgaattctcgatgccgccccagaaggcgagcatgtcatcggtaatatcgcgctgcttgtagatgtcctcggcgtcggccgcgtatttggcggcatcggtgatattggtcatcgccaactccacgtactgcaacagacgcgagctcaattccgggcgcagaatcacggcgttgttgaatgcggaggttacggccgaccgcaccgaatcagggttggacccgtcgtacaggaagctgttcacgaacccgtcgaagtcctcgaaatcttcgggcaggtcgagtgcgtgagcgaacggacggaaggcgtccacatcggtgtccatcacacgatcgtagaacgggaagaactggttcagcgtggtgaaggcgcgctcggtgtaccgacccagccaatacaggttgtctgccttggaggcggtgaccagagacaacgagtggcggcgggactggctcagcaggttcgccacctgcacttcagcaccgtattcatgctccacgccggattcgggtgccaacacccacgtatccttgaatccgccaccctgcgacgagttgacgatcatctggccgggcaccgacgagtatcgagtcaagcccgaataccacacgtgcgtgtttttgccggtgaccacaaaggcacgcaaatcgcatttgcgcggcgacatctcaccggtcttcgggtccaccacatcgatatcgcggaactgaatcacctcttgggcgatgaatcgacgaggctcctccttgatccggttggcaagctcctcacgtgcggcagcatccagcgacgaaccgaacaccacgccgtaaccaccggcttcggccacatccttgatgaccagctcgcccatacgattcaggacttccttacggtcggcctcgaacatcggcatatacgtgggcgcgttgttgagaatcggttcctcgccgagatagtacttgatcatctgcggcacgaagtagtagatggccttgtcatcggccgcgccgttgcccggcgcgttgacgatggccacgttgcccgcgcggtaggcggacaggataccgggcacaccgatcaccgaatcaggattgaaggcaaacggatcgaggaattcgtcggacagacggcggtagaccacgcccacacggtggcgtttgccggcgtagtcgaggaagtagaccttgttgtccaccacttcgaggtcttcggggaaggccagtgcggcgccggttttctccgccagataggcgtgctcgaagaacgcggaattgtagcggccgggggtcagtaccacggcgatgccctcagtggacacaaagtccatggccttgcgcagtaggcgcgggtattcgcgattgtcgcggatgtgcacgtcgcggaacaggcgcggggagatgcggcgctcgatgtcgcgcacgaacagcgggtagctggcgcccgaggggatgcgcaggttgtcttccagcacccaccagcggccatcttcaccctggaccaggtcttcgccggcgatgtgcgcgaagatgccgccgggaggggtcacgccgttgacctgcgggaagtagccggccgaggtgtatacgtattcctccggcacgacgccgtcatggatgatggccttgtcggagtagatgtccttcagataggcgttcagggcgttgacgcgctgcttcaggcccttctccaattcgtcgtattcgtcggattcgataatgcgcggcacgggatcgtacgggaagagccggtcatggtattcgccgttcttgtagatgccgaagcgtacgccgttgcgggacagctcgcggttgatcgcctcgcgacggtttaccagttcatgggccagtctgcgtgctgcggattcgatcatcgtgcctgctccttgctgtggcggcttctgtggcctcaagcggttaggcgtttcgagcgcacgctgacgccgcaagccgtaaccgggtttgatggttacaacctaaggcggccccgtttcagcaaacgcgcgagaatgttacaggcaggtcacttcgccgaccgcactcgtctcgccgaccgcgcgcatctcgccgaccgcactcgttacaatgaatggctatgacacgactgcgcattgacttggcctacgacggcggcggattctatggctgggccaaacagcccaatctgcgtacggtgcaaggcaccattgaagatgcgctgcacaaggtgctgcgggtgccggccgatgatgcggccgaaccgttgcgtctgacggtggctgggcgcaccgacaccggtgtgcacgcctcccaccaagtggcgcatttggatgtatccgatgaggtactgaatcgctgcgtaggtcacatgaccattccggtcaccgaggcgctgactcgcagactcaaggctgtgctgccttcggacatcgtcattcatggcattgccgtggcaccggccggtttcgatgccaggttctccgcattggagcgcacttatgtgtatcgggtcgccgatcgttcgtccgagatcgacccgcgcctgcgtggatgcgtgcttaccgtggatgaatcgctggatctggagcttatgaaccacgcagcctcattgaccatcggcctgcacgattttggttccttcgccactccgaatccgggaggcactacgatccgcgaagtcaagaccgcctattggcggcgggtgccgatcactcccctggtgccggatgcgatggcatcgcatgaagcatatcggactccgtcgctggagtccggactggcggtgttcacgattgtggcggacgcctttgcccgcaatatggtgcgctccttggtcggctcatgcatcaaagttggttcgggacgcaaatctctggaatggtttgccggcaaaatggccgagccagtgcgtgaaggctcaagcgggccgattgcgccgcagggcctgactttggagcatatcgcataccccgtcgatgatcagctggccgcaagagccgaggccattcgagccgtacgtacgttgtagtttctatgaaacaacgcaaaagggctggaacccaaacggattccagccctttcagctagcttggcgaaacgctattcagctcactcggccttctcggcgtcagcggcttcctcagcgggagcctcagcctcagcggcggcggtctcctcgaccggagcctcagcggcggcggtctcctcgaccggagcctcaacggccggagcctcttcttcggcaaccttggcggcggcttcggcttccttcacaacagccttcttggcaaccggctcggtgacgagctcgatcacagcggccggagcggcatcgccaacgcgcggggcgatcttgacgatacgggtgtagccaccttcacgctgctccatctgctcggcaatctgggtgaacagaatgtgcaccacggacttgttgcggatgacgcgcatcacgcgacgacgggagtgcagatcaccgcgcttggcgaaggtgatcaggcgctcggccagcggacgaaggcgcttggccttcggcagcgtggtggtgatgcggccgttctggaacaggctggtcgccatgtttgccagcatgaggcgctcgtgtgcggggctggaagccagacgcgggcccttcttaggtgtaggcattgggtttactccttatatgtccgttcttcaggcaagcaggtgggcatatgcccgaacatccgcttgcctagtgaacgaacgattggtcaaagaggcagatcactcgtcttccggcgagaagaacgtaccaccttcgagattattggtatcgaaggccatcggcgaggacttgaggctcaggcccagggtctgcagcttctccttgacctcatcgattgacttcataccgaaattgcggatgtcgagcaggtcctgctcggtgtgggagacaagctcaccgatggtgtggatgccctcgcgcttgaggcagttgtaagaacgctgcgtcaggttgaggtcctcgatcggaacggccatctcggggttggtctcctcggccaccggggccggaccgacctcgacgccttcagcctgggcgttgagctcacggcacaggccgaagagctccaccaaggtggaaccggcagaagccaccgcgtcacgcggggagatggcgggcttggtctccacgtccagaatgagcttgtcgaagtccgtgcgctgttccacacgggtggcctcgaccttgtagctcaccttgagtaccggggagtagatggaatcaaccggaatacggccgatctcatcgttgtcctgcttgttcatctgggcaggaacatagccacggccacgctcgacagtgaactcgatctcgagttcgccatcgtcggcgagggtagcgatgtgctgctccgggttggcaatagtgacgccggcaggcggggtgatgtccccagccacggcttcgcccttgccgctcttgcgcagatacatgaccacaggctcgtcatattcgctggtgagcacgatgcccttgatgttcagcaggatctcggtgacgtcttcctggacgcccggcagagtggtgaactcatgcagggcaccggaaatacgcacggaggtcacggcagcacccgggatggagctcagcagcgtgcgacgcagcgagttgccgagcgtgtagccgaagccaggctcgagcggctcgatggtgaagcgggagcgctgcggattcagagattcctcggtaagagtcggacgctgtgcaataagcactgtggttatcctttcagcttgaactcggtggtgcactcaccggtcaggcggttttggatggatttggtattgctgagtgctcagacgcgacgacgcttcggaggacgaacgccgttgtgggcttgcggggtgacgtcggtgatggaaccaacctcgagacccgcagactgcagggaacggatggcggtctcacgaccggaacccgggcccttgacgaacacgtcgaccttcttgacgccgtgttccatcgccttgcgggcggcggactcggcagccataccagcggcgtacggcgtggacttacgggagcccttgaagccgacatcaccaccggacgcccaggacaccacggcaccggacggatcggtgatcgaaatgatcgtgttgttgaaagtggacttgatgtgagcctggccgaccgggaccgacttgcggtcgcgacgacggggcttacgagcggcttgcttaggcgctgccattgaccctcgtttcctagtaacgaactttgttgttgacgttcgggcgatgggatgaaatcatcccgtggcccgaatcatgccaccgactacttggtggccttcttctttccggcgaccgtgcgcttcgggcccttgcgggtacgagcattggtcttggtgcgctgaccgcgcacaggaagtcccttacggtgacgctggccttggtagcagttgatctgaatcttgcgacgaatatctgcatcgacttcacgacgcaggtcaccctcgatcttgtagttggcttcgaggtagtcacgcagcgtaatcagctgctcgtcggtgagatccttgacgcggatgtccgggctgataccggtcgcggcaagcgtttccttggcacgagtgcgacccacaccgaaaatgtaggtgagggcgatctcgatgcgcttctcattggggatgtcgactccggcaagacgtgccattgcgattccttcttgttgccgtaggtcttgcacccgctcgcccggttacccggcacgggcctacgtacccgtggttcagtgtcgttcccttgcgggaagcactgtgagagagtgccttatttacttagtgccgctggagaatctgctctcagccctgacgctgcttgtggcgcgggttgacgcagatcaccatgacgcggccgtgacggcggatcacgcggcagttttcgcagatcctcttcacgctagggctgaccttcatggttatccttttcttgtgtacctttacttgtaacggtacgtaatgcgtccgcggttcaggtcgtaagggctcatttcgagcacgacacgatcctgcggcagaatacgaatgtagttcttacgcattttgccggaaatcgtggcgagcacgatgtgcttgttctcgagttcaacgcggaacatcgcgttaggcagtgcttccactacctgtccttcgacttcaatcacaccgtcttttgccatgtgcctctagtcctattccgttggatgattactatggcatatccgaagacacaccaactgtcaactatatacgcacatacccctgtacgaacactcggcgtgtcgcacaggggtatggaaacgttgatgtggtatttcggcatcactccggcttgttggctgggctgccgaacctactactcgaggtggctgatgatacggccgctgatctcgtcgatgtcgccgacgccgttgaccacgacgagcaggccacgggattcgtagatgtcgagcagcggagcggtttccttctcgtaggtctccaggcgcttggcgatggcctccggagtgtcgtcagcgcggccctgctcggcggcgcgcttcttcatacgctccagcagcacgtcacgggcggcttcgagggccaccacgtggtcgagcggagtgtcgaggtcggcgagcatctcgtcgagagcggtgacctgggcggcgttacgcgggtagccatcgaggatccagccgttattgcagtcttccttggccagacgatccttgacgatcttgttggtcagggagtcaggaaccagctcgcccttgtcggtgtagctcatcgcctcaagaccgagttcggtcttgttcttgatgttgtagcggaagatgtcgccggtggagatggtggggatgttgaagtgctcggcgagcagagcagcctgggtgcccttgcccacgccctgggggcccatgatgagcagacgcatagtggtctccttttgtgtcggttattaatacggttttggctcccttggttaggggagccattgagttatatgtggaagaaagattgctccgtcgtggaactcctcgcgcggccgcctgcccattgcgggcgaccgctgccaagcgggcgtcagccttctttgtggtccacgttttcgaacaggaagccggtgtactggaactgttcggtctgggccttggcctgacgcagggtgtcgaggcccacgcccgcgatgatcaggatcgtggtgccaccgaacggcagcttggcgttgagtccgagggccatgatcagcacggtcggaatcagggccacgaacagcaggtagacggcaccgacggtgttgagtcggttcatcacgtaggtcaggtagcggctggtggcgttgccggcgcggatgccggggatgaagccgccgtactgcttcatgttgtccgcggtctcgtccgggttgaacgtgatcgaggtgtagaagaagcagaagaacacgatcatcagcgcgtacagggcgatgtaccacacggatgtggtgttcgccaggttggcgttgatccacttgacccaggactggtcggacttgccgaactgggcgatcagggtcgggatggcgaggatcgaggaggcgaagatcggcgggatgacgccggacatgttgatcttcagcggcaggtaggtggaggagccgccgtacatcttacggccgatcatgcggcgcgtgtactgcaccgggacgcggcgctggcacagttcgacgaagtcgacgaagatgaggatgaccacgagcacgcccacgacgatgccgaacttggtccagtcgccgttcttgccgttggtgccgtagccgatctcccacaactgcggcaggaagccggagcagatggacatgaagatcaagatggacatgccctggccgatgcccttgtcggtcacgagctcggccatccacatgatcaggccggtgccgccggtcatgatgaggaccatgaccacgaggttccacacggagccgtccgggatgacctggtcgcagcggtagttgaacagggcaccggagcgggcggtgaccaggatggtggtggactgcagcacggccaggccgatggtcaggtaacgcgtgtactgggtgagcttggcctctccggactggccctccttatgcagggcctcgaagcgcgggatgaccacgcgcagcagctgcaccacgatggatgcggtgatgtacggcatgacgcccagcgcgaagatagacagctggagcatagcgccaccggagaagaggttcaccagtccgatgaagttctcctgggaggcgctgccgacagtggccatgcacttgttcaccacgttgtagtccacgccaggggtcggaatgaacgaaccgatgcggtagacgatgatgatgaacaggacgaagagaatcttcttcctcaactctttggtcttcagggcctggattagtgtcctcacctagatttcctcccaatagcgcgccaatcacgcgaaatacacaaactaacgaatgagcatagtctacagtgcctacttcggccacttcatgtctcgcgaatgttatctgaattatgctccgtcgtactgaacgggggaagcatactcaaaacgatcattgtgttgagactgcttctctgcgctcagaacaacaatttttgagaaaagggaacccccgtccacctattggcgggcgggggttgtacagcctattgcgctccccgtaggactaatcagtcctcggaaacggaaccgccggcggcctcgatcttggacttggcggaagccgaagccttaacacccttgagggtgaaagccacggtggtctcgccgtcgcccagaaccttcaccggagcgttgtcacgaacagcgcccttggcgatcaggtcggtcacagcaacctcgccaccctcggggaagagctccacgagacgagcgatgttgatgacctggaactcgaccttgaacgggttcttgaagccacgaagcttcggcaggcgcatgtacagcggcagctggccgccttcaaagcccggacgcacgtggttacgcttcgtctggcccttggcgccacgaccggaggtcttacccttggagccttcaccgcggcccacacgggtgcggtccttcttggcacccggggcgggcttcaggtcgtgcatctgcaggatttcgttatctgccataatcagtcaacctcctcaacggtgaccaggtgacgcacggcgttcaccagaccacggttggccggggtgtcctcgcggacaacggtcttaccgatcttgttgaggccgagggtcttgacggtggcgcgctgagccggggtacggttcacgatgccgtggtgcagggtaatcttcaggttcttagccatgagtatcactcaccatccttctcttcggcggccttagcggcagcagcctcttcgcgagccttgcgagcctcggcaatgccggcggcacgggcgcgcagcagagcatcgggagcaacctcgtcgagcgccaggccacgacgggcggcgatctcctcgggctcttcgagctgcttgagggcgtcgacggtagcgcgcaccacattaacggcggtggcggagcccatcgacttggtcaggacgtcggtgatgcctgcgcattccatgacggcgcgcacggagccaccggcgattacaccggtacccggggcggccggacgcagcaggacggtgccagcagcgtcgtgaccctgaaccgggtgggtgatggtgccgcggacgcgaggcacagagaacatgtgcttcttggcgtccagctggcccttggcgatggcggccgggacttcacgggacttgccgtagccgacacccacggtgccgttgccgtcgccgaccacaaccagtgcagcgaagctgaaggtacggccacccttgtgggtcttggacacacggttgatggtcaccacgcgatcgagcagctcgtcgccgtggttttcttcacgacggttacgacgctcgccgcgacggccttcaccgcgctggccacgacgacccttgcggtcctcgttgttggattcggtcgccacagtgttctgagtttcttcagccacttgggtttccttcgtttcgttgtcgctcacagtgcaagacctccctcgcgggcgccatcagcaacggctgcgacgcgaccggtgtacttgttgccaccgcggtcgaacacgactgcggtgatgccggcagccttggccttctcggcgatcagctcgccgaccttcttggcggcctcagtcttggtgccttcgaaaccggcgaagtcggcctgaagggtggaggcggacaccaaggtaatacccttggtatcgtcgaccacctgagcaaccatgtgacggttggagcgggtgaccaccaggcgcggacgctcgggggtaccggagatgcgcttgcggatacgcgcgtgacggcgcttgagagctaccttcttgccttttccgagaatagcaacgctcatatcacttaccagcctttccagccttgcgcaggatgcgttcatcggcatacttgatgcccttgcccttgtagggttccggagcgcgcagcttgcggatgttggcggcaacctggcccacgacctgcttgtcggtgccttcgacaaccacgtggttggcgtcggtcaccttcagggtgatgccttcgggcgggttgacggtgatggtgtgggagtagccgaggaagaactcgatgcccttgcccttggcgacggcgcggtaaccggtgccgacgatctcaagagtcttggagtagccatcgtgaacacccttgaccatgccggccatgatggagcgggccagaccgtgcttggcacgggtcggacgcaggtcatcagcggcggtcaggacgatctcgttgccttcaacggcagcggtgatgccttccggaaccacgtaggagtcagaacccttagcgcccttggcggagaagttctggccttcaatcttgacttcaacgccagcagggatggcgatggggagcttaccaatatgcgatgccatgtttcagctctcctttctcaccacacgaaggcgacaatttcgccgccaatgcctcggtcgaggcattccttctgagtcagcagtcccgaagaagtcgagatgatggcgatacccaggccaccgagcggcatcggcagggagtcggacttcgcgtaacgacgaaggcccggcttggagatgcgcttgatgccctgaatggaacgctcaccgttcggaccgtacttgagggtgacctcaagagtctggccgaccttggcttccttagcggtgaagtccttgatgtagccttcgcgcttcaggatctcggcgatgttcgccttgaacttggagtacggcatatccacggtttcgtgcttggccgcgctcgcattacgcagacgcgtaagcatgtctgcgatcggatctgtcattgtcatttgggcttgttgccctttctcgctatggtttccgccgccctcacgcttcttctagaagcgttcgggccgcggaccttcagcgtcgatgtttaccaactggacttcgtaacgccgggcagttcaccgcggtgagccttctcacgaaggcagatgcggcacaggccgaacttgcggtagacggagtggggacgaccgcagacctggcagcgcgtgtaagcgcggaccttgaacttcggcttgccggccgccttgttcttaagagcggtttttgccatatcagttctccttgaaggggaagccgaggtgcttcagcagcgcgtaagcttccttgtcgtccttggtggaggtcaccacagtgatgtccataccgcgcacgtgatcgatcgaatcaggatcgatctcgtggaacatggactgctcggtgagaccaaagttgtaattgccctggccatcgaactggtggccgttgatgccgcggaagtcgcggatacggggcagcgcgagggtcagcagacggtccaggaactcccacatgcggtcgccacgcagggtgacgtacgcaccgatggcctggccttcacgcaggtggaactgcgcgacggacttcttggccttggtgatcttcggcttctggccggtgatcagggtgaggtccttgacggcaccttcgatgagcttggagtcgcgggcagcggcaccaacacccatggagacgacgaccttctggacacgggcaacctgcatcgggttggagtacttgaactccttctcgagctcaggaatgatctgctcgttgtacttgaccttcaagcgcggggtggccggcgcttcgacagtagtatcggtcatgccagctcctttccggacttcttggcgacgcgcacgcgcacggtcttcaccttgccgtcacgcgcctcttccttaacggtgatgccaacgcgggtcggctgcttggtctccgggtcgatgaccatcacgttggagcgatggatcggagcctcagtggagacgatgccagcctgctggccctgctgcgttgcacgcacgtgcttcttgacgatctgcacgccttcgacgatcagtcgatcgttggagagcacctgcttgacggtgccttccttgccgcggtccttgccgcggatgaccttgaccaggtcgccgctcttgatcttggctgccatgtcagatcacctccggggcgagggacacgatcttcatgaacttgtgctcgcgcagttcacgaccgaccggtccgaagatacgagtgcccttcggttcacggccggagccgagaatgacggcggcgttctcgtcgaacttgatgtaggaaccatccgcacggcgggattccttgacggtacggacgacaacggccttaaccacgtcgcccttcttgaccgacccgccaggaatggcgtccttgacggaggcgacgatcacgtcgccgatgccggcatagcgtcgcttcgatccgccgagcacgcggatggcgaggagttccttcgcacccgtgttgtcggcgacatgaagccgcgtttcctgctgaatcattgattctccttagccgagctggttctccccatttaccggggcatcgtggttgcccataatgccccggtaaatggcgagccttgccgaactttacttacttggcgcgctcgatgatggattcgagacgccagcgcttggtcttgctcagaggccgagtttccataatactcacgaggtcgccaatgtgggcgtcgttgtgttcatcatgggccttgaccttgctggtggaacgaacgaccttgccgtacagcgggtgggtcgaacgctgctcgagctcgacggtaatcgtcttgtccatcttgtcggacacgacatagccgcggcgaaccttacggaagttacgctcttcagccataatcacttctccttggattcggtagcggccggctcctggctgatgccaagctcacgctcgcgaagcacggtgtacatgcgggcgatgtcgctcttgacagccttgagacgggcggtgttctcgagctgaccggtggcgtgctggaagcgcaggttgaacagctcttccttggacttcttcaggaagccttcgatttccgcgttggtcttctcgttgagattcttgatggagtaatcagcggtaccgactgccatcagatatcaccaccttcacgtgcgataatgcggcacttcatcgggagcttgtcgatagcgcggcggagggcttccttagcgacgtcctcggacacaccaccgatttcgaacatcacgcgaccagggcgcacgttcgcaatccagaactccggggcacccttaccggaacccattcgggcaccgagcgggtgcttggtcagcggacgatccgggaagatcgtgatccacacgcggccaccacgcttgatgtagcgggtcatggcgatacgcgcggcttcgatctgacggttggtcacgtaggccggggcgagggactggatgccgaaatcaccgaagttgatctcgttgccgcccttggacatgccagaacgcacagggcggtgctgcttgcggtacttagtcctcttggggataagcattcttgctcactccttcgtttctgcagccggagcggcctcggcgggagcctcagccttgggggcttcgacggcctgcggggcggcggaacggttgccacggcgcgggcggcgatcgccaccacgacggcccggacggttgttctgctgagcctgctgctcttcgaactcggattcggtcatgtcgcccttgtagatccagaccttgacgccgatacggccgtacgtggtcttggcctcgaagaagccgtaatcgatgagggcgcggagggtctgcagcggaacgcggccctcacggtagaactcggaacggctcatttccgcaccgccgaggcggccggagagcttgatgcggatacccttggcaccggcgcgcatggcgtcctgctgggccttgcgcatggcacgacggaaggtgacgcggttggtcagctgctcagcgatgccctgagcgacgagctgggcgtccagcgcggcgttcttgacctcgaagatgttgagctggacctgcttgccggtcagcttctcgagcttggcgcggacgcgctcggcctcggcgccacgacgaccgatcacgatgcccggacgggcggtgtgaatgtcgacgcggacgcggtcgcgggtgcgctcgatgacgatgcgggacacgccagcgcgctcgaggtccttgctcatctccttgcggatctgatcatcctcaagcacgaagtcgcggtagcgttcgccggccttgttggagtcggagaaccacttggagcggtggttctcagtgatgcccagacggtagccaaacggattgatcttctgacccatctttagcgggctccttccttgttagccacgacgaccgtgatgtgggaggtgcgcttgttgatacgagcggcgcggccctgggcacgagcgcggaagcgcttgagggtcacaccttcgtcaacgtaggtctccttgatgtacaggtcgttctcgcggaacggctcgccggccttgtcggccttcacgcgagcgttggcgatggcgctctccagggtcttgcggaccggcagggccgcagcctgaggggcgaacttcaaaatggtgacggcttcggtcgccttcttgccgcggatgaggtcgaccatgcggcgagccttgcgcggcgtcacgcggacgtgacgagcgattgctttagcttccatgttctattccttatccttagcgacgggccttcttgtcgtccttcacgtgacccttgaaggtcttcgtgggggcgaactcacccagcttgtgaccaaccatggcctcggtgacgaacaccgggacatgcttgcgaccatcatgaacggcgaaggtgtgtccgatgaaatcaggggtgatcatcgaacgacgggaccacgtcttgatgacgttcttggtgcccttctcgttctgctcgtcgactttcttctgcaagtgggcgtcgacgaaggggcccttcttgatgctacgagtcatcttctcgatactcccttacttgcggttcttgccggacggacggcgacgaacaatcatcttgttcgaagccttcttcggacgacgagtacgaacctcgcccttgccccacggggagaccggcggcttaccaccgcgggtacgaccgccgtgcgggtggtcgaccgggttcatggactcaccacgggtgatcggacggtggccgatccagcgggcgcggccagccttgccgagctgaatgttggcgtggtcctcgttgccgacctcgccgacggtagcgcggcagcgcgcgtcgacgttgcggatttcgccggacggcatacgcagctgagcgtaggcgccatccttggcgacgagctgaacggcagcaccagcggaacgagcgatcttggcgccacccagcgggcggagctcgatggcgtgaaccacggtaccggtcgggatgttcttcagcggcaggttgttgcccggcttgatatcagcctgagcaccggtctcgatgacgtcgccctgcttgatgcccttcggcgcgatgatgtagcgcttctcgccatctgcgaagtgcaggagggcgatacgggcggagcggttcggatcgtactcgatctcggcaaccttggcgggcacgccgtccttgtcccaacgcttgaaatcgatgagacggtactggcgcttgtggccgccgccgcgatgacgggaggtgatacggccgtaagagttacgaccgccggtcttggacttcttgcgaaccagcgacttctcaggcgtagaacgagtcagctcggagaaatccgagacggacgcgttgcggcggcctgcggtcgtcggcttataaacgcggatagccataatgtagttcttcctttaacttttctcggctagccttcagttaccaaagatgtcgatcgtctggccctcggcgacggtcacgatcgcacgcttctgggaagcgcgctggccgaaaccggtgcgagtgcgctgcttcttgccagcgcggttgagggtgttgacgttcgtcaccttgaccttgaagatctcttcgattgcctgcttgatctgcaccttgttcgcatccggagccaccacgaaggtgtactggccacggtcggaagcggcgtagctcttctcggagacgacgggcttaagaatcacgtcgtgagcgggcttgtgaatagcgaccatctaaatcaggcctccttcggctcggtcttggcagccacgaaagcctcgaaggcttccttggtgaagaccacgtactgcgaggtaatcacgtcgtacgtgttgagctgatcgacgaaaatcgggtgaacggtcgggatgttgcgcacggagagccactcgttgatgttgtcgcgagtgaagacgaccgtggtgaacttgtccgcggtgatcggggccagggcggcgacagcggccttggtggacggctcggtgataccgaactccaccacggcaacgcgaccggcgttggcgcgatcggacagggcgtagcgcagagctgcggccttcatcttcttgggggtgcgctgagagtagtcacgcggctgcgggccgaacacggtgccgccgtggtaccactgcggtgcacggatggagccctgacgagcacgaccggtgcccttctgcttccacggcttcttgccgccgccggaaaccatgccacgagtcttggtggcgtgggtgccctgacgagcagcagcgagctgagcggtgacaacctggtggatcagcgggatgtgagcctggacatcctcggcggaaacgccgaagagagcctcaggagcttcaacggtgccggtggcctggcccttggcgtcggtgacgttcagagtaacgtttgccatggtttatcaggctcccttcacagccgagcggacgagaacgatgccgcccttggggccaggaatggcgcccttgatggcgaggatgccgttctcgacatcagcggagacgacggtcaggttctgggtagtggcggtcacatgacccatgcggccggccatacgcttgcccttgagaatacggctcggagtggcgcatgcgcccacagaaccgggacggcgctcgttcttgtgagaaccgtgagtacggcggtaggacttgaagccccaacgcttgatggtaccggcgaagcccttacccttggtggtgccggtcacgtcgacctcagcaccctcttcgaacaggtcagcggccagttcctggccagcctcgaactgatcgacgtcgtcggtgcgcacctcgacgaggtggcgacgcggggtgacaccggccttggcaaagtgaccagccagcggcttggtcaccttggtggggtcgatggcgccgtagccgagctggacggccttgtagccgtcagattcctcggtcttcacggcggtcaccacgttggtggacacgtcgacaagagtgacgggcacgaagaagccgttctcgtcccacacctgggacatgccgagcttcttgcccagcagagccttgcgattagacataatgcttcctcctcccttacagcttgatttcgatgttgacgtccgcaggcagatcgatgtgcatcagggagtccacggccttgggggtcgggtccacgatgtcgatgaggcgcttgtgagtgcgcatctcgaagtgctcgcgagaatccttgtacttgtgaggagaacggataacacagaagacgttcttctcggtcggcagcggaacggggccaacaacagttgcgcccgcgttcgtcaccgtttcgacgatcttcttcgccgattggtcgatgacctcgtggtcataggacttaagcctgatgcggattttctgtcccgccattgccgtccgccctttctagcgatgttcgttgtactgtttaccaacctgcttctagggcaccggcgcgcatggcctcccttggacatacgtcctctggcggtcatccgacatcagtgcgcggtttccggctgtcacttcacttgaagtgtctcccggcccgcgctcgcttttttaattccaatttgcgagcccaaatcaggcaacttgtttattcaagcattgaggtgggacagcgcggaggaattcgcgcgtgtcgcgctcatgccgttcgtattacctcgcggcatagccgctcggcgtcgcctaccaacatccttctgagacttacctatatatagtggcacagctcacgttggcgaatatggattgattaattgagttggacggtaacgcgaattactcttaaggctcgtgacacaatcactggcaaagaacatcaaacctattcgtgagcacggtgccaacgtgttatatcagcacggcactttggccttactcgtgccggggctgctggaaggcaccaccaccatcggcgaattgctcaagcatggcgacaccggcatcggcaccggcgagggcttggacggcgagctcatcatcctggatggcgtggcatacaagataggccaatccggtgtggccgaacgcgtgccggacgacttcaccatgccattcgctaatagccatcgcgcggccttccagtaccagtgcgagcgtcatgatatcggcctagaagagctcaacgaaaagatcgtcaaggcgaacggccgcgcgaacacgttcttttcggtaattgtgcgcggcacgttcagcttcatcaagacacgcgcggtcatcaagcagcaggcaccctaccccacgctggtagaggtggccgaccggcaggccgtgttcctgcgccacgacgtcaagggcaccatgctcgggtacttctcccccgtgatgtttcacggcgcggctgtggccggattccacgagcacttcctgtccgacgacaagacgttcggcggccatgtgctcgatgcggtgctcgagcgcggcaaaatctacagtcaggtgttcgataccttggtgcagcatctgccggtggacgaccctgattatcgcaaccacgacttcagccaagatccgatagccgaggccatttccagcgccgagggcgatactcaacgagattagtctcacataaacacaatgtgagccaaatgaacatttccgaacaatcgcacatgttgcataatggcggaagcactggcttctcgcacttcctatgttcgattgtcgcaatgcaggtctcacatctttcttattgagaaccattcgctgcgatatcatgacagatatggcttcccgccgcaagactcttaaacgcgattggttcgacaaccaacctggcgcatgggtaatggttatgctgcccgctgtggctggcttctttatcggcgggcctaatcttgatacgctttggctgttggcgacgtgggccgtgtgctattgcgtgcagttcagcgccgcgcactggttcaaagcacacttttcacgccgttatctgccgccgatgctcacttatgccgtagcgctcatcgtcatcggcttgccattcctgattacgcataccggcatactgcgttgggctcctttatatatagtactggttgcgctgtcgatgctgtcctcgtggctgaggaaggagcgctcgctgtggggcaatgccgtgtcggtgattgccgcatcggccatggccacggtgatcgcgtcgtttggcaacgctgttgagacggcatgtgttattcccatcaacgcagcacatgcctcgtgcgcagccgctgatgtcaccgccgcacgcgccgcgattcggaatatgccggatttgagccagatattcgaccttcacgcctggtggcctgcgggttcattgcccgtgaacgggctgattgccaccgtgctgtttgcgctgacgcagtatgggtcggttttggtggtcaaaaccatgatccgggaacgcgggaagcgttcgtacgtggcggcttcgtgggtatggcatgtggcgctattgctgctagccgccgtgccggctggacgcagcccgtatctgattgcgatgactgtgctgctgttggcccgcgccgttgcgttgccggtggttacacggcgcacaaccttgaagcccgtggtgaccggcattaccgaggcgtttgccagctttattgcttttggctgcattattgcggtgatttagcgacgctcagcgattccatggggcggtaattccctcatggggcggtaattagcccatggggcggacggtaaaattttaccttccgcagaatagagccgttttcgtacaccgccccatggggttttcaccgccccatgggcaagttaccgccccatggggttttcaccgccccatgggcaagttaccgccccatgagtaggttaccgccccatggaggcacctgccggctgagggagcgccacatatgcaaaggagcccggcccctgtaatggggtcgggctccttgtgtccgctatgcagccactaagctgcaacaccgcggttggtggctactgctggtgccagcagccgccaaccgcctgcaatcagcgctcggaggcttcctcagtggcggcctcaccctcgcgctcgatgcgtagcttgtggccttccgcctgggagacgccgtagtaagcaccgacggcgatgtccttcatgtcgttgatcagcgggatgcgcgggttggccggggtgcactggtcctcgtaggcgcgcatgccgatctgatcgagcacggaccagaagtaatcctcgtccacgccgcaatcctggaagctcttgttcataccgagcttgttatcgcggtagtcctcgacagccttcgccaggttctccacggcttcggccggggtcttgccggtgtcgatgccgaggttgcgggcgatgtcccggtagcgctccggggcgatgtacttgttgtacttcggccaagaggtgggctcctcaggaatctggccgttgtagcgaatcacgtacggcagcaggatggagttggtacggccgtgggcgatgtggcacagggcaccgatggtgtgggccatgccgtggcacatgccgaggaacgcggagccgaatgccatgccggccatggtggcggcgttgtgcatcttctcctgagcgtcggtcttggccaggccgggctcgccgttgacggactcagccaggttgtcccagatgagcttggccgcgtgcagggccatgccgtcggtgaagtcgttcgcgtacacggacacgtatgcttccatcgagtgggtcagggcgtcgaagccggcgtcggaggccagcttgcgcggctgggtgcgggccagcaccggatccacgatggccacggacggggtcagcgcgtagtcggtgatcgggtacttgtagccggtcttgtgatcggtgatcacggcgaacggggtgacctcggaaccggtgccggaggaggtcgggatgcacacgagcttggccttcttgcccagcggcgggatcttgaaggcgcgcttacggatatcgaagaacttctcgcgcacgtcggagaaggcgatttccgggtgctcgtagagcagccacatgatcttggaggcatccatcggggagccgccgccaaccgcgatgatcgtgtccggctcgaactcctcgcgcatcatctccgcgcccttttcgacggtctcgacggagggctccggctcgacgtagtcgatgatgcggaaggtcacacggttggagcgggcgcgcagctggtcgatgaccttgtcgacaatgccgagctgctccatgaccttatcgcacacgatgacggccttctcgatgccgtacatgtcgcgcaggtacttgatggcgttcggctcgaagtaggtcttggccgggatcttgaaccactgcatgttgttgttcctccgagcaatgcgcttgatgttgacgagattcacggcctgcacgttgccggacaccgagttgccgccgtaggagccgcagcccagggtcagcgacggggcgatggcattgtagatgtcgccgatgccgccaagggaggaaggctggttccagatgatgcggcaggcgtgcatacggacgccgtactcacgcacgagctcctggttgttggtgtggatggcggcggtgtggccggcacccagcttgagcatcttctcgcacatctcgaaggcctgctccttgttgtcggccttgagcacggcctgcaccggagcgagcttctcgtgggtcagcggctcgtcgtcggagatttccttgcactcggcggccagaatggtggcgtcggccggaatctcgaagccagcagccttggcgatgaactgcggggacttgcccggcaccacggagttcagcacgggcttgacgccggaaccggcggtgcagccgaacatgtactgctccagcttggccttctcttcggcgttgacgaagtaggccttacggaccttgagctccttgatgagctggtcgtagacgtccttgtgggcgatgatggcctgctcggtggcgcagatcatgccgtaatcgaagtgcttggagagcaccagatcgttggcggcacggacgatgtccacatcggaatcaacataggccggggcgttgccggcacccacgccgagggcgggcttgccggaggagtaagcggccttgaccatgcccggaccgccggtggcgaggatcgtggccacgcccgggtgctgcatcagcgcgccggtggcctggatggacgggtgctcgatccactggatacagttctcgggagcaccggcctcgatggcggcgtcgcgcacgatcttggcggcctcgacggagcacttctgcgcgccggggtggaagccgaagacgatcgggcagcgtgtcttcagggcgatgagggacttgaagatggcggtggaggtcgggttggtaaccggggtgacaccggcgaccacgccgacgggctcggcgacctcatcgatgcccatcacgtcgtcttcgcggatgatgccgacggtcttctggccggccaggtagttggtgacgtgctcacaggcgaagatgttcttggtggccttgtcttccacgagaccacggccggtctcgtcgacggccatcttggcgagaacgaggtgcttgttcagagcggcgatggaggccttggcgacgatacgatcaacttgcttctggtcgaggttctcgaattcgtcgagagccttcttggcgcgggcaaccagcgcgtcaacttcggcctcagctgcggcctgcttctcttctggggtcggattggcagcttcgactttcttctttgcttctgccacttggggtcctcctcgatcttcttggggtatatggcaaagttctgggccatcgcctcgtcacctcagttgcaccagcgggataccgcctcagtaaccgaaaatggccggtgatgcgttgtcacattgcatatgtgacttgagtcacaatataccgaacggtccggcgcgatgcatacgcacaaaatcgacggcgtttcacgtgcgatattgaacagtttttgttaagagttgtgcgaaatatcgaacaaatcctcactttattcggcgatttggtactttttgttcactttttaccgaaaatcacatgcttgcagacaacgcaatccgacaactttcttaaatcaagtttccaaaagtactcattttccccacatttctagaaaattggtttaaaaaagtgcccaaaatcgcctacaaatatacgattgttgcctcataatctccgcgtcgaggcacatgaaagccactttcataaagtatacttacatatatctcatcgcacaaaggggtaaatatgagggcaatgccatcgaccgcagtgaaagcgcacaaccgcagtgccatgacccagtatctgtatggccatagccatgtcaccaagcaggaactggaacgcgaactcggcctcagcctgcccaccatcacccaaaatctgcgcgccctagaagatgacggactcatccgcaaaggcgaactgcaggattccaccggcgggcgcaaggcgcaaaattatgagttcaatcccgatcatcgcactgccatcggcgtagtgatgcggtccaacgaactgcgcctgtgcgcgattaacctgtacggcaacgtcatcgaaaaacgcaacgatgccctgccttaccgcaacaccaacgtttactaccagcgtatcggcggcatcatcaacaacttcgcctccgacgtcgaaaagaagcacggcaaagtgctcggcgtctcgttcgccatccaaggcatcctctcccccgacgccaccaccatcaccttcggcaccattatgggcaacacggggcttacgctcgaaaccatcagccagtcggtccattacccgtgcatgatgatccacgattccgatgcctccgccatggtcgagctatggttcgactccacgctcaccgatgcggtgtgcgtctatctggagcgacgcccgggcggcgcggtgatcgtgggcggcaagctgtatcagggtccgaatatgtgcaatggcgccatcgaacacatgacgctggtgccgggcggccgcgaatgctactgcggccagcgcggttgcatggacacctactgctcgccggagaccttgcccgaggattacgaaagtattcccggcttcttcagcgtgcttgagcagggtgaacggcatcatcgcgagcgcatggacgaatggctggattacgtggcgcaggccatcgtcaacgcgcgatccatcatcgcgggcgacgtgattgtcggcggtgaagcagcccagcatcttgaagacagtgacatcgaggatctgaaggcgcgcgtcatcgcacgcagtccgttcggcaccgaccatttcaatctgcgcaagagctactgcgccgaagaccagaacatcatcggtgccgcattgcgattcgccgagaattatttcgacgatatctgtggtgctgcggaacgcggcaggaaatcaagggcttccaccagaagtgacaacacgtctacaatggaggtatgaaaaacccaccgttgcatcgttacgccactcgcccagggctgtacttcactgacgacggtggggctgacgtcgttgttcgttccgaaactgccgatcaggtttggctgtgtgtgctggagcccattgacgagcccggcgccttcttccaagacgccatccgcctgttcgaagacccgaacgcctcgttcatccagcagatccatgagtttccggtgtgcacgcgcattatcgaacatttgtatctgcgcgagaccctgttccgcatgaccggaccgaactacggcctgtggtacgtgcacctgcccaaagcatgggacggcatgcgttatggctaccgcgtggacggcgcatgggacccgaaacacggcgtgcgcttcaatccatacaaattcctgcttgacccgtatggcaagggcatcgacggctccatggagctcatccccgccgccttctcctatgaatgcgatgtcgtggatcgcaaggtaaccggctcggcatacggtgccatgagcaccgtagactcgctcggccatgtgccggtatccgtggccatcgacgatcgcgatatccataagcatgagggcgacccgcagcacccgcatgtgccgtggcgcaaaaccgtcatctacgagatgcatgtcaaaggcttcaccgccaacgcgccgtggctgcccaaagcgttgcgtggcacctacgccggactcgcccaccccacaacgctcgcctatctgcagggattgggcatcacctccatcgaactgctgccgattatggccaagcaggacgagctcttcctgcaagaacacggccacaagaactactggggctactccaccctcagctacttcgcccccgaaccctcctatgccaccaaagcagcccaagagaagggcgcggccgccgtgcgccaagaagtcatagacatggtgcgcgcgctgcacgaggccggcttcgaagtcatcatggacgtggtctacaaccacacatgcgaaggcggcgtcgaaggcccgacggtctgctggcgcggcctcgacgacctggcctactatcgccatcaaaaatccaataccggtcgactcgaagacaccaccggttgcggcaatacgctggacttcaccaacacgcatgtggtcacctttgccatcgactcattacgatactgggccaagcgtatcggcatagacggtttccgtttcgaccttggcgtcacgctggcccgcctggaaggcgaattcacccatcatcacccgttcctctacgccctgcgttccgatctgctgctgggcaacctgaagctcattatggagccgtgggatctgggcaacctcggctggcgcaccggccaattctccgtgccgttcgccgaatggaatgaccgcttccgcgacacggcccgcaccttctggcttgaggatgtggatggcggctccgatttcggtcgtatcagtttgcaggagatggccacgcgactctgcggctcggccgatctgttcgccaccgaacccgggcgcggcgctccggcctccatcaatttcgtgtcctgccacgacggtttcacgctgacggacctcaccagataccgctccaagcacaatgaagccaacggcgagaacaataatgatggctcgtcggtgaaccattccgccaatttcggcgtcgaaggcgtcaccgatgatccagacgtcatcacggcacgcgaacaggcggccatgaacatgatcggcatgctgctgctctcgctgggtacgccgatgatgctcgccggcgacgaattccgcaacacacaggacggcaacaacaacgcctactgccaagacaacgacatcacgtggctgaagtgggattggatgtattccaccaacaagacacgcgaaatgcgtcgcctgaaaaccgtgtctcgactggtggcgctacgtaaatcactggacctgtatcaccacgaggacttcttcacccgactgacccaactcggcctactcaagccctcaagccgcgtgcagtggttcctgcccgacggcaccacgccgatggagcgtgactggttcgatctgggcgtacgtagcttcaccatgcgattgctgtccaacagtgaggtggacgtgtgcattgtggtcaacggcaccgcagacgaccgcacattccgcctgccgccagacactcactggacgcctaaatggtgctcggccgaaatcaacggccgccgagccgggcatggcattcaggtcgaggaatgcgatttgaacgatgacaccaccgtttggacgcagcatgtaccggacgccagcgagacggtacgcacgctggtcgaagaagtggccatgcagcgcacggaatcctcgactgaggatgaagcggataccatcgaattcgcgatgccagcaacggatcacgccgcaaacggcacctcgtccgcgcctcgggatgaggtatcagctgatatgcctgatgcccctgtggatgatacgccggacactcccgtcgacgacaatgtctggaccatgccggcgctgagcatcacgctgatgaaacaggtgtgagtcacactcaaaacagcacgacacaaacacaaaggctctccgcggaattccacggagagcctttgcatgctcggtacaggacaagcgaaattaacgcttggagaactgcggggcgcgacgtgccttgtgcagaccagccttcttgcgctccacgacgcgagcgtcgcgggtcaggaagccagccttcttcagggcggcgcggttggcatcacgatcgatggcgttcagagcgcgggcaacgccgaggcggatagcgccggcctggccggtggtgccgccgccgtcaacgaggacgatagcgtcgaacttgccttcgagcttgagcagaacaatcggagagttgacctcacgctgcagcagcttggaggggaagtactcctccagggtgcggccgttgatggtccacttgccgtcacccggaaccagacggacacgggcgacagcctccttgcggcgaccggtgccgtagcccggctcgatcgcggaggtgccggtgccagcgccagcgttggtctcggtggtgtagttggtgagctcctcttcggtctcgacaacctgggagtcgttggtgttttcagccatgattcttatctcctctcaggtttcacttggcctgctgcgagacctgggcgatctcgaagacctggggcttctgcggggtgtgcgggtgctcggcgccgcggaagacacgcagacggtcgagctgcaccttggccagacggttcttcggcagcatgcccttgacagcgttcttgatgatgcgctcggggttcttctcgagcagctcggcgtaggagtcacgacgcagaccaccgggacgaccggagtgcgagtagagttccttgcccatcttgttgccagtcagagcaatcttgtcggcattgatgatgatcacgtggttgccggaatcggcgtgcggagcgtaggtcggcttgttcttgccgcgcagcaggattgcagcctgggtggcgagacggccgagcaccacgtcggtggcgtcgatgacataccagtcatgagtcagatcagctggcttcggagtgaaagttttcactggattaccttttctatattgtgttccgggtctcagctgcttggcgtggcttggtcagggccgcatccaagaggcatcgaacctcattatccgtgggctccctgaaagtcctcgatggcgagtgggatagcgctttgaaggaccccttagggaaacacaacaatccactagtatatcgccgggcttgacatagggcaactggggacactccattgggtttatggcttctcttcccctatttatggtttctcttccacccacttcggctaaccgactcgcctacggtgaggcaattccctgccttctctcagctatcgcttcgttcaggcctcgtctacggacagcccactggactgtccgcttaacgactcggctcgtcagagggaggtaaagtgggtcaggaattgaagatttgggcgaagcgttggacgccgggggtgtcgaagagggtttcgagcggtaccatgttgcccttggcgtcggccagcgggatgcgccagttcgggtattcgttgttggtgcccggctggttctgcgcgcgcttctcccccaccgcgtcggtgatcgaggcggcgagcagcttgcacggcgaacccttcagtgcgcggtacagcgcgtcgatgatatccgcctcgtgatcctcacgatgttcggcgaagtcggcatcaagatagccctgctcgaccagcatggccagcatcgcatcctgctcggcctttgcggaggcttcgaattcctcagccgggccggtcagcaagcccagacgctcacgaatcttgacgtgctcgtattccaggtaaccggcggtcggcggcaaatcgtgcgtattcacggaggccaatgcgtacggacgccactgggagggggcgcggaacacgccgtcgcactgttcgaaccattcaacggcgcaaccgagaataccgtggctcgacagggaatcggccacatggtccggcaccacgccgaggtcctcacctacgaccacgccgccggcgcgagaggcctcgatggccagaacgcccagcatgatgtctgagtcgtagtacacataagcgccatccatagccgaccggttctcgggaatccaccacaggcggaacaggccgagaatgtggtcgatgcgcaccgcaccggcacgggcgaacatgccatgcaccatattgcggtaggtctcgtagccggtggcctccagattgatcgggctcagcggcggctggctccagttctggccttgctggttgaacatgtccggcggtgcaccgaccgtggctcccttggcgaagcgctcgggattccaccacacgtcagcgccggaggggtgcacgccgacggccatatcggacatgatgccgatatgcatgccggcgtccttggctgcctgctgggcggaggacagctgctcggcggcaatccattccagccagcggtagaagtccaaagtgtccgggtactgcttgcgcagattggcgatttccggggagttgcggttgaacttgcgctcccagttgctctcctcgccgttgggtgctccccacttgtcgtagcacaggcaccacgtggcatacgcctccaagtcggaaccgcagtccgccttgaattggtcgaacgcgctttggcgttcggcggtacggccggccttgaagataatccacagggcgtgcatcttgctgcgccacatggcgtcacggtcgatgagctgggaatcaccgttcagcggttcggtgtcggcatgcagtccgtcgacggcgttcttgtcgcccgcgctgagcgtggcatattcggcgatcgcctcggggcggatgtacgtgaagttgatcaggcgacggcttaccggcagatacggcgacggggtgagcggggacaccggctcggcggcatgtaccggattgatgagcacgaagtcggcaccggtcttctgcttggcgtccaccagcatggtcttcagatcctcgtaatcgcccacgccccaggagttggaggagcgaatcgagtacagctgggccatccagccccacagactgccgcccttcatcgggtcaagcagatcgacgcgatcaggtgcactgatcaaagtggcgtcttgcacacggtcggcgaccttgacgtgcagcgtatggtagccaatcggcagatcggcgggaatgaccacagccgcattcgaaatgaacgtgccatccaagtcgtaggcctgggatccatctccaggaccaacttcaacggtgccctgatatggctcgccgttctccagcgtgatgctcgccgaaggcacgtccagaatgccggtgttcaccagcacccggtcctcgctaccggcgatatgcagcacggtgggtgccaccaatcgggagtaacgctcgttcagaatgcgtcggatggcgatgagttgggcgttctcgctggaggcgtcgatgcccagcgctgccagcacctcgatcaggacgtcatcgtctatctcgtggtagtcatggctcatgcccacataactcgtgccgacaccgaccaacttggccagtcgaatcaacggacgggccagacgctcttcactctcggtaatctcactcatagccccagtctaacgccgtttgattgcgccacaccgtaagcaaaatgccgtgattccgccaaattatgtactttttaccctcacatagtgagatgtgagcgctcacaatagtggatagagggtgattgccggccaaatttgcacggcaaaacacagcaatagtgtgcttagcggcggctttccacggcgtgccgcacctcggccgaggggtcgttggccaatttggcaagcatcgcttcggacgtattggggttcagcgccacggcacggcggaccatcgaggaaagcactgccggtgctccctcttcggattcggtgccaagtacgcccaagaaatccaatgtctccgcatccgcagtggggtcctgcgcaccctcaagccgcatcttccagctggtgcgcttgtttttcaacgccgtatcccggaccgcaggtaccggatccttggtcaggcggccgaccagccaattcttgtcatccccgttggcggccacggcttggcgcacggacggttcggggtcttcggagagtttgaccaatacgttcgggaacggcatggtgtcggcgaggaacacgcgatcggccaccggggtgtgcgggttgccggccacagcctccaaaagtgcggtggcgcgggagaacgccgcctgatcggcacggtcaggcaacggccgacgggcgaattcggacagttcggccgggtcggtggaatgacgcagacgttcgtatgtagcggtcagcggttcgaaatccaccggagcggcggactcggctgcggcctgcgcgccttggtcccgctgctgggcgcccgtgtcggttgcagtctcggttgcggcctcggtgggctgggtccgctggctggtggtgttctcgtcggtcatgatgcccagcttagtcatacaggcgtcacgcgagcggaaccggaatgttgaccacgtcaatcggatccggcaccaccgcggcattgaacgcttcccgcacacgctcctcgaatcgcacgcaatcatcttgcggcaccaccgcggtcagttcgacgttcaccgcatacgattcatcctcctggttgccaccgagctgcgccaggatctgctggaatcgggccaactgcgggtattcgagacggacccggtatcgcttggcggtcatgatgcgggcggcgcgggcggctttcatcgccaatgatgcagcggatgagtacgcgcggaccagaccaccggagcccagcagaataccaccgaaatatctggtgacggcaaccacgcaatcggtggtgccggactgcttgagtacgtcgagaatcggcttgccggcggtaccggacggctcgccgtcatcgctcatgcgttcggacagtcgcccatccgcgcctccgcacacggcggcatacgccacgtgtcgggctttcggatgctgctcgcggatcgcggccacgaacgcgagcgcctcgtcgagcgtatcgacatgggcagcgtcgccgatgaattcggactttttttcgacgagcgaatcgtgggcgggatcgtcggacgtgttgagaatcgtctgcataagcgtgttccggtggtcggctgactgggtgttcgattgagcgcgaggctagacaggactatcagtgttcggagacgacgacgttatagtcctcgccggcgaagtaggcggtcaggcaggcgatcatctggcgggtgagctccttgaacgcgccgtcggtacgccagccgacgtgcggggtcaggacgatgccgggcacatggcagatggcgtcgtcggcggtcagcggctcgtggtcgaacacgtcgagtgcggcgggaacatcgcccttttgcagtcgggcaagcagcgcaccggattcgatgacttcggagcgggcggtgttgatgaacagggtgccgggcttcacatgcgcaaggttctcggcggtgacgatgccgcgagtggcgttgttgagcggcagatggacggagatgacgtcgctggtttcgatgagctcgttgagatcgtcgaccggagtggcgccggagcgttcgaaatgctcgggcggcacatgcgaattccatgcggcgacctccatgccgaaggcgcgggcgatgccggccacggtggcgccgatgccgcccagtccgatgatgcccatgcgacggccggcgagttgcagtccatcgccgccggcccacgcccagttgccggccttgacatccttatcgagttggccaacgcggcggatgagctcgaacaggagggcgaaggtgtgctcggccacggcgtgatcgccataatgttcggcgttgcagacgcggatcttcagctcgcgcgccttatcgagattgatgtagctggcgacgccggtaccgcagaacacgatgcacttgacgtgcccctgctcgctgatggtgcgcagcagatcatccgaaatgtggtagccgcccaccagcagggcgtcggcatccttcagacgctcggctatggtcgcctcgtcggacgtgaattcctcgaacatacgcacgcgggcaacgtcgtggagcgcggggaactgggccttgatgggctcgatcatcgcgtcgagcacggacggcatcacgacgaggggcagatcggtgcgttcgctttgggtttcgtaaatctcggtcatgggctccacattaggaggccgacgggaaaagcgtcaccttgcggcttcccctccttgagaccaagccgagcaactattgctttgccgcctgctcctgcgtgatgttccattccttgacgacgttctggtccgcgcccatcgaatagatgacatcccagatgcgttggcgtatctgagcgtcgtaggcttcgtcccaacatgtgcctatgggatggtcgctggatatcgggcaccattggtagttgccttgatgcacgttggcggtaggcacccagtcgatgcggttgacgcgccacgaccccttgacgcccttcttgccggcgaactggatgcgtgcggtcacaccctggttgttgaccaaggtttccggcgtgttcgccgactcggtgacggtgttgcccagaccgtagacaatccacgtgccgttatagttctcgatgggctgcgcacaatggcagccggcaccgtagataacgtcgaaggcaccagtgtcggcaagctcatgggcttccgaaatctgccaggaatcggcgtaatcaaggtattcctgcaccgagtgcatggcgatggccaccacatcggcaccttgctcgcgggccttgttggccttgtctaccgcgcgctggatgtcgctgccgtgattcgggtcgccgtcttcgcgcagacgatccacctgccagtcctcgtcggcggtcatgccgttgagggagaccgtgccggtgaccagacccagcttgccgccgccggtcggggaatcgatgactaacggtttggtggagtcggcttcggttttgtacgagccggtctgggcgatgccatcggcctcaagcgtgtcccacagacgggcgatgccatccgccccctgatcccaggaatggttggtggcgtgtgtgcaggcgttgtatcccacgttgcgggcggcatccgccacttccggcggaatgttgaagatcgggtacgcggcatatgggccgccgcgctgggcgatcggggtttcgaattcgcacacggcgatgtccgaagcctgaatgtactgcttcatcggcgcgaacagcgggtcgaagttgaaggcggtgccatccgtggcgttggggttcgggccttggaaatggctccacaatccctcatggaacaacaaatcgccgttgaccagcatggcgatgcagtccgtatccgggcaatccggtgaattgccgtgatgttcggtcaccggtttgggcgtgttcttcgctttattcaacgcgacgtccgacactccggcgcgtgcggggccattgccgtccgtgcgatgggttgcgaaccatgcgccgatgcccagcgtaacggcgagcgtgatcacgaacacgataatcagcgccgcacggttggttcgtgtcgagttggagcgatgttgcccctgcccagcgatatggctcatctttgcccgcccttcggaactcttcttctctctctagtgtaccgcccatctcagtcaaacactgcggggaggaaggcgatgggcaagcgattggacaagcgacataaaccggttaatcttcaatcaccattcacgaacaccacgcaaaagtctcacttagtggacattcttctttcgtttgttagcctttccccgaggtgccgcactcgttcacccgctaaaatggcggtttggaggcggacggacaatggcgtacctccgactccgcttaccacaagcggagcccgaccgtcctcggttatttcggttatttctagcgacacattcccaggaaagtttcgcaaaacagacccccaagcaacccactagaaacacattcccaggaatgcgtcgcaaaacagatatccggacaacccaccagaaccgtagtcccggggttcgaatccctctgactccgcgaagtgcgaacaggcccatcatcaggagtttccggaaaacaaaaaagattccaagctttcacccggaaccttaatcggcggagtcagagggattcgaaccctcgagccgtttacacgactaacaccttagcagggtgcccctatcggccactcaggcatgactccacgttacgcaataatgcgcaacagcaaattactgtaccacgtcctgcggatacggcgtgccgaacgacacattattgaccgtccgcgggcgcggcatcgccggagaacgtaacgataaccgcgcaaatcaccaacgccacaccgatgatttcaccaacgccgggaatctcgccaaacgccagtcccacggccaccgccatggcgggattgatggattgcattaccgaaaatgcgccggatgtggtgcgtcgcagcgtgatctgctccaccacatagggaatgaacgaggccatcagggaaatcacaaacagcagagccagcagcttcagcgagccgccgggctcaagcgcccacgtggcatcggccttggggtgaaccacatgagccacagccggcacgccaaggaacagggactggaccagccagccgatggtcacggcgatgcacagattatccagcgaattgccgccagccgccacgcgccggccggtgatgatgtacatgccccacatcgacccgccgatcaaaatcgcaatcagaccatacaaaaacgtgccattgccggacggattggccaatgatatgccggccaacagcaccacaccgaccgccgcgacgccgataccgacccgttcacgccagcttttgccggtaatcaccgccaccgaaagcggtcccaaaaattcgatagacacggcaatgcccatatccatattgctgatggccacataaaacagggtattcatcagcaccagcgagcagccgagcagtacgaccagcccccagccgcgggcgtcgcggtgaaacagctgcgctcgcttagccttgctccagggcctgcaccacagcagcaacagcaccgccatgaatcccacgcggtaccacaccgaatacagcgggtcgagctgggtgaacgcaagtttggcgacggccgtagccaaataaatcaccagtgcctcaccaatcacgataagcaccacgggaacacggttgaggataccgaccactgccttcttcacgaggtttacgctactcggagagtcgggacagcgcgcagcgacttggaaggcgttacggacagtgacgcaatgtggacgattccgtggaatcgcacccaccatgcgaaacagccgcacagtgcgcaaacccttggaattccggcgatatttggcattacgacaatgagcgccgcgccatgcgcgccacatagtgagcatgacctcgttcggcattcctacaatggtggcatgagcaccgcaccgagacttgaggccgccaaacgcgattggggccacgacgagaccggatgcaccgtgctgcatatcgacatggatgccttctatgcctcattggaggtggcgcgcaaccccgggctcaaaggcaagccggtgatcatcggcaccgggccgcgcgcggtggtgtccgccgcgagctatgaagcccggaaatacggcatcaattcggcgatgccggccgcgcgcgcccatcagttgtgcccgaacggcgtctttctgccggtggatatggcgtattaccgcatgatgtcgcaccgaatcatgcacgaggtgtttttgaccgtcaccgaccggttcgagcaggtttcggtggacgagggctatatggatgtgtccgccgcactgctggagtgggggcggccgagcgcaatcggcgcgtggattcgcgctcaggtggccgagcgcttccacgtgacgtgttcggtgggcatcgcctgcaacaaactggtggccaaaatggcctcgaccaatgccaagccggacggcatgctgctgattccggcggcccgctcggctgagttcgtgcagatgatgccattgcgtggcattccgggcatcgggccgtctttggagaagcggcttaatgcttggggcgtgcattcggtggctgaattggctcagctggatgaggctgcattgactcgcgccactggctccccggctgcggcacgtggattatgggcggcctcgcacgggttggattcccgcaaaatcaccacggtgcgcgaggagaaatccattgggtccgaggaaaccttggccgaggatacacgcgatatgcgcgtggtgtgtgggctactgcgttcggcctgcgacgaagtagccagcacgctgcggcgcaaggggctggtggcgcgcacgctgacggtgaagttgcggttcgccgacctgagctatcagacccggtcttttacgatggagcggccgaccgatacggccggcgtgttgtacccggaatgcgtgcggcagctgaaagtcatgctggggctgccggcctcggcggagtctgccactcccctgcccaaaactattcgcttggccggtatgagcacgtcttcgctcagtgaggcggcggctacggccgtgcagccttca

SEQ ID NO: 761 - DNA, 6539 bp, Unknown
  R14_18m  MAG No. k141_1155
acggcgatgtccagctcggggacggtgacctcgtagtcggcggccagcgaatcgtgggaagcgttgaacagacggcccgcagccttgatgtcgccctgagcgaaggcacgcacgaaggaacgcacgcgctcgatctcggtgacgacgtggcgcacgcgcttcttcatggtctcgtcaggcagggcgtcaagcgtttccttgagggcctggaactggtcatcggccttggagatgccgtcggcggtaacgcgcaggttggccacaccaagaatcttggcggcttcctcgcaggtggcgcgacgctgagcgtactggccatcgttgagctggtgcggagcctgggtatcgaccacaagcagctcgaggttgtacttgtcgaggtcgaactcctgctgggagacgttctccagcggggtcaactccgggcggcagtcaagcagcagcgcatggccggcggtgcaacgcatggaagcgttctggtcaagaccgccggtggaggcgccggccatctcgttctcggacttgatggcggcgttgatgagggtcacacggccggcgtcggaatcgccgtagccaaggccgtacacgtcgtccagagccagagcggtggagcaggtcatggcggcggaggaactcaggccggagcccagcggcacgcaggagacgaaggcggcgtcaaagcccttgaccttgtcgaaaccagcctgacgcagcgcccaggccacaccggtcgggtaggcggaccagccgtccacgccacgggccttgaggccatcgagatcagcttcggcgaccttgtcgggagccacgccggagacgacgcgaaccttggtgtcttcgcgcggcttcagggcgatgaaagtgcggtgcggcagagcgatcggcaggcacaggccggcgttgtaatcggtgtgctcaccgatcaggttcacacggcccggagcagcccacacgccctcgggcgcagcgccgtaggtatcgacgaacagcttggtggcttgcgagacgccttcctcatgggtcagcggctcaatgaattcaacagcagtcattgatgttttctttctatcagtcggcgatgtcgatggagccgagctcgtggaagcgcttggcgatgagttccggcgtggtgtcggagatccaggcggccatgccggattcggagccagcgaggtacttgatcttgttggcggcacgacggaaggagaagaactgcaggttcaggcggtagttctcgcggcgggcgtcgtggatcggggcctggtgccaggcggcgatgtacggcagatccatgcccttgccgtcgcccttgtcgaagaaggcgttgccgcgcttcaggaggtgcgagtacatggaggcgaggtcccagcgttcttcgtcgttgagctggtcgagggtgagcacgtcgcgcaccggagccacgtggacctcgaggggccaacgggcggcggccggcacgtaggcgacccagctgtggttgcgcatcacgatgcgttcgccggcttcgagctcggcgttcatgatgtccttaagcaggttgccgccggtcttctcgtggtaggcctcggtgtgctggagttccttctccatcttcggggcgatgaacgggtagcagtagacctggccgtgcgggtgggcgagggagacgccgatttcctggccgtggttctcgaacgggaagatctgctcgatgccttccatcttggagatttcggcggtacggaaggcccaggcctcaaccacggtgcgcaggcgggagaccggcagatcggccggcaggccatcctcgttcgggtcaaagcagatgacctcgcagcggccggcggcgagcttcttctcccacagcgggttgccgtcaacgtaggtcacgtcctcggagacgccgggcacgcgcaccatggaggggaagcggttctcgaacacgacgacgttgtagtcggtgtccggcacttcgccgtcctggtacgggtcaccgggcttgcgggcggccagcgggttgcccttggcggtagcgccggggccggcggtgatcgggcggttcatacgggcggtggccatcgggatccagtcgccggtcagcgggtcgcggcgcatctgcggggcggcgtacggcacttcgttgccgtcggcgtccaggtgcggggcgaaacggtagtccagcgggcgcgggtccttgagctcgcgggtcttggcaccggagacgaactcggggtcgtcgtccaggtagaagaagtcacgaccgtcggcaagcgtcgtcggcgtgatgcggatgtgctccttcgcatactccccgggggtgtagttggcgaaatcagccatgggtttactcactttcctcaatgatctcgctctggtgggccagcacgagttcctttaccaaatccttggttttggcggcggagtcgggatcgagcccgtcgtcagtaatgaccgtgtccacctggtcgaagcgcgcaaacagcgacagcgatgtgcagctccacttggtgtgatcggtcaaaactatggtacgatcggcgatgtccatcatcgccatatcggttgcggcttccagcgaattcggcatcaggaagccacggggaatcgacaccgagtgggtgccgaggaatacggtgttgacacgcagcgaggcgacgaccttgtccgcgatcggaccgacaagcgagttcgatcgggtgatcacgccgccggtgacgatcacctccacgtccttggattcgagggcctggaccagttcggccacgggaatcgaattggtgaggatggtgatgccgctggactgctgcgattcgagcagatgctgggcgaagacataggccgtggtgccgccgccgatggcgatcacatcgccgggagccacatatttgatggcttcctgggcgatggcgtccttcaggccgagatccatctgggacttgacagagaacaggggttcgctgagcaaggtactggtagtcaccgcgccgccatggacgcgcttcagcagtcccttgtcggcaagttcggcgatatcgcggcggatggtcatcgctgacacacccagttccttcgatagcgccgtaatgcgcactgccccgcgcgtgcgcaacctgctcaagatgaggtgctgacgttgtgacgaaatcatgtgaacattatcgcacacaaaagctcacaaaccaaaccggcttgagcgttttggggacaatctctcgaaaattccgggcaattcaggtgttcatttccacaaaaccgcgcaaaatcgcacattgtgcgaaccgatattctcgcagcgaccactagcgcgatgactcacgaccgacgactctcccgagcgcgttgctcagcggcgagtcacgcctgatacctggtgcatcccgattcatgtatcttctgccgagccgacgcctgcgtgcgcctcgacacgcggtagccccttccccaattcgcctaggcaggaatcgcctagccgcaccagcccaagcgtgagacaataggcggtatgacttacgtttctgaaagcttctggcacgacgccgtcaacaaagccaccaccgatctgttcaccttcggctacaagcacatcatcaaaccgaacttcgtgttcaaccaccgccccgatgaggcacacgatcagatgatcgagttctgccacgtcgtcaagaacgtcccgccgctgctgctcgccgagcagctgatgctcgactacaccgaccccattctggaaacgaatgtgatgggcgtcgatttcaccaacccgttcggcctgtccgccggcctcgacaagaactgcgacatgcccgtggtgctggaccatgccggcttcggttttgaaaccgtaggctccaccacctcgcgtccctgcccgggcaacgccaagccgtggttccaccgtctgcctgaatacgattcgatgatggtgcacgtcggcctcgccaacatcggttcggacaaggtcatcgagcgcgccgagaaggcttggactcaggcccgccagatgcagctgtccgtgtcgatcgcccgcaccaacgacgaccagtgcggcgatttggacgaaggcattgaggattactgcatttcaatgcgccgcgccgccggccgcaccgcgatggtggaggtcaacgtctcctgcccgaacacgcacgtcggcgaaccgttcaccacgactccggaagcgctcgaccgtctgtttacggcgctcgacaagatcgaccgcccgcagcccacgctggtcaagatgccgttgaacaagccgtggggcgagtacaaggagctgctcgatgtgctggccgagcacaatgtgcaggggctgtccatcgccaatctgcagaaggaccgcaccggcctcgagattccgcgcgattgggagggcggcctgtccggcggcccgtgcaccaacgccagcaccgagctgattcgcaaggtgtataaggagtatggcgaccggttcgccatcgccggcatcggtggcgtctttacccccgagcaagcctatgcgaagattcgttccggctccagcctggtcatgttcatcagctcgctgatgtaccgaggcccgcagcagatcaccgtgttgaagcgcggtctggcccagctgctgcgccgcgacggattcgagcacgtctccgacgccgtcggcgtggacgtggagtgaactcacatattgccctattacccatggggcggtaaaaccctcatggggcggtgattgtcccatggggcggttagccaaatttcacattccgcagaataccgccgttttgggttaccgccccatgagggttttaccgccccatgggaaagtcaccgccccatgaggattcagtacgcaccggccacgtattgcggggcgtaggggacctctgtggacggtatgcccagcttgttggccgcacgcaacggccagtacggatcgcgcaatgcggcgcggccaatttccacggcatcggcttcgccacgggccaaaatcttggccgcctgcttcggcttggtgataagacccaccgcggtcaccggaatatcggccttggacttgacctgctcggcgaacggcacctgatagttcggcttgaccggaatcgacactcccgacatgatgccgccagtggacacgtccatcacatcgacgccatgctccttcagcaccttggatagtgcaatggtctgatccaaatcccaaccgccagcggcccaatccgtggccgaaatgcgcaccagaaccggcacgccctcggggacggccccgcgcacggcatccacaacctcgaccaggaaacgagagcgaccggtcaaatcgccaccatattcgtcatcacgctcattgctcagcgggtcaaggaactgagaaatcagatagccatgcgcagcatgaatctgaatagcctggaagccggcggccaccgcacggcccgccgccgcggcgaacgcaccgaccagaccatgaatctcatccacggacagcgcgcgcggcgtacgcagcccgccgaacgcgatttcagacggtgccatggtgggccagccgcccgcctcctccggcacactctgaccgtcgtaaccaacggcgaagcaaccggtcgaagccttacgccccgcatggttgagctggatggcaggcaccgcacccgcctcgcgaataccgtccacgatccagcgccaagcatcaatctgcccgtcttcccacaggcccagatcgcacggcgtgatacgcccttcaggagccacggcggtggattcgacgatcaccatgccgaatccgccgaacgcacgagacacgtaatgctggtagtggaacggcgtgggcctaccatcgcaggcgaacgacgaatacgtgcacatcggcggcaaccaaatacgattacgcacggtcacttcgcgcagcgtcattggcgcaaacagtcccggacggtccttgctggctttcttatctgccttgctcacagcttccctttcctcataatcctcataatcatcaaacgattcgctcgtcttgcccgcgccggcccgcttcttggaccgtgcgtcggattttgacttcttcttaccgtgcctacggttcctcgatgcatcctcgtgcttggtcttcggctgcttggactgttcgccgtccgaagacgaagccagcgtcaccgctttgagatccggcacgtcgaatccacgaaaatcaaaattctcatgcgtcagatcgtcgttgctcatcgttcccctttccaatgcgcgttcatggcgaatattcgatgaacgcgctggcgttgtcattaagtattgtaaaacgggcgtcacctgaaacaggtaacgcccgcaaactacgtaatttgggtatcgcagtcgactatgttacgtagactcagccggcctgcaatcaccaaatgtcaaacgccaatcaccaatcactggccatcattcgaccgctctgaattggtgccctgggtttgggtgttgttttgcccagtgttctgcgactgagactgcgactgggattgaccattggtggtcgtctgcgattggctgttgccattcgtagtggtctgcggcacgctgaacgttcgtccgccaatgcccag

SEQ ID NO: 762 - DNA, 20103 bp, Unknown
  R14_18m  MAG No. k141_1221
ccacgccggtggcggccgcggcctgcggcagaatacccatcatcacgaactcggcggcaccgagaatgaacgcgcccgaagccagtgcaagcagactcttcttcatggttcctctaattacttcagtattacttacaaaaacagtgcggcaatcgattgattcgagcgatatattacggtggtccgccaacaaatacgggccttgccgcgacgcggtttgtcgctgtgcgcggcgggttgtttaccgctgtccgatcgcttggtctgattgttgggttaggaaacgaaaaaccggattgctgatttctcaacaatccggtccagttgtcgggctggcgggatttgaacccgcggcctcttcgtcccgaacgaagcgcgctaccaagctgcgctacagcccgtttggcaacagacgtagatattacattgtggtggtggacaatgcaaatcggcatgtcgcgagtgttgcgtgatggtggattcgccgtgtgtacaggtctctcaagccttgtgcagagccggttttgcgtcatgtgagcgggtgttcagatggccgtacggtctgccgggctcataatcgccggccttgcgtacactgatgaatcatggctgaagttgtcgaaaataccgaaaacactgagaatgaaaccccggccgtcccgcagatgagcaccgtcgaacgtgcggaaatgctgctcgagcaggacgccaccatccgcgagaagatcaagtccggtgccacgctggacgaagccgtggacccctccaacaaggagttcggcccgctggctcaccccgagcaggtgcagatgcgcgtggccaagcgcgcgatgatgcttgaggccggcatcgccccctacccggtgcacttggacgtcaccgacaccatcgaggcggtccgcgccaagtatgacggcaagctcgaggctggcgaagagaccgaagacatggtcggcattgctggccgcgtgctgttcctgcgcaacgcgggcggcctgtgcttcgtgcagctgtccgccggtgacggtaccaagattcagggcatgatctccaagaaggagattggcgccgactcgctcaagcagttcaagcagctcgtcgaccttggcgatcacctgtacctcaagggccgcgtcatcgcctccaagaccggcgagctgtccgtattcgccactgagtgggctatcgcctccaaggccctgcagccgctgccggccctgcacaaggacctgaacgaagacacccgcacccgcaagccgtacatcggcatgatcgcggacgagaacatccgcaacatggtgcgcaaccgctccaaggccgtggcctccctgcgccgcacctttgacgaccacgacttcctcgaggtcgaaaccccgatgctgcagaccctgcacggtggcgcggccgcccgcccgttcaccacgcacatgaacgccttcgaccttgacctgtaccttcgcatcgccccggaactgttcctcaagcgctgcctggtcggcggcatcgatcgcgtgttcgaaatcaaccgcgacttccgcaatgagggcgtcgacgccacgcacgcccccgaattcaccatggtcgaggcctaccaggcctatggcacctatgattccatcggccagctggtcaaggagctcgtgcagaagaccgccatggacgtctacggctcgcacaaggtcaccctgctcgacggcaccgaatacgacttcggcggcgaatggaagaccatcagcatgtacgattcgctgtccgaggcattgggcgaggaaatcgtgccgaacggcggccctgagcatcccggcacctccgttgagcatttgggcgccatcgccgacaagctcggcgtggagcgcgacgacgtggagaaccacggcaagctcgtcgaacacctgtgggagcacttctacgaggacaagctttacgagcccaccttcgtgcgtgacttcccggtcgaaacctccccgctggtcaagggccaccgcaccaagcccggcgtggtggagaagtgggatctctacgtgcgcggcttcgagctggctaccggctactccgagctcaacgacccgatcgtgcagcgtgagcgtttcgtggcccaggccaaggatgcactcgccggcgacgaagaggcctgcgacatcgatgaggacttcctcgaggctctcggcgtgggcatgcctccggccggcggtatgggtatgggcattgatcgactgcttatcgccttgaccggtgccacgattcgcgagaccatcaccttcccgctggtcaagccgctcgttggctgattaggcatactctggctcccctcagagaggggagccagagttatatatgaaagggattgcttatgtctatcggcttgtgggttcggggcgcgcgtcccaagaccttggccacttccatcgcgtcggtgatggttggggcggtgatggcgtacgtgcatatcgagcggtcgggcacctgcatcgcaatatatccagaaccggcctcctgcgccacggcccgtgaacagcagaccctgctgatggaccgattctggccggtgaccatcctgtgcctgctagtcgcgctgttcctgcaaatcgccgtcaactatgcgaacgactattccgacggcatccgcggcactgacgccgggcgtgacacggacgaatcgaaatcaggcaaaccccagcgactgaccgcatccggactggtaccagccaagcatgtactgttcgcggcgatgatttgcgccgccatcgcctgcatatgcggtgttgtggcggtcgtgctcgcccaagcatggtggttgctggccgtgggcgcggcctccttgctggccggctggttctacaccggtggcaagcatccgtatggatatgtcgggctgggagaagtcggcgtgttcctgttcttcggcttggctgcggtattgggcaccgaatacgcgctgtgcggcacggtggacgtcggcggactattgggtgctgtggcggctggcctgttctcctgcctgatcatgatggtgaacaatatccgtgacatcgacgaggatcgtgagcatggcaaacacacgctggccgtacggctgggggagtccggcgcgcgtacgttgctgattgtgtgctgcgtcatcgcatggatcatcgccctgctgatgtgcggtacattatggtggccgtggggtgcggtgctgttgctctcgggcaccggaatacctgtgcgcatggtctccagcgtgaataaacgtcaattccgcccggctctgcccgccgccagcttccagaccttgctgtttgcggtggtgctggcggttgccgtggcgctatgagagcgaaataataagacgaatactcgtgtttgggcgcacgcggctgtagactgaaccgtatgacttataaactagtactgctccgtcatggacagagcgcatggaataaaaccaaccagttcaccggctgggtcgacgtaccgctgaccgagcagggtgaagccgaagccaagcgtggcggcgagctgctcaaggagaagaacgtccttccggacatcgtgttcacctccctgctgcgtcgcgccatcaacaccgccaacatcgctctggatgccgcagatcgtctgtggattccggttcagcgtgactggcgtctcaacgagcgtcactacggcgctctgcagggcaagaacaagaccgagatccgcgaagagtacggcgacgagaagttcatgctgtggcgccgttcttacgccaccccgccgcccgagatcgacccgaacgaccagtacgcccagaacaacgacccgcgctacgccggcgatccggttccggaagccgagtgcctgtccaacgttgttgagcgtgtgaagccgtacttcgagtccgccatcgagccggagctcaaggccggcaaaaccgtgctgattgccgctcacggcaactccctccgcgccatcgtcaagatgctggacaacctgtctgaggaagagatcgccaaggtcaacatcccgaccgccatcccgctgctttatgagctggacgagaacttcaagccgatcaagccgcgtggcgagtacctggacccggaggctgctgctgccggtgccgccgctgtcgccgctcaaggccagaagtgagcctaagccgctaacacggtacaagctgtaaggggagtcgcgcataatgtgtggctcccctttgctatgcctgccaaatccccatggggcggtgattaccccatggggcggtaaaactctcatggggcggtaaaaccctcatggggcggtaaaactctcatggggcggtatgccagaatggcttaattccgcggtttcacatatccttcaaaccgccccatgggcaagttaccgccctatgggtgttttgccgccccatggatacgccggtgtaccgcccagaagcaacaaaaaaacggcgtccagccgtagccggatcgccgctttcaggcatcctcctcaaaccataggaggacaagtgttcagttattcgcccaatgtgaggacaagccccaatcagtcgatgtcggtgccctcgtcgcgggtcggctccttggtggggtcgaagccggagacgatgtacaccacacggcgggcggcggacacggcatgatcgccgagacgctccaggaagcggcccagcagcacgatatccacggtctgctgacgggtgatgtcatcggacagcgccagatcgaaggtctggtggtgcaggttgtccagcttgtcgtcggccaggatgatggcctcggcggtcttggcatcgcgatcggagagcatggccaccagctggtcagcggtgttgtccaggaagtcgatcatctcggcgaacaccggctgagcggattcgggaatcgcggcggccgggtaggtgcggcgagcggcctcggccacgtggcgggcaagatcgcccatacgctcgaacgtggaagccagacgcatggtggaaacgaccacacgcagatcggtggccaccgggttctgcttggcgagcagcttgacgcactggtcgatcacagaggactccagggcatcaatctcgatgtcgccgtcaatcacagtctgtgcggcttcaacgtcctgattcagcagggcttccccagcgcctttgatcgccttgcgcacgttctgcgccatacggtcgaggtcgtcagcaacctgcttcagctcctcgttgaaaataacgcgcatttctctagcctttcatgcttgcttattgcaacctgtaccagtgtattattccagtacttgttccccacttcaacgtaggtaatggcaacctcaagttgttctactgttcattgggttgttcacctgaaattcatgttaccggcgcgccggcaaaccgcaatcccagcgtgtggtgtgaaagaatgggggcatgacacagatgccgctcgtcgccgcgattgctcttattgtcgcggctgttttatttgtggtgggaatcatcacgctcatcgtgggatttgcgacacatcgagtgtccgtggaatcgccgctggccgatgatgacgacaatgacgatctgtccgacgacaccgccacgctgctgtccatgctgccgggtgcgtccgtggtggtcgacgagcacgacgaggtggtccgctgcaatcccgccgcctaccgcctgggtgtggtgtcagatgacgccatcgcccagcagcaggtgctggatgccattcacgaggcgcgcaagtctggtggcaagcgccagttcgacttgaccaccgatactccggagcggtacgtcgcagaccagaacaagggcgatcacgtcgccacgcagtccgtccaccgccccaactggctgaaggtgactgtagggcgtatcaacgagcagttcgtcatcgtgttgattaccgatgtcagtgacgtgattcgtttcgctcaagtgcgtgactcgtttattaccaatgtatccgagcaattgttgggccccactgaagctctggccaaactcgccgattcgctggagtccggcaatctggacgaacagcaggtggctgccgatgctcgccaggtgcgttccagctgcagcaagctcaaccatatggtgtccgatttgctgctgctcatacgcgcacaggagccgattacgccgtcttccgccaaccgactgaacgttatggaacagctcgaggccacggtggcgcgactggagccgcaggcggccgcggctggcgtgcagctgaacatcaagggcgacgatgatctagtcatcaatggtgaggcggatcagatcgacagcgccgtgaccaagctcatcgaaaacgccatcggctattccaaggaaaatggtgtggtcagtgtgtccgcatccaaagacaaggatggcgaccgtgcggtgattcgcgtgatcgaccagggcgcgggcatcgcgaagaaggaccaggcgcgcatcttcgagcggttctatcggggtgcggaacagagcaatcgcacggcggatggcgtgggccttggcttggccatcgtcaagcatgtggcgctaacccatcatggcgatgtgaccgtatggagcgcgcccgggcaaggcagtacgttcagcctgacgttgccgttggcgcagtgaactttattactgtccgaggcggcggtagtcccagcggtcgaagtattcccaaatcagcagtagcaagccaataatgacaccggccacgcacataatcaccaacggcattacgctgtagcccacggccagcagaatcagcacgacaatcaacgccacaatccatagaccggtaccgatggcaaacaccttacgtaggtccacccgtacgggcttgggcgcgggtttgcggacggcagggtcaatgagaggcgcgaacttcatactcatgcactgtagtaagagtagggaggggcgtcaaacacctctccctacgatttattcaatcggtatcagttgagaccgatcaatgtgcatggcatatatggtcggccatgcgaggcatagaccgccatcacaggtgctcgaccacatagtcgacgcacttggtgaaggccatgacatcagccggttccaccgaggggaacacgccaacgcgcagctggttgcggcccagcttgcggtagccggcggcgtccacgatgccgttctctcgcaggatggacagtatctgggaggcctggacgcgctcgtccagatcaatggtgaccacggcgttcgagcgggcgtccgcatcgacgacgaacggagcggcgtattcggagcgctcggcccacgagtacaggatggatgcggacttggcgcaacgcgtggtggcccaggcgaggccgccgttgctgttgagccagcgaatctggttttccatcatgatcagggtggccacggcgggcgtattcagggtctgatccttgcgggagttgttcagtgccgtggtcagcgagaggaacggcggcacccagcgatgtgcgccttccagatgagcgcttgattcgacgcatgccgcacgatcgatggcttcgggggagaggatggcgacccacagaccgccatcggcaccgaaggccttctgcggtgagaagtagtagacgtcggtctggctgatgtccacgggcaaagcgccggctgcgctggtgccgtcgatgacggtcagggcaccggcttcacgactgccgggcacgcggcgaatcggggcggccacgccagtggaggtctcgttgtgagcccagcaatatgtgtccacgcccttggtgagctcaggcagacggtaagtgcccggctcgccggggaacagcaccgggtcttcaaggaagggtgcgttcgcggcggacgcggcgaacttggcactgaacgagccatacgtgccgaatgcggcgcgacgggtgatcagcgaagcgcaggcaatctcccagaacgcgctggcgccaccgttgccaagcgccacctcatacccttcaggcaggtggaagaactcgcgcagaccttcacgaatcgaagcgaccagttgcttgactggtgcctggcgatgtgatgtgccaagcagggtggtggcgccggcatcgagcgcggcgatctgttcggggcggattttgctgggaccggagccgaagcgaccatcttcgggcttcagcgactcgggaatactcagtgtgatagtcatggtttcaagggtagaccagtgttggggaatatcgcggataatgctcggtgtgcgggattgctgcggggctactgcggaattccggggtgccgggcggtagtagcggcaatgcggaatgcagtgcagaatgtacgcagcacatcatggctacggtgtgtcggaatgacatgagttagtgattcttccgataaccggatagtgaggttcgtgaacgggcggaaacaaggcagtttttcaccctgccgcacggttacgtaaatcgtttgacatgcccggatggtggggggtcgcattgaggattgacctctgttcgttgtacagtactcaattgtgccggtcatacggggtcgttgaaagggccccgccgaacccatccaaggagttaacgtagtatgaagcatgcttcgcataaagcgaccacggtctcgcgccagaagttcagcttagcgaaggcattgtttgcctccggcaagggttctcattccgttcgtgccgtgcgcgcggtgcaatccgctggcagcgacgccgttgttttggggcttgatccggccattgccgagaagatcaatgaaatcgctccccagactcgtcgttccattcgtgaggccgctcgtgccgctgaacgccgtagccatattcttgcctcggcctcattggccgctctggtcggcacggccgcaggtgctctcgcattttccaacaataaagacgccacgaactcgttcgtggctgatccggccacgacgaccacgcagattaagcgcatcagcgatgtgactgcggcttctcgttccgaagcacgtactgatctgagttcatcctccgttaccgcacagtccaccaatgaaggcggttgggggctgagcaattcagacagcaccttggacgccaagctgatgaatcgcaataatgcgaacaatcctgtggtgtcggctctcatggatgccgatggcgatgctgtgccggctggcttcaacccgaaccatgccgttggcaccaactccaacaactatccgtggggtcagtgcacgtggtacgcgtaccagcgtcgtgccgaactgggactgccttccagcggcaacttcggcaatggtggcgagtgggcggcgtcagcttccgctctgggctattgggtggacaacactcctcgccatgtcggtgatgctgtggtgttcgctcctggccaggccaatgccgatggcacatacggccatgttgccgttctggaaaagatcaatgccgacggctccattgagatctccgaatccaatgccaagggattgggtgtgatttcgacccgtacgttcagcgccgccgaagccggtaagttccagtacgtccactactgattcatttcattggcttacattcggtgattactgttcggatgtgacgtcgccctatcggcaatcgttcgcgcgaaatgacatttcaagtgttgcgaccgcgtattagtccgaactgacctgtgccgacacgccgatatatcccaatagctccggggtgttttatttcttccatcctgtacgagttaatgcgcaccgtgtaaggtgatggttctatgaagaccaaaactgtagcttcttccattgttgccgcgattgtctcctgtgcttgctcgtttatgtttgttcctacagcgactgcagctgagggtgttactgtgacttccaccaagtccttcccctcgtacacccaggtgcgcaaagatctgacgactgaagccactgccacgaatgttgaggacaatgctgattggggcggcattgagaacctcgacgtgccgcagacggaatctcaggcggaaaaggatgccgcagcggccaagaaggctgccgaagaggaggccaagaagcagacggaggccgaggctcaggcgacccagaagcaggccaacgccgcgagccgtaatgagtctcgctcttctgttacttattccgatgccagtggttcggtttccgctggtgccggtgcctctatcgaccgtgcgtattctttgatcggacagagcatggactgcaccgcattggtcagtcaagcgttggcggcccgtggtattaacttccacggttggcctgaagagtacgtcaatgttcccggtggccacgtagttatagacgggtccctgcagccgggcgatattctgatttatgccaacaccggtggatggaatggcggcgcgcactacgatcatgtggcgctgtatgtcggcaacggtcaggcggtccatggtggctggaacggctacagcgtggctctcgctagcgccatgaccgaaaaactcaccatcgtggtacgtatcccgtgatgcagtcttattgattgatatattgcaggcctcggatgccaatcggtatccgaggcccgttgcgttctcctgccgagtgatacacccgcgacatcatcttcgaaaagacattcctgttatgaaatcgacccatgtgtgctaaggtaaggcgctgatgacgaacgttaagaatattatttccacatcagtggcggttatcgccacgggtgccatgtttgcatgcgtagccccgtttgcctctgccgattccgcgcagacgagtgctatggtgtcctcacgttctttcccgaaggcgaattcggtgaagaagaatttgttcgccgaatccacctccacttcggttgacgagaactctaaatggggtggcatcgagactcttgatgtgccacagaccgagtctcaggccgagaaggaggctgctgctgcggcggcggctcagaaagccgctgatgaagctgcggcagcccagtccgctgctgctgctgcagccagccgctctgaacagcgtgcgtcgattccacaggttgacttgggtaaaatgactggcactggcgctgagcttgccagcttctcactgaagttccaaggctatccgtatgttgccggcggcaacactccggcaggatgggattgctccggttttgtacagtacgtcttctcccagtttggcatttccctgccgcgaacctctggtgctcaagccactgtgggtactccggtcgcaagcttggcggatgccaagccgggtgacattcttgcgaatggtactcatgcggccatttacatcggtaacggacaggtgatgaatgctatgaacccggtgcagggaacggcaataagcaacgtttccgtgttcggtggagctggatattccattcgccgcgtgatgtaacaagaattatgcggtaagcgaattcgtattaaggcacgtcctttgggatgtgccttttttcgtatacgcggatttctttttgagcggaggataccggccaaaccgagtgtcgcggggtattgttggaggtacgcggtattcgtgccacaataacttcaaggaggtcgtcatgattaacgacaaggccattctcgtcggcgttgacgggtcgcatgccagttacaaggcaacatggtgggccgcgaattatgcaaagcacgcggggctgacgctgcagattgtctgcgcatattccctgccgagctatgccgccgtttcgttcgatgcaacttacacggcgatgggggacgataacgccgcgcattccgatgctcaggagattctggccaaggccaaggccatcgcagacgagcagggcgtcgaagccgccacactgattgttaccggagacccggcatcggtgttcgtcgaattgtcgcgtaactacaatctgatcgtcattggtaaccgtggcaagggcggtctggccgagcgtctgctgggcaccacgtcctcgtcgctgccggcatacgcctactgcccgattgtagtggtgccgtacaccgatgatgacggcaacctgatgcacctgaacaacacgattaccaaggtggccgtaggctccgacgaatccaagtggggtctgaaggcgctggacattgccgccgacttcgccacgtgctggggtgcggaactggacgtgatttccgctgtgccgaacctgaagggcgtggatggcgaggatgccatcatggagtcctacaaggacgatcttgaggtgcgtatcaagccgttgcaggaatcgcatcctgatctgaagatcaacaagcggatcgtttccggcccggccgtcagcgcactgaccaaggccagctacgatcacgatgttgttgttgtcggctcccgtggtcgcggcggcttcaccggtctgctgctgggctccaccagccagggactgctgcagcatgcggccggcccggtgtacgtggtgccacgcaagtatgttgaggctgcggaatcgcgtctcgacaccgtgccgagctcgcccgccgaagtgcctaccaagtcgctggaggagattgccggcgtcgaggagattccggtgtccgcagccgagcctgaagtcgcccagcagatcgaaaagaccatcgatcccgacaggcagtaaagtccgggtatacaatgagctccctcatcagagggagctcaatttattagtacgtcggtttattagtacgtcagtgcttgacggtgacgttcatgcgcaccggggtctcctgtacgtaggtgtgcttgaccgtgcagcccttgtcgatatggcgggtgacgcgttccttgagcttgttggcatcctcctcggacaggctggcgtcagaagcatcaatcaccacctgctcctcgaaaccggtgtaggcgtcgttctcggggtcgtacgtgccatccaccacgatcttggcacccttgccctcacccagcgtatgttcgatggcgaactggctggacagcgcggcgcaaccggccagcgcgaccttcatcagatcgcccggcgtgaactggccacgatccttgccgaacttaatgtgcgcgccatcgtcgctgaacgcatcccacgaaccgtccttgttgcgttcaacccacagtcgcttacccatagctgctcctttattttcagccgccggcgatctggcccatcgccatgccagcgggggagcgcggcacccggccgctctcccgcatcatcggacttctctattatgcccctaagctacactggtgcacatggctttgaccgaagaacaactcgcagatattcgctcccgtatccccgcacgtcccgaaacggacattccgatgccctatgaggacctggtgcgcaagatcctgaccgaaggcacgctgaagtccgatcgcaccggcaccggcacgatttccctgttcggccagcagatgcgcttcgacctgtcgaagtacttcccgctgctgaccaccaagaccgtgttcttcaagggcctggcctacgagctgctgtggtttttgaagggttcctccaacatcaactggctgctggagcacaacgtgcatatttgggatgagtgggcggacgagaacggcgacctaggcccggtctatggcgtgcagtggcgttcctggcccgcaccgacccccgaggacccgaatcgcaccatcgaccagatctccaatgtgctcgacctcatcaagcatcatccggattcgcgccgcatgatcgtctccgcgtggaatccggccgaggtggagaagatggcgttgccgccctgccacgcgctcttccagttctacgtggccgacggcaagctaagctgccagctgtaccagcgttcctgcgacatgttcctcggcgtgccgttcaacatcgcttcctactcgctgctcaccatgatgatggcgcagcagaccgggctcaagccgggcgaattcgtctggaccggcggcgactgccacgtctacgacaaccacgtcgaccagttccttgagcagctgggccgcaagccctacccgtacccgaccatcgagattcgtaaggccgattccctgttcgactaccagtatgaggacttcaaggtcgtcggctaccagcatcaccccactattaaggcacctgttgcggtctgatgctgattaccatttcgtggacagcgaagactgtgaaggtgacgggcctcgagtcttcgctgtccactacactaaggcccagttccgcaatccaggaggagtaagcgaaatggagcatgacagtagccgtagcggctatcacgaacccgagcccggatctgccgggctgtctgccactgaagaagactggggtgacgattatcccaagaccttctcggtgaatcttatctgggccgaagcccgcgacaaggaaggtcgcgccggtgccatcggcctcaatggcggcatgccttggcactgtgccgaggatatgaagcatctcaaggagctgaccgtctcccatccggtgattatgggtcgtaagacttgggaatcgctgggggtcaagtaccggccgctgcccaaccgcgataacatcgtcgtttcccacgatccgatgtaccgtgcgccgggggccactgtggtcaccagtcttgacgacgcgctcgatatggcccgtcaggaggcgattccggacgacggtctggatcgttcggagatttggatcatcggcggcgcccagctgttcgccgaggcgttgccgttcgcggacaaagcctatgtgactgatctggccgtcactgtggatgccgacagctatgcgcccgatatggcgtcgctggtcgaggccgggatgtggcgggaagccgaagtgggtgagtggcgtacgcccgccaaggaggagtccggcatcgattcctatcgtttccgtatcttggtcaaaaccaagtaagcatgcgaatccggcttgtgtcctttatggcggcatgagccggattcatattcattcgaccccaaaaacacattcgggccgtgtgcggcccggtgaagcccgattgaggattgattcaaagctatgagcaatacccagccctacaccgtaatgaccgtctgcaccggcaatatctgccgttcgcctatgggcgagattattctgcgtcacttctttaatgagcgcggtctcggcgaccaggtgaacgtggaatccagcggtgtgtccgacgaggagtggagccatccgatcgacccgcgtgccgtgcgcgtgttacgcgaacgtggctatggtgatgagattccgcgtgaccacttcgcacaccgcatctcacgtgaggaaatcgaccgtaccgacctgttcctgccgatgaccgcctcccacatgcgcgccctgctgcgcatgctgccggccggcaagcgcgccgaagtgcacatgtaccgcagcttcgacccgaatctgcccaagccgaagcccggccgcgaggatcagattgatttggtggatccgtggtacggcggcaagcacgagttcgaggtcgccatcgaccagattgaggaagtcgctccgtacatcgtcgattgggtggcgaagcagctgtaggaatcggcctgtggccgatgctgtgtgtttcgcagtcttacgaccgcgggtctctacctccgcttcgctgcgttcagcacctccctcacagagggaggtggtcgccgaaggcgaccggagggagagatcaacgaaggagaagccgagcccaacctcagaacaccagctgcaccagtagcatgtatacgatcgtgccgccggcgattgaaagcagcatactgcgtttccagacgtgcagcagcacgatgacggtgcaggcgatgagttccggaaggccgtgtgaaccggtcagaatcggggtgttgcgcagtgcgtataccaccagcagaccggtcatcgcatagggcaggactcggctgaaatattcgatgacgcgcggcggctgcttggattcgggaaataccaggaacggcagaaaacgggtgcacatcgtccccagcaccaccgtcacgatggtgagcgcgccttgccagatggtcatcgtcatcgcgtctgtctttccttctgctggtccgctgcgtggctcatggcacggtctgccgtggcttccggggcgtcggcggccggccgcaacacatccagatgcgggcgcaacgcgacgaacagtatcagcatggcgatcattgagggaatcatgaaatcattggccccgaatatcagcaggcaggccagcgacgtcagcacaccgatgacggcggacagtctctcgcgatgcttgccggcgagccactgatcgaggaagatcaccagaaacagcgcggtcagtacgaaatcaagaccgtcggtattgaacggcagatgcgcgccaatcagcccgcccagtgtggcgccggtcacccaatacagctggttgcacagcgtgacccagaagtagaaccagcttcggtcgataccggcggggattttcgcggtggagttgatggcaaaggtctcgtcgcacatgccgaaaatcaggtacggacgcttccagccgagccccttgaatttgccgagcatggatagtccataaaacaggtgacgggcgttgaccatcagggccagcagaaagccggcgagtgggttgaacgcggagagcagcagattcaccgtgacgaattccatcgaaccggcgaagatgaacgcgctcatgcacatcggccatacaaacgagaagcccttggtgcccatgagaatgccgtatgaggcgccgagaaacaggaatcccaggcaaatcggtatggtcagcggaaacgccgctttgagcgccggcaaccaggcgttggtgttggcggtgtctgccatgtggatgatgttctccttgtgcaactggtctgccggccgatattcgccgataatgccatatgtggttatacacgcatggtgccgataaacgaggtgaggacggtgtcgggactctgtgcgcgaagtcacagtgtggatgatgtcacatcgtctacggtgggacagtccttgtggcgggcgtgaacacgtgctgagatgaaagcatgagcacatatcaaggtaacgaaccatcgcaaatcgtctacaccgctacggcgcaggttacgggcggccgcaacggccacgccgtgagccatgagccggaactggagttcgacctggacacgccggtcgccatgggcggcaagggtcagggcacgaaccccgagcagctgttcgccatcggctggggcgcctgcttccaaggagcgttggcgcttgccgccaaggagcagcgcgtggcggccaccaagttggccaagagtcaggtgcgcgtcagcatctcgctcggtcctgaaggcgagtccttcggcctgaagggcaagattgaggtagtcctgcccgatcttgacgatgaggctgccgccaagctcgtcgagcgtacgcaggagctgtgcccctactccaaggccaccgcgggcaacgtgcccaccgaggtcgttgtggtgaagtcgctggactgaagccttccgggttgaaacccgagtccaagcattcggcccgtttccttcagggaagcgggccgaatgctttcaggcctggtcccgcgaatacgaaaagacctcggtcgctatgaccgagatcttcaatgaagtacccccagagagagtcgaactctcgttgtcagattgaaagtctggtgtcctaaccgttagacgatgggggcgaacaactcgaattactttacgggaggttgttcggttatgcaaatcgacggcatttcggcgtgtcgcaatcagttcagggtgacggcctgataggtgaagtcgtggatcgcgcggccggcggccaggcccttcttttcgaagttggtgagcacgcggccctcgaaccgctcggattcggtgaagtcggcgtgcggcatgtcggcggccatgtcggcattgcccttgcccacgtgctccagcgggaggctgacggttatgctgcccaggttcttccagccatcgaggccgtccatcacctcgtgcacgtgcagggcgtagtcctcgatgtcggtggcgatgcgccagacgccgtctgtgaccagcgcgcgatgaatgtcgccggccatggcctcctgcacgatgcggcgcttgtggtgcttcttcttgggccatggatcggggaagaaggtccatacctcggacacggtgccgggcgcggtgaccttgaacagctcgggcgcattgacctgggccacacgaatgttggtcagcccctgcttgccggcgagcagcagcgtgtgggccacaccggggtcatagacctccaaggctaggaagttcgtctccggatgggccgcggctgcggccgccacgttttctccctgcccggtgccgatttccacaatgagcggattgtcgttgccccatgaggactccacgaacgcgcggtcgagcgtgacgccttcgcgcacgtccagcaggttgccggccgcaatgtccaacagatatgtgtcggcatagttgtcccaggcgcgctgcaggcgatcgtccaaacgtccggagcggcgcacgaaggaaagcaccttgtgcagggggtgcgccggtgcctcggtgtggtccgcggccatcgcggtgacggaatcgattgctgtggattcgggatcggtcatatattcctcggattttccttgtgcgccgcaccgctgttcattcgttaggtcgatttggcgttcattaggtgggtggtgtgcgataccaaccaccatatcaagccatttacccggtgttcgtgcgggccggctccgggccgacctacctaatgaacgccagatcgacctaatgaatgcagatattgccggacgacaccaccgttttgtgcgattatgttcgtgtgatatactcaaattgtttcaaaaggtaacaaagcggaccaaaagtgaacagccgctgaactccacacggccgacacttgcaacccgcataaggaaaggtcaactatgacagttctcgtcaccggaggctgcggctacatcggcgcgcatgtcgttcacgcacttcatcaggccggcgaaaaggtcgtcgtcgtcgacgatctgagctacggcaagcccacccgcatcgaaggctcccgtctgtacggcatggatatcgccgctccgggtgccggcgagcgtctggccgaaatcctcgacgccgaaggcgtcgactccgtgatccacttcgccgcgcgcaagcaggtcggcgaatccgtggagaagccgctgtggtactaccagcagaacatcaacggcatgctcaacgtgctcaccggcatgacccagtccaagaacgccaagaagctcgtcttctcctcttccgccgccacctacggtgtgccgccggtcgatgtggtgcccgaggacgtcgtcccgatgctgccgatcaacccctacggccagaccaagctgttcggcgagtggatggctcgcgcctgcgagcagccgttcggcatccgcttctgcgcgctgcgctacttcaacgtggccggctgcggcccggtcgaactcgaagacccggctattctgaacctcatcccgatgctgttcaaccgcctcaagcagggcaaggcccccgccatcttcggcgacgactacccgaccccggacggcacctgcgtgcgcgactacatccacgtctccgacttggccgacgcccacatcgccgccctcaagtacctcgaccgtgacgagcgcaagtacgacgccttcaacgtcggcaccggtgaaggcacctccgtgcgccagatcgtcgacgaagtcaagaaggtcaccggtctgccgttcaccgaggctgtcatggcccgccgcgccggcgacccgccgcacctgatcggctccccgaagcgcatcaacgaggagatgggctggcacgccaagtacgacgtggaagacatcgtcaagtccgcgtgggatgcctggcaggccaaccccgaacaccacatcgacgtcgacacctggaagcaggctgactgagattgacgattgctttgcggtggatgccgtgaagtgcttctgttcataagggcgtgaccggagttccggtcgcgcccttcgtcgtttgtggatgtttatggcagacgtgtccgtgtgctggtgatagcaaaaacctgaaattacgcggaacacgccgaaatttgcacgaccggcgaatttcagtaatatatacatctgttgcctcacgcaagtgagaacaatggccccgtagctcagttggttagagcgccgccctgtcacggcggaggtcaccgg

SEQ ID NO: 763 - DNA, 28612 bp, Unknown
  R14_18m  MAG No. k141_1234
ggatcgtacttatcgtcaggcaatcagcgcagcgggcatgggctgccgtgcagcgctggatgcgcaggcctatcttacggactgattgcggcgacctgatgatggcttgctgttctgactgctgcctgtgacataggagcaacgttaggtcagtattacagcatgccgcccttggacagtacgtaccagtcagaggcatagaaagacccctcaggcgacggagaatcacgatgtgtgattgtccctccagcctgaggggttttctattgcgacaggggctacaacgcaggcatacacccctgccaggaatcacgcagaggctataacgtcttgcgcgtacaacgcactgcacagcaataatgccggcgacagtgacaagccgatacaatgccaagtgacaacgctaagcatcggtgttgtcactgacgatgccggcgacaacacgaatgtttttatcgtgttacacccatttggaatcggcatcgccttggctcggcaccagcagctgcaggatgcgatccatatcctctggtgacgagaagacgatttcgatgcgaccatgcttggtgctgcccttaatcgacaccttggtgtcgaaatgattttccaaactctgctggatggcggaaccaacccaaggattggtcttggacgtcttgggcttcttcggctgctcccccgacgcaatcttcatggcgacgatttcttcagtgctgcgtacagaaagaccttccgcaataatacgagaagccagcttgtccatttcctccggatcgctcaggcccaatagcgcacgcgcatgaccggacgatagcacaccggcagccactctcttttgcacagaggccggcaggttcagcagtcgcaaggtattggcgatttgcgggcgagacttggacaccgacttggacagttgtacttgtgtcaacccgaactcttcaatcatctgctggtaggcagccgcctcttccagcggattcaaggccacacggtgcaggttttctagcaatgcatcgcggagcatatcatcatccgcagtggttttgacgatggcgggaatcgtctccaacccagccaactgggatgcacgccaacgacgttcacccataatgagctcatacgggctgtccaaatgaccggcaaacggatttgtgctggattccgtctcgtcgtgcttggcggctttggccgcagcaatctggcttgccggacgcttgcgcacgactatcggttgcagcacaccaacttccttaatggaagcagacagctcattcaactcatcctcgtcgaagatggtacgaggctgatgtgcattgggcccgatatcagacagtttgagttcagccagataaccaccggctaccggcttgagctcgtccttcttatctgtgtcagcggtctttgccgccgatgcagtctgagatgtttcacgtgaaacatctttgacggtgacggatgtacgatgtgccgtctgagacgcagacggcttgccgccctgctgaggtgcggcgaccttaccggtttgaggtttctccgtaccgaaaaacaggtcgctaggatgagtaatggtgtccaatgcgggcatggatgcgcgtttaccggcggctttcttggctgctttgctggacgataccatctgaggcacggcaggctttgattcctgctgggcagtagccttcttggcgggggttatgtcagcagtggccgccggagtagacgaatcctcctcaatcattgcgggctgctccgccactggctcctcccctggcaatgtggggaacaaagcgccaaggcccttaccgagtcgtgattttgatgccattacttgttcctcctcgcatcaatggtgtcaaggacttgttgcgaacgctgtgcgatttccaaagctgcttcaccatacgatatggcacctatgccacgaggatcataggcaatcaccgattgggagaaactcggcgcttcggagatcttgactgaacgcgggatggtggtattcagcacaatgctgggatagtgtcccttgacctcgttatatacttcacggctcaatagcgttcggcgatcgaacattgtgacgagcatggtggacaccagcagtactggattgaaatgctcctgcaccaaaccaatcgtgttgatcagctggccaagaccctccaatgcgtaatactcagcctggataggaatcagcatctcggtcactgcacacatggcgttgatgaccaaaaggcccaagctgggcgggcaatcaatgaacacgtaatcatagtgtttatctgattgacgcaggtagaggtccaaggcctccttcaacaatgtgtttcggttgggcagatcagccacttccaactcggcaccgctgagatcgattgatgcaggcacaacatcaagtgtgggaaaatcaggacagaccgtgataacatcacccagatcggaacgcccctcgataacgtcatagaccgagggctctcccgatgcatgagatacacccaacgccgtagaggcattgccctgcgggtccatatcgatgaccaacacctgcgcgcccttgttcgccagcgccgcagcggtgtttaccgtggatgtggttttacccactccccccttctggttggccacggcaatacgacgggtacgttgaggtttggggaaattggttttcttgagtacatcgtagcgtgagctttcatcagccatctggctgccaagcactgaaccgtgaccatcgaatattcgctgaagcgtttcggaagccgattctataggttccgactgatgatccttggtggacatcgctcctccttgcacagacgtaaattccagtgttctcattcgtatggacatgatgctcgttatccacaattgcgatatgcaatgtggataagtgtggataagtgtgaatgacgttgagtgttagattatgtattcgcagacgaaaaacattgaaaaatcagtgttttcatcattctgcacatcgtcccgtaaaaatgtggataacttttacgcatatatggaaatgtggataactcaatcagtactccactcatcgcttatccacaatcaccacgtgggtaggctcaagatccggtccgacagccgcctcaacgacgcgtggacgacgaccaccgaattttgcaatctccttgccagccttgtcgatttcagcctgagcagaccgtcccttcagtgcgatcaactgtcctgacggtttcagcaacggcaacgtccagccagagagtttggtcataggagcaaccgcacgacacgtgacaacagcgaacggatgaatttcccgcttccgtacctgctggatgacggcatcggagcgtccacggataatctcaacgttctgcagttgcatcaggtcaacacattcatgcaaccattcgattcgccgctccatcggttcaatcagcgtgaagtcatgatcaggcaaacacgcggcagccaccaatccaggaaaaccaccaccactgccgacgtcggcaactgttttgaagcgaataccattcgtcacattccgaacgtacggcacaatcgcagcggaattcagaatatgccgttcccaaatgatatcgacgtcacgggggccgattaatccacgaggttcaccctcttcggcaatcttggcatggaaacgctccaacttcggcaacgcatcacccaagacctcagcaagtacaggtgacccctgcagctgatccgtcatagccatctccctcaccatgtttcacgtgaaacaatcaacatggaaaaggcgtcgctcattacgacgccattctccctacggtcactcttgtttgtttagagacgacatccgttgaacgtccttgtcatctcaaaaactcgtcgacctattactcctgatcaagctcgtcgtcttcggcaacatcctcgattttgttcttgagatacaccgtcacgtaacgatgaggctcctcaccgtgcgagcgagacttcagcccctcttcccgaaccacatcgtgaacgactttacgttcgaaggaattcatcggcttcaaatcatacggctcgccggaatccttcactgcgtcaatggcatccagggcgatatcacggaggtgctgacgcttgcgcttcaggaaaccgtcgacatccacaatcagatgagaacgctcgccggtcttctgctgtacagccagacgagtcaattgctgcagagcatcaacgacttcaccattatggccaataagatgtttgatgtcggtatcgtcatcagcaacgatttgcacggtggggcggtcattacgcacgcccatctcaatgtcgccctcatagtcggcgatatccagtaggccttcaaggtaatccgcggcgatgtcagcctcttcgttgagctgatcgatcgacttcacgtcatcctgtgccatacgctactccttcatgtcgtgtttgaattccaagtctaagccctgctcccccgaacagagaaagtaatgtcggtgcgtgttgaatgtttcacgtgaaacatcgaacgcgcaccgacatggtcgtcacttctttttgcgcttacgcacgggctgttgacgctgatagccctgagtggccttacgctcagcctcttccttggccttggccaatgcttcttcttccagagagggcaggccggcctttgcgcggcgagcattctcattacgatgatcgcgcttctccttgtccgccgcagccggagagccaggggtcgggaatgcatacacctgccacagcgtacggcacaagttgcaaacgttgttggtcagccagtagaccagcacggcgaacggcatggtggcaccagagaagatgtacatcaccgggaagagccacagcatagccttctgcatggtctcggcctgtttgttcatcgatgcggcgggcatgttgcgcttcatgttgaagtactgcataaaccacaggcagaagcacatcaggaacacgaaggtaccgatgaccaccttgcctgcagtagatgcgcgggtgaagttatcggtcacactgacaatgccgaacacatcggtttgggtgaattgcttggcggttgctacgtcgaacgcgcccaacgcaccgcgtttaccgttggcaatgtagggaatggccgacagcgtatagaacatggacatgaacaccgggccctgaatgagcataggcaagcaggagccagccggattggcgtcattgtcttgatacagtttcatggtttcacggctcatggcctccttggaagcctgatccgtcttgcctttgtacttgttctggatgcgcttcatcttcggcgccaatgcctgcatcttgcgcatcgacttcatctgcttgcagaacagcgggaagatacacgcctgcaccaccagcaccaggatgataatggcaagcacccatgagacaccaatcgggctcatgcccagcatcgcgaagaagtcatgcacgatcttcatgatccaggtctgcaaccactcaacgggagtcaggattttatatagaaatccccaaaacccgctatcaagcagaaattcatttgagttcatcgttgggcctctctttgggttgtggccaatggtgtcagtcggggctcttcatgagccttcgaccacgaaaatctgtaaaaaatggaataccgttgtggaacatcgtcgattcccccacgactccacggccggcaacgcagtaatctcagcatggcgagcactccccctttgaacgcgccataccgttccaatgcctcaatggcataattcgagcacgttggataatacttacaacaaggcggtgtgtttgccgagatgtgctgttgataccagcgcaccccaccaatcatcaccgccttgaaagaagctgtcatgcctcagccaccttatgcgccactgtggcaaaagccttcgcgatctgctgatctagcgaagcgaacgatgcggtcgcggcactgggcttggcgcgcaaaacgatatcgcaatgcgcgggcagcagatcctcatgggctctggccaatacacgaaacctacgcttcaccgtattacgggtgaccgcatgtcctaccgatttggagacagctaatcccaaacggcgatgcaccgtccggtcgtcatcatcatgatggtcgtcgggcaccaaatagtgcacgacgatatccttgccacctgctttgcgccggcgtttcagcacggtgacgaaatcacgatggctttgaagccgctccacctcgactatgcctgtggcactgatcggaatgatcaggcggagagggacttgcggcccttggcacggcgacggttgatcaccgcacggccagaacgggtgcgcatgcgcaggcggaagccgtgcttcatgtggcgacgacggttgttcggctggaacgtcctcttcataatccattgctcctaggtctattcggcaacgcttcgcgctgccctcacgtgagtcaagctataccaaagtactctcacccctaccctcaagtcaaaacggacggagtattttcacatttcgacacgttgcgagacacgcctcaaatctcttataatcggcggaataccaaccattcacggccaaaagttatccacaaattacatgtctgttattcacaatccagttatttcaacacgcgacacggtggataacttgtctaaaccagagtaaatattatctgttgtacagatttcgccacaccgatagaaggggccaccatggttaacgcttccggcgaccccgtaatcgaggccgcccacatctggtcagacacgctgacggtgctcaaacacagcgcttcgctcagcccacgagaaaaaggctggttggaaggcgttgttcctgaaggcgtcttcggttcgaccatcgtgctgtgtgtggacaacaacgatacgcttcaagccattcagggtgatttgaacgattccctgcttcaggcattgcgtacggtaaccggcgaaaatatgtttcccgcgttcaaggtcgtgccgaaaaccgagcccgaaccgctttcggcggcaaagccggcgcagccatatccttcggaaatttctccgaccgtcgccgagttcggtaaagaatcctatggtgcaaagccggtagccgcaccgcgggaaccgatgcccgccaccgagtcgcagttcccggtcggtcagcagaagatgaatcgcgatcccgagactcatctcaataagaacttcacgtttgattccttcgtgcccggcgattccaaccgttttgcccgtacggtcgcactggccgtggccgaaggttccggtcaggatttcaacccgttgtgtatctatggcggatcgggcctgggcaaaacccacttgctgaacgccatcggcaactatgcactggtcaaggatcccgggctaaaggttcgatacgtcacgtctgaggaattcacgaacgaattcatcgacgcgctgcaaaacccgaaccaaagccagggtcagattgctgaattcaaccgtcgataccgacaggttgatgtgttgcttattgacgatatccagttcctcggcggcaaggaagccaccttggatcagttcttccatacgttcaatgcactgcatcaggcaaataagcgtattgtcattgcttccgatgtggcacccaagaatttgaagggtttcgaggctcgactcatctcgcgcttcgaatccggcctgaccgtagacgtcaagccgccggatctggagacccgaatcgcaattcttcgtatgatcgcctcgatgaacggttcgaaaatccccagcgatgtgttggacctcatcgccgaacgcttcaccgagaacattcgcgaacttgagggcgcgcttacccgtgttacggccgtggcctcgctgagtaatcagccggtgacccgcgccttggccgagcagacgttgcaggacttcttcaccaccgatgtggaaatcaagcccacggacatcatcagtcaggtggcgaagtacttccacctgacgtttgaggatcttgtcggtaaatcacgaaccaaaaacgtggctgttcctcgtcagatcgccatgtatctggctcgcgaaatgaccagtatgagcctgatggatattggccaggtctttggcgggcgcgatcacaccacagtaatgcatgcctgcactcgaatcagtgaccgaatgcagcaaaaacaggagatctataactacgttatggagctcacggttcgcctcaagcaaagcaacaccaactgacacaacgcttctgagagacgaaaaacggcacttttcggaaagtcagtccgaaaagtgccgtttttggttgctcaggcggattctggtggatacgtcgaggcaacggattcgagacatcagattcctcatggctcccctttgtgaggagagctgtcgtcgcagacgactgaggggagtttcgaaggggaacacgcaaaaaaacccatgaaacgagagaatcgattctgaggaccgattttgcgggtttgggcgagcgagacgaaaaaagtgccgaaaacggtctccagaatcgattctcctcgacgaaaaacagccttcaacacgccgtgcgaaagtacgaaaaccaaaaaagttatccacacagttgtgcacagatgtgggtaaactcggcggataactcgtggattacccactgttttgttgtggaaaactcgtgcataaccgcgacctcgatgtggaaaactcaaattcgacgaactggctgtggaaaactcgcccacttatccacaagccatgcagaatttgtccacaattttcagggacttatgaaccgttgcatttgtagggctcacccctacttatccacactatccaccggccttattacgacgattacttactcagttacgtgaaaagcatcatcgccacagtaacagccagtcacccatcgtacgtaagttcgccacctaacggctagaatatttctcagccaatccgacgaagggaacaatcacacatgaaagtcgaaatcgatactgcagccctggccgacgccgtagcctggacctcccgagtcatcgacgcacgtccctccaacccgattctcgctggcgtcaagctggaagccattgacggaacgctgcaattctccgccttcaactacgagatttccgctcgccaccacatcgaagccggcgttgacgaagccggttccatactggttcagggcaagctgctggccgatatcaccaaatcgctgcgttcggagaaaacgtacctggtcaccgacggctccacgctgaccatcacgtccggcaagtcgaagttcaccttgcagctcatgcccgacaccgagtacccggatctgcctgtggtaccggccatgctcggccaagtcgatgccccgactttcgttcaggcagtgaaccaggcatgcgttgccgtctcccgcgaagaaaaccgcccggtactgaccggcgttcgcatgcaattccaaggcgacaaggtcgtcatgacctccaccgatcgcttccgtttggcccgcgccaccttcacttggactccgcagaacccggacgtcgacaccaccacgctggttcgcggctcactactcaaggatgtggcccgcgctcttgatgagcaccagaacatccgccttgatttcgacgccgatagcccgacgctgctcggcttcgaaaacgccggccgcgtctccacttcccagctcatcgacggtgaattcccggcggtcgaccgcctgttcgccgacgaatacccgattcaggccgtagtcaacaagcaggatctgctcgacgccatcagccgtgtggctttggtcgccgaacgcaatgctccgattcgcatgaccttcaccggccaggaagtggcgctgtccgccggatcggtcgacgaggcccaggccaacgagacactggacatcgacatggatggcgacgacatcaccgtggcattcaacccgtcctacctgaaggagggtctgtccgccgtgaccgaaccattcgtgcgcatcaagatgacgaccccggtcaagccggtcgagttcaacggccagcaggaagctgattccgacgagtccatggactaccgatacctgctcgtgccgatgcgctttaacaactgaagtccctgaatttccaacgattcgataatgcacatctcccgtctcgcactcgaccactaccgctcatggagtcaggtagtggtcgatttcgtaccaggcgtgaatatcctgttcggcaagaatggcttgggcaaaaccaatctggtggaagccgtcgaagtgctgtccaccggatcgagccatcgcacgtccagcacgttgccgctgatcgaacgcgggcagaccacggccaccatccgcgcgaacgtcgctgatgatgccggtcaaaccactacgtatgaagcgtcgattcatgcgcgtggtgcccaccgagcccgcatcaactcggggtcgtcgctgtatctgcgcgatatcatcggcaagattcccagcgtttccttcactcccgaagatcagcgattggtgtccggcgatccgggagcacgccgcaccatgatgaatcaggctgcggctctgctcgagcccggatacatgcagacgttgcaacagttcacgcgcatcgccaaacagcgtgccacattgttgaagcaattgaatgccaatgccaacaatggccagccgatggatgcggttctgagcggtttggaaatctggaccggccagttcatcgaagccggtgtggcgttgacccgtatgcgcgctcatgtgatcggtctgcttgccgagccatttgccgcgatttacgccgacttggccggtgccggcgagcaggtgacgctcacatatgcgccttcattcgacgaagtgctgatgttcaacgatccgcatccgcagatcagcgagcatttccaacgcatctaccccggtgaagtggctcgcggcgtgaaccttatcggtccgcagcgcgatgacatgaaccttgacttggccggtattcccgcccgcgagttcgcttcgaacggcgagatgtggacgatggcgttggccttgaaaatggcattgtttgaaatcgtgcgtgaccggttgggattgcagccgattgtgattctcgatgatgtgttcgcccagcttgacgacagccggcgcacgcagattcttgatttcgccagaaaacaggatcaggtgctgattaccgtggccgctgaaggcgatgtgcccgactatgaatcggcccatcgcatcgacgtggccacactggccgaacccgcttccgtaatactgccaactctgggcaatttgtccgattcgcgggaaaacgagagtttgggtaagtatgacggaaaacccgcggtggacagcgcgtccgtagaacggaaagcgtcatgaacccgccgatcgcccgccaactcaacctggacgagaccaaactgccggccgaaatattcgagcggctctcccgtcgcggggcgaccttgaaggactacagacgccgccgtgaagaggccatcgaaaacttcggcaaaccggggcgcgatccggctgaactgggcagcgtgatgaccaccatcgccggcaatggcgtctgggcggcgaatatgaagcttgcacaattgcgcaaccattgggaccaagtggtggggcaggccattgccagccattcggcagtcgccgatttcacggacggtgtactgaccatccgtgccgaatccacggtctgggccacgcagctgacctaccttatcccccaactcaccgataccatccgtcgcaatctcagaggattgaccatcaccgagattcgcgtgaccggcccggccgccggatacacgcgcaaatgggctcggcggcggtagccaagataccaaacaaattcgcagaagcctcgctatggcgctcgtcgggttagacgagtaaaatcacatgcagtatggtcaaatggctagaagagtcctttacgggcctcgtaagccatatcgcctccgtgaatgaccttcatgacggaggttgaccctgtagtcacggaaggaagcctgttggcagacgaaaccagcaaagaggagcagctgaaggcggctgcggaacgcatcaacaatgcggaattgaccgaaggcgaacttgacgaatccatggctcccgagcattatgaggcctctgatctgagggtgctcgaaggacttgaagccgtgcgtatccgccccggtatgtacatcggttccaccgggccgcgcggtttgcaccacctggtctatgagatcgtcgacaactcggtcgacgaggcgctggccggatacgccagccatatcgaggtctccattctgccggacaacggcatccgcgtggtggacgatggtcgaggcatcccggtcgatgaggtgcccggcgagggcgtctccggtgtggagaccgtgatgaccaagctgcacgccggcggcaagttcggcggcggcggttatgcagtgtccggcggtctgcacggcgtgggtatctccgtggtcaacgcactctccacccgcgtggacatcgaagtgcgccgtcagggcttccactggacccagacgtacatcgaccagcaccccaccgcgcccttgaagcagggcgagccgatgaccgaaggcgagtccaccggtacgtccgtgactttctgggccgacccgaagatcttcgagaccaccatctacgacttcgagacgctgcgttcccgcttccagcagatggccttcctgaacaagggcctcaaaatcagcctgaccgacgagcgtgagaacgaccaggccggcgacgaggtggccggcgacgccgcggacgagcccggcgcaaagcaccagaccgtcacctaccagtacctcaacggcatcaaggactacgtcgagtatctggtcaaggtgcgtaaggccacgccggtggaagaggacgtcatcagcttcgaggccgaagacttgaagctcggcatctccgccgaactcgccatgcagtggaccactgcctactctgaggccgtgcacaccttcgcgaacacgatctccaccaccgagggcggtacccacgaggagggcttccgcgccgcgctgacttcgctggtcaaccgttacgcgcgagacaagggcatcctcaaggacaaggacgagaacctctccggcgacgacgtgcgtgaaggcctgaccgccgtgatctccgtcaagctcaccaacccgcagttcgaaggccagaccaagaccaagctcggcaactccgaggccaagaccttcgtgcagcgcgtgatgaccgacaagctcggcgactggttcgacgcccacccgaacgaggccaagaacatcatccagaaggccatcgaggcctcccgcgcccgtctggccgccaagaaagcccgcgagaacacccgccgcaagtccatcttcgagtccgccggcatgcccgacaagctcaaggactgccagtcctccaacccggaagagtgcgagctgttcatcgtggagggcgattccgcaggcggttccgccatccagggccgcaacccgatcacgcaggccatcctgccgctgcgaggcaagatcctcaacaccgaacgtgccagcttggaccgcatgatgaagtccgacaccatcgaatcgctgatcaccgcggtcggcggcggctatggcgaggacttcgacatctccaaggtccgctaccacaaggtcatcatcatggccgatgccgatgtggacggtgcgcatatcgccaccctgaacctgacgctgttcttccgctacatgcgcccgatgatcaccgccggctacgtgtacgtggccatgccgccgctgtaccgcctgaagtggaccaagggcccgcatgacttcgtgtacaccgacgccgagcgcgaccgtgtgctcgccgaaggcaaggccaacggacgccagctgcccaagggcgaaggcatccagcgctacaagggtctgggcgagatgagctaccaggagctatgggagaccaccatggaccccgagcaccgcattctgaagcaggtgcacatcgaggacgccgccgcggccgacgagaccttctcgatgctgatgggcgatgaggtcgaaccccgccgcctcttcatccagcgcaacgccaagaacgtgcgttggatcgatgcgtaacggaatcctccaacctccctcgtcagagggaggtacacaacggacttagacaactaaaggaacaacagtggtagatgaaaacaacaccggcgacgagcagttcacgccggacggctcgatggagccgttgagcccgcaggaggcggacaccaccgactacggcctgatggacaccggcgaacgcatccagcgcaaggacctgcagcaggagatgcgcgagtcctacctggcgtatgccctctccgtgatcgtcgagcgcgccctgccggacgtgcgcgatggcatgaagcccgtgcatcgccgcgtgatctacgcgatgtacgacggcggctaccgccccgatcgcggctacaacaagtgctcccgcgtggtcggcgacgtgatgggtaagtaccacccgcacggcgatttcgccatctacgacactttggtgcgtatggcccagtcctggtcgatgcgcaacatgctcgtcgacggccagggcaacttcggctcccccggcgatgacccggccgccgccatgcgttacaccgaatgccgcatggccccgctggccatggaaatggtgcgcgacatcgacaaggacaccgtcgacttcgtgcccaactacgacggcaagacccaggagccgaccgtgctgccggcccgcttcccgaacctgctcgtcaacggttccgccggcatcgccgtcggcatggccaccaacatcccaccgcataacatgcgcgaggtggcggacggcgtccactgggcgctcgaccacccggacgccagccgcgaggaactgctggaaaacctgatccgcatcatcaagggaccggacttccccaccggcgccaccatcctcggccacaagggcatcgaacaggcctaccgcaccggccgtggcctgatcaccatgcgtgccgtggtcaacactgaggagatcaacggccgtatgtgcctggtggtcaccgaactgccctaccaggtcaacccggaccgcctcgtcgtctccattcgtgaggccgtgcgcgacggcaagatccagggcattgccgacatgcgcgacgagacctccggccgcaccggccagcgcctcgtgctggtcttgaagcgcgacgccgtgccgaaggtggtcctgaacaacctgtacaagcactcccagctgcagcagaccttcggcgccaacatgctggcgctggtcgacggcgtgccgcgcacgctgagcctggacgccttcatccgccactgggtgaaccaccagctcgacgtaatcgcccgccgcaccgcgtacctgaagcgcgaggccgaagagcgcgaccacatcctgcagggctatctcaaggccctcgacatgctggacgaggtcatcgccctcatccgcgcctccgaagacaccgacaccgcccgtacgggccttatggggctgctggacatcgaccaggtgcaggcggacgccattctggccatgcagctgcgcacgctgacccgcatgaaccgcgacaagatcgtggccgagcatgaggaattgcagcgcaagatcgccgactacatcgacatcctcgccaagccggaacgccagcgcaagatcatcggcgatgagctcgacgagatcgtggccaagtacggcgacgaccgccgcaccaagatcctgccgttctccggcgagatgaacgtcgaggacctgatcgccgaagagaacgtggtggtcaccgtgacccactccggcttcatcaagcgcaccaaggccgacgaataccgcgcccagcaccgcggcggcaagggtatcaagggcaccaagctgcgcgaggacgacgtggtggatcacttcttcctgacctccacgcacaattggctgctgttcttcacgaacaagggccgcgtctaccgcatcaaggcctacgagctgcccgagggttcgcgcgactccaagggccagcacgtggccaacctgctgcagttcgcgcccgacgagaccatccagaccgtgctgtccatcccgaactacgaggtggccaagtacctggtgctcgccacccgttccggcaaggtcaagaagaccccgctggccgagtacgattccccgcgccagggcggcctgatcgccgtgcgcctcatggccgacgagaatggcgagaacgccgacgagctcatcggtgccgcgctgtgcaacgccgaggatgacatcatcctggtctccaagctcggcatgagcctcaagttccaggccgacgacgagcagctgcgtccgatgggccgccagaccgccggcgtgcagggcatgaagttccgtaacgacgacagcctgctggccatggatgtggtccctggcgactccgacaaggacctgttcgtggtgaccaacgagggcttcgccaagcgcaccgccatcagcgaataccgtctgcagggccgtaacggcttgggcatcaaggccgtgcaactggtcgagggccgtggtgccctggtcggcgcgctcgtggtgtccgaagacgatcaggtcatggccatcatgaagtccggcaaggtgattcgttccaacgtggacgaggtcaagcgcaccgggcgcaacacccagggtgttaccttcgccaagcctgacaagggcgacacgattctctccatcgcccgtaacgaggagaaggacgagcccgaggacagtggcgatgccgcggcgaacggcaccgccgagaccgcacaatccggcgagaatgtgaacaacgcggacgaggcgtgagcagcgtcctgaaaagctggtagcctcgcatacagcagaggctaccgccaagcctgttaaggagaaacgatgagcgagaatctcgaagacaacgagccccggatcataccgccggcagtcggcaatacgcagaacgatcatgtcgagccgctgatcggtactgagcacgctccccgcgtggcacgctccgtgtccagcgatccggaagaatccacgttgccttcttcaggtgccgccactcccgtgcgtccggcacctcgccgtagcgcccccagggctcgccgcatgagcttgtcgctgacccgcgtggatgcttggtccgtggccaaggtgacgttcatgctgtccatcgccgtggcgattattcaggtcgttgcctccgcgatcgtatgggtgctgcttgatgtggtcggtgtattcagccagattacgcagattgtgtcttccaccggtcttgatgcaggcggtttcgatctcaagaacgtgttgtcccttaccaccgtggtctccggcgtcaccatcttctcgattgttgaagtggtgatcttcaccctgctggccaccattgcggcactgatctacaacgtggtcagctcgctggtcggcggcgtgcacgtcacgctcggcgacgactgatatagctatactggcagaactcccctcagtgaaccgcaccccggttgttggactgaagtaattcagattcgatgatcggaggtgcggtttcttatgtgtggggtccgtaggcgtcgttgctgggccgagacttgggactccggcgacgctgggggtggcaggcgtcggtgttgggacaggttttgtatctctgacgacgctgtggagggcttaccgtcgtcagcggtacagatcttggagttctgccgatgctgagggtgtgttctgtgtcgtttgcgtccaattcttggccctctgccgacgctgggcacagcaagcgtcgttgctgggccaagttttggactgccgccgacgcagagaatgcacacagcggtgttggtctgccagcgtgtggcagcttggcgccgttgaggaaggtctatgtggtgtggttccgccaaaggactggcaggttggcgctactgaggggactttatgggctcttccggttttggcgtgtaggggccgtgcggtttcattcactttttcaatcacacaccgaatcaaaccgcacggcccctacgcaccaaaatgcgaagagccggtttcgctaactagtgcctatatgcctgcaatcaggctgatttgtgctgtcaggctggctggcgtcagcggttgatctgccgatgttgctgctcgtcagtctggactgttgggctttcgttttgacagcggaaggaagatcctcctcgcggtagggcaacaattatcagtatcataattaaggtaatcgtgattacattaaccatgatactcttattattgggcggtaggcggatcggagggctgcaatgtttgtcgcacgagagcacgagttacaagtgctggaaaagctgtttaccagtgattcattcgaaatggtggtgctgtacggtaggcggcgtgtagggaaaacggcgttgatcgacgaatttgtcaaagataaacgcgtgctgtacttcacggccatacagcaaagcgccaagatgaatcttgaagatttctcaagagcggcattgtcgttctttggtatgccggattccaccccgtcgtttggcaggtggtctgatgcgttatcgtttgttgctgaacgtgctgcacagactgacgaacgtatggtgttcgtattcgatgagttcccttatgcggctgccgccgagccagcattaccctccatgttgcagatagcaattgaccatggattcctcgccacaaaagtgacgatgattctatccggtagtaacgagggattcatggaaaacgacgtattggggcgtaaaagcccgctatacgggcgtcgtacagcacagattcgactcctgccattcgactatgcggatgcggcaaaatttctaacgaacacatctccgcaagaactggtccaatactatgcgactttcggcggtacgccatattatctggcccgtatacaggaagccgatggctttgaatccaatgtgctgcgcttgatgttcgacaacttgggcgtactgcgtgaggaacctatgatgctgttgcgtcaggagcttcgtgaaccggcatcgtattattcgatattgcaatctattgcgggtggtaattcctcgccaaagcttatcgctgaacatgcgggtgtcggatctgattcgattggagcatatctgaaaacgctggtcgatttgcgcttaattgagcgaaaagtgccgtttggtgaagatccgagtaaatcgcgcaagggaatgtatgtggtgagcgatcccttctttgcatattggttccgctttgtggggcgcaacatgagcattttggatggtaatatcagcgaggaggttacgagcagactcgcttttggaccagcgtttgatacctatgttggtcaacaatttgagacgatttgcctgcaatggcttattcgaaacaacgctatgggcaacctcccctttgttgccactcagttcggcaaatggtggggcaatgatccgattgctcacgagcaaaccgatatcgatgtgattgctgcggattcgctcgataaaacgattctgttcggtgaatgcaaatggcgtaattcattcaacgaaacggaggctattgaaaagctccatcagcgtgctggcttagtccgcggctatcaggcaggtaatgcgtggcttatgctgttcaccaagaatccggtgagtgagtccacgcgaacccgctacatggatgatgaacgaatggtgttcgtttccgcggaagagttatacactgcgtgatgcattactgggtgattgtgacgcggtatctagagtcctgccgacagccacgtggcaattacgccgaatcacgcaccaccaaatcggtgttcaggtgcatcacgcgcggtgaagagactccgttgatggctttgatgaccacgtcggccatggtccagcgcgctgatccatgtgctgatcgacggtggtgagttccggggttatggaggtggaagctaagttgttatcgggcttacgtatttggggatagcacttgttgctcgttgtacatatagcaatgcccttgcctcctcacgggaagcaagggcattacgctactgcttagtactgctcagaggcaagcgtcacagcacgccctgggcaaccatggcgttggcgaccttgacgaagccggcggcgttggcgccgagcatcaggtcaccctcgtgaccgtattccttggcggcggccagggagttggcgacgatctcttccatgatggacttgagcttggcgtcgacctcttcgaaggtccaagacagacggtagctgttctggctcatctccaggccggagacggccacgccaccggcgttggcagccttggccgggccgtacagcacgccgttcttctggtagacctcgatggcctccggggtggacggcatgttcgcaccctcgacgaccacggtcacgccgttgtccacgagcttctgtgcggattcgccatcaacctcgttctgggtggcgcacggcagagcgatgtcgcccttgacggtccacacgcccttgctgccctcgtggtactcggagcccggaacgcgctcggcatattccttgatgcggccgcgctcgacttccttgatctgcttgacgacctcgacgttgatgccgttcgggtcgtagatgtagccgttggagtcggagacggtgacgaccttggcgcccagctgctcagccttctgagcggcgtaggtggccacgttgccggagccggagatcacgacggtcttgccctcgaaggagtcgttgcgcagcacgcgcagggcttcctgggtgtagtagcacacgccgtaaccggtggcctcggtgcgggccagggagccgccgaattccagacccttaccggtcaggacgccggagtactcgtcgcggatgcgcttgtactgaccgaacaggtagccgatctcacggccaccgacgttgatgtcgccggcgggaacgtcggtgaactggccgatgtggcggctcagctcggtcatgaaggcctggcagaagcgcatgacctcggcgtcggacttgcccttcgggttgaagtcggagccacccttgccgccgcccatcggcagcgtggtcagggagttcttgagaatctgctcgaagccaaggaacttgacgacggactcggtcacggtcgggtggaagcgcaggccgcccttgtacgggccaatggcggagttgaactggatgcggtagccgcggttcacctgaaccttgccctcgtcgtcaacccaggccacgcggaacttgatggcgcgctccggctcgacgatgcgctccagcacaccggccttctcgtactccgggtgcttctcgacaaccggctgcagggtctcgaagacctcgcgaacggcctgcaggaactccggctgatcgccgtcacgggcaacgacctggtcgtagacacgcttgatgtactcgtcagtgagcatgattctcctcgatttggtagggaattaagacggttttattctatgcgcgcaggcccttgctgcatagagtctcgctcggataacgggaaagctttcggcgtggttatggagtggctcaagtttccgtttgttagatttttcgggcgattgttggatgtctgtctatgcgtgaatcgggtcgaaatggaagccgcatcacaccggaggcacgttcatatagtggacataaaggcggacttgggtgatgtcagatgtgtctgttggggatcgtgcggtctgtggggtttgtggggtgtggctggaccgtggggtcgtatggtttttgtgacctgtggggtttgtggggtgtgtggccgcaggtcttcggcgcgcaggttaccgggttcgcggtcagtgtgcgaagtaggtctgcagaatcatcgtggtctcggtgcttaccggcaccgtgcggtggatgagattgagcagttcttcaagtgcggtaggggaagccacgcgcaccaccagcacgaaactgggggcgccggccaccgaatagcaggagacgatgccgtcgatattgttcagcttgtccggaatcgaggattcggctgagtagtcgagcggggtcacgttgacgaacgcgctgatgggcaagccgcgctgctcttggtcgatgatggccttgtatcccttgatgatgccgcgcttctccagcttctgcacgcgcgactgggcggcggagactgacagtccggtcgcctgggccagttgcgcgagcgtggcgcggccgtcggcctccagcatggtgaggatgcgctggtcggtctcgtcaatcgcggtcatgatgtcttctccgttcgttgtgctctgtgttcactgtacctgttgccggaatgcgatggctttccgattttgcctggtaatttcagtagttcttcctgtgttttctgttgtgtggtggaatgtttacgtttaaagtcctaattggatgtaataattccttttgaaataagagaacgatgaaataattccattgaggagggatgatatgcagaagttttccaacatgtctctgtccgaagttgcatctgctgctgcgcctgctactatgcctgctgccggtcgggttgctgtgccgaccgccgagcccgcgagcctgtccgccgaagcccggaatatcccgcgctccggcatccgagacgtattcgaccgtgtagagcgcgtgcctgacgcgatttcactgaccgtgggggagcccagcgccacggccgcgccgcatatcgtggcagccgcttgcgaggccgcacaggctggccgcactcggtacaccaacgtgcttggcatccccgaataccgcaaggccgtggccgattactccgcctgtgtgaagggacttacttatgatcccgaaaccgagattcaagccgttgacggtgccacgattggcctgtttctggcgctgaaagccgtggtgggcaccggcgatgaagtgattattccctcgccgttcttcacttcctatgacgccgaagtgatgctgtgcggcggccgcccggtcaccgtggcgctgcgtccggagcacggcatgcgcgtgaacgcggcggacatcgaagcggcgatcaccccgcgcacccgcgccgtaatcatcaactcaccgggcaatccgaccggcgcggtaacctctgccgccgaactggcgcgtattgccgaagtatgcaagcagcacaatatttgggccatctccgacgaggtttaccatccgttcgtgtttggggaaacgtttggggaaacgttcggggaaacgcttgggggagaggcagccgtggcaccatcgatcgccgcggtgccgggcatgaaagagcgcaccattgtggtggaaagcctgtcgaaaacctatgcgatgaccggctggcgcatcggctacctgctggcacccgaagcggtcatcgaacagaccggcaaaatcgccgaactcatgcactcctcggtgaactccttggcgcaatacgcaggcgtggcagcactggctggcccgcaagataacgtggccgccatgcgcgaggaataccgcgccaagcgccagatcgtgctggacggtctggccggatgcccggtattgcgtctgatcgaaccgcaaggcgcgttctacgcctttgtggacgtacgcctgactggccttgactccggtgaattcgcagaccgtctgctggacgaagagcgcgtggctgtggtccccggcgaggccttcggcgaggaggggcgcggcttcgtgcgcctctcctacgccggagatgccgacgagctgcgcgagggcgtcgcccgtctgcgcgcattcgccgaacgggtatggaaccccatcaccggccaccacaccgccacctatcaccccatggaggtgctggcctgaggcttaaagcgaggctaggccgccattcggcctcgtcggcgcgagcgatggcctgcttcttggctcgcagcaagatgtagccgagtaccagaacgttggccagagctcgatgttggcatcgcgtcaaaacaaccgcattaaggctgccgcgtctcgtatcgttacgcgtaggggctggctgaggcgtaatgctgaagagtaacattgaagcgatggcaatcaagccgatttgagggagagaggcacacgatggcgtactgcggccactgcggaaatagagttgatgggccggcacgattttgcccggcatgtggagcgtctgtagacagcgcaccagttgcgacggcaccagtaccggccgcatcgccggccgtaccgcctgcgtcgataccggcacctgctgtgccggcgtctgcggtaccaccatcgataccagccgcgccggttgccccatcggtttacgccgcgtccgctgccccacagccggcaccaaccgttcccctgccggctttgccgattcccgctcctgccgcatatcaggcgactgatgcaaccgccgtcctggcaccgcagcgcaaatccagcaagaagctgatcgccgctttctgcgcattgcttgcgacgattctggtggcggccttggcgttcatcatccccaacttcaccgccgtcaaagcgatgctgggcttccggcccaccaatccgctggtcgtcaccttcgacgcgatcaactcgctgtccactctgcgcagcaccaaatacgaactcagaacccacagcatcactgacgattctcttgacgtgcggatgtctggcatgtattcgctgggcaaaaccaccaacgaatcctccgcgtccttcactagcaaaacagacgaatatgcaacgaccttcgcttggtacaaaggcgcattcgccgagaaatccgtttggcatgacgacgacccctactacatctactacccggccgaccaatatgaagatgacttaaggaacggcgttggtagtgatgtggcggacttgatattgaacgtcaaggatgcgttggtcaagaacggtgcttgggacatcaccggcgcggagcaaacgttctacgatcagctggacaagatgaacgacgatgggtactcgaacgacatcgaccgggtcaagggcacgaaaacgtctgccgaggtgaaggccgaggccagcaaattcatccaacaatatttcggcgtggagctggaagataagaatgtgcgcagccagctgttcccgaagacatcgtctgccaagtctgccggcaatacgcagctgtcgtaccaaatcgatatcaaagcgttgtctcagcatttcgtgaattactggatcagtcatgaagcgcagtatccgcatctgaaatcctgggtgattcagcaaatcgaggatgccggcgtggacgatgctgaagatgagtaccgtcaggcgctcgataatgtgcgcaactgggatttcggcacggatgaagagccggagatgccgactatcaccgtggatctgaactacggcagaaagcgtctgatgaattcgattgccataagcgtgtccggcaaggacgaagacggcgactcctataatggctcgctatcgttgacgctcagtcagcagaacgcggtgtctgtgaacgaccccgatttgactgatatggtgagcaaagccaaggacaacaacggactggatttgtcctgaatatggtgcgtgggatgttgcggcggcgctaatttcctcggtgggctatcacgcactcttcccgcttgcagcggtctgctcgctgattggcgcggtgctgatcgtcttcatcaagtcagtgaagtaaacatacttattcatccctcttccttccataacaaacgagcggaggggttgggccattgttttgcggtgtgtccagtctctccgctcgtttatttgcttgattctgtggaatggaaggggcatgctctatgtcaaataagataatgcggaagggctgttctgcgtgcatatatcttgctgaacgtatttgagggtactttctggttaaagacacgccctatggtgggcagaatgctgccgttgtgtctggcgtcggtcgcaggacatgttgtatcatgagggcacaagcttaattcagccgtcctcaatctgattagtcgtcgggtcggattggcgtgatcggcttgcagggaatcatccggctcttccggttttggtgtgtagaggggatgcttataggtgggcttgtatggtgtgtctgaagccgccggtgtggaggaggctgcgggtgacgtagttgtcgaggttgcggaagccgagggcgatgccgcgtagggtctcgggcctgccgttgatggcctcggtgggaccgttggcggtgccgtgggcgcggtcgtcggatcgatcgtccccggtgccggcaccgtggtcggcgcatttgtcggaacggcgattggcactggagccggatggctgataagtagcggcttagacgcactttacgacaatcaggtgcacagaggcggtggagatgacccgggcagtcatttcaaggataatctcgggttttggaagtgggggtatctgttggcgttgttcactcggtatgtgttggtggggcgtcttgaggacggggcgcaggtgttctgggacacgctggagaagacgccggtcaagcgcaagctggatttcggcggcgattccggctgggcgcgggctggcgcggcggccggcggcgctgccgccgcggctgcgcccggcctgatggtcatgatccacggcatcgcccggctgctcaccccggacacgaagacgcaccacacgcataccgatgacgtgacgctgctggcttttctcagaccggtcactatatcccgcgacgcatggaacacgtacgtggcggtcgccgtgatgtggctggccggactcctcctgtactggggtttctgccggctcgtgttcggccggccgaacacctacgtccccgcctcgctggaggacttggcattcgcctcctccgtgcccgccacgaagctgcgctacatgttcggcggccccatcgtcggcacgctgttcctcatcgcgatatcgggcttccccatagcgatgacatggatgttctggtcgagcgcgcaatgggtcgacaccggcagatccacacctgactggattggatggttggctttcttctgggcgttcctcgccacatgctccccgattctgttggccttgcgtttcgtcggaccgtgggactggcggggacgtttcagcccgcgcgcgggcgccgaacgctggagccggctgaaatgagcacactgctgatgggggccgggatgggcctcatggtcgcaatctcgctcgcattcatcctcgcgttcaacatgtcccggctccgctggctcatggaccacgacatccacccgctgctcgaggagcacggactgcgcgaacccgacgacgggttcacgtcctccggcgccaaggagcgcatggccgcgttccactcggacgtcgcggaggcgctggcagcgccggaacgggaacgcgaagcgagggaacggcgacgattcactgtgttcgacccgacggtcgacaagttgccgctgccggcgggcccctacccgttcgaccgtccgacggcgtcctgggcacgcgacatctacgaggaaggcgattgggcgtacgccgacgcatgggtcagggggcggaggaagccacgcgtggtgcgcgagcaacgctacgactcgtggcgcaacgaagtcctcgcccgccacggcctgaccgacgcgccatccgccacgctcgaacacatcgaacacgccgctgcacgcatccgcgccctccaccacaccagcccagccgaagcctacaaacaagcctgcaaggaagccaccggcaacacggtcaacgacgaaaccaccggagaaggaaaagaaaacggctcttccggttttggcgtgacccgcagcctcctccacaccggcggcttcagacacaccatacaagcccacctataagcatccccctacacaccaaaaccggaagagccaattatctgccggtaccttccacccgagaggaaggtgtagtcctccgggtccgggcgatatcgccgcaaggcgaaggattttcgtgtaccgttccgtgaggacggagcgacaatgaccacgcggttggtctgaatcctcgaggggtggtccttaacaggaccacccctttttcgatggagagggccatggcgcactgggagaatccctcgaacaagaacgcaaaaaccctcagaatcggtattattccaagggttgtctgtggagctagccgggttcgaaccggcgaccctctgcttgcaaagcagatgcgctaccagctgcgctatagccccgtgagaaaaaaagagcggctcgcagccgcttcatttttttctgtgggcccgggaggacttgaacctccgacctcatccttatcagggatgcgctctaaccagctgagctacgggcccgatccatacgcttcaaaagcgcacaagtaattacaataccattgaacggcggtatgtcaataacggcgtgtcgtgattgtcgcttgcgccatgattgccggctcgacggtcaatgtccagcaacgccacagccaatgcccagctatgtaaccttgcgttctcacaccgtaatgctgcggttacacctccctctctgcgcagaaatgtccaatacatatgaggcttctgctgttttcgtgggttgggctcttggttgtggtgggcgtatgtcgagtccgccgcggcggagcatgacgagggcgatgggattgttcgcgtggtggaagccgtaggccatgcggatggtgaccttgatcctgttgtcggacgcctcgagcctggcgtttga

SEQ ID NO: 764 - DNA, 7311 bp, Unknown
  R14_18m  MAG No. k141_1239
ccagcgccgatgcgtcgtctgaagactcggccattgccaatacgtcgcagtcgagtaagaagttcgttgccgcaggcctgtatctgccggtgtatcttgcctctcaaggcaacggcaatgcggaaggattggcaaatacgatgatgaccggcatggataacagtgccggcaatcaggctgtcagggcccttggcggatggagtgctgtcaattcatggctgagttcccatgggtacagcggcaccagcttcaaccgtgatttcggtgatgtacaggccagcaatgctggatatgagaattacagtaccgctcgtgacgcggcccgcatgctggttgccgttgatgcggtcggtggcactggtctgatgaacactgatattgcttcggagggcgtggtgattccgagcggcatgaccgtgcatgcacatcgtggcatgggcatccagaacacgtggaattacttcgccatcgtggaggtgaatggcaacaaggccgcggtctctgtggtcacgcaaaaccaaggtcaggatcgtgccgctcagctgatgagccaagtgcttgcctcggtggatagcacgttgcgcaaatagtacaagcagtatttgcacatgcaactgtgtatacggaccacgccttttggttggcggctgagtggggactattccatcgcgttcatttcccagtagaatgagactatagtgcgtcattcgaccagagagaagagcaatgatgatctgtaagaattgtggtgctgacaatgatgggggaagccggttctgcatgcactgtggtgcgccgctaaccgacgtgagtgctcctgctcctcaggcggcggccggcccgattccagtgccgctgccggacaatactatgacggtgcttgatcacccgccgctgcccggcccaaacgatgggaacgcctatgggcagcccggcgtgccgacatcgagcggtgtggcaggagcgccgaccgcaccgggagcaagtcatactgggtcgatcgcaccgggagcagtgccgcaggccgctccgggtgctcctgtcgctccgggcgcagccacgccgccgagcggcacaacgaccgcaaccgccacattgccgaatctttcgggcaagcgtggcccgaatacgctgattatcgcgctcgtggcggtgctgctggcgttgatcgtagccggtgtggctttattcctgacgtatcgtgccgaggtgtggggtggtaagtcgctgcctgatccggcgtccatcgcctccagcgtcaccgataagaacggcaagaaggcatcggtggtcaaggccaaggatgtgaccgaggcgttgaaggccaagggcctgaacgcgaagacggttccggtgttctccggcgaggatcgcggtgtgttcctcggctacgagggcacgaatcctggcgctcgcgtcaaggccggttccacggtggtggtgcaggagtcggccggtcccggtgtgccgaagggcacggtcggcaaggatgtgaacaaggtgacgaacacgttcgcgaatatgggcgtgccgattcactataagaaggttgtgatttcgccggacagcaagactccggaagggcaggtcagcgtcacgtacccggctcccggtgtagggctcaccgatgacgagaaggacaacggcatttacattggcgtggcctccaagggcgatggtatcccggtggatattcttggtgcggacaagaacaaggccgtcagcgacttggagtcgcaaggctacagtgtggatttggaaccgcattactcgtcagagaaatacgtgggcaagatttccggctcgtacccggctccgggatccacgttgagttccggccagtcggtgaccttgtattacggcatcgataagtccagcaacatggacgtgctgagcaaaaccaactcgtatgacaacatcaagatggccagcatccacgcgtccgcaatgatcggtatgtactgcaagagcgaggtgacggatgccgacaaggactgcatcacactggagcaatcctcgatgaatccctttggctccacttcatccgaggattatcagtacctgcaaatcaaaggccatgagcctgaagacaaggccgatgtgttgggcctgaccaacttctctcaggacatcagcggcgcgatgctggaagcggattcggaatacggcatggccgcggacaaattgccgatgaaaaaccatctgctgttgaaagactggggtatgttcgagctgtacgcgggcatgggtctgccgaactgcggctcaaaggtgatgtccgcttcgataggcgagtactgcgtgaacggcaactatgaacgggcgtcgttcgacgatggcgaaatgacgccaccggccggggctgagaacgggtcgaccggcatgacctacgacatgaaggacttcctggtctacttcccggccggttccgatgccaagtcattggatgattccggttacttcgacgccgccgaactggcgaaggccaagaagcagaaggccgtggataccagccgcccgtacgttctggttcgtgacaagagcctgtacagcgagatcagtgtgagcgccagccggggcaaggacgtggacccgtttgtgccgaccaacagcagtatcaataactatcagaacgcgctggtgccgatgaggccggctcccagcgattcgaccgtctactatctggtggagcagaacggcgatctcgactgggattccctgccggacgccgaggtcaagggcactggcgataaggccgcttccggtgagacgaccggtgacaagtccaaggacagcggcaaacgagacgccacattcaaagaggccatgaaacaggcggcaggtaactatagtttcggttccggtgtcggcgcatggggaaccgtaatgaaagtcaataaggatggcactttctcaggctcctaccatgactcggatatgggggccacgggagacggctatctcataggaaacgacgtcgatacgctgaacggcaaggcattgctcaacgtgacgagcggagcggataagggatacacgttctacgatttctcgtagtgattcagctgccgtgcggagcggcggggaacgtgaaggaccggcgcgtatgctgtgcgaaacagcattacgtccctagactggtgaggcatgacgaacctgcgattccgcgaagacggcagcttccgcgtgctgcaaatggccgacatccaagacggccccaacgtgctccccgataccatccgccttatccgtgaagccattcgcaaagccgacccggatctggtggtgttcaccggcgaccagatccgcggttacgatcctgcctacatcgacactttcctgcgccgccgtggcgaggaaccgggcgcttgcgtgcgtgcggtcaccgaggtcgaggccaagctgcgcggaatcaagcggcgggccagagaccgcgtgaacaatcgtctgctggccatgaagtccgacggcagcgattccgacgcccaacaaaccgcgtccaccgcgtccacgctggtctactccacaacatccgatccacaggatgtgccgacgactttggacgagctcatggacgagacccgtgacaaagtccgccgcacgtttgccggcttccttggcccggtcatcgaagcggaagtgccgttcgctgccacctacggcaatcacgatttccagtgcggcatcctggccgacgagcaggacggcatctaccgcgaattccccggctgtctgaacccagtcgacagccttgagccaggcacttttgccctgcccattgaggcttccgacggatccgggcgcgtagctatgtccgtcatgatggtgaattccggcgattacgccggcaagcccgaagagaacgacgcccaatacccggcctatgtggtcaatccgcgtggtcttgatttggctgattccgatgggtatggcacgccaagccccgaggcgatcgattggctgggagccgtacagtccgaacttggcgaacgcaacggcgacggtaagccggtgcctgccatcgccttccagcacattccgccgcaggaattctacgattgcctcaaagaggttcccgcatggacgccgaacgcggtggaaggcgcacgtacccacgccggtcattgctacgtgctcaaccatgagatctgccggccgggatcgcggctgggtgaggcgattggctgtgcagacgagaacgtcggtgaagtggacgccttgcgtgaggcaggcggctacttcgcgctgttctgtggtcacgatcacaagaacgccttcgtgggccacgcgcatggcattgatttgggctacgcacccacctgcggattcgaatgctatggccccaagtcgcgctatcgaggcatccgcctgtttgaattccatgaaagcaacccggccggctacgtgacccgcatgctcacctggggtgatctggtgggccgatactccagcaacgaggtgcgcgtctggttcgaggaccactgcgtgaccggtgccatcagcatgcgtaacgaattgcgccgcccgcaggtattcgcagtgctggccggtgccatgagcctcggttttatggccgtcatccgctcgttggtgaagaagcgataaaaacacgtgaggccggtatgaactggcctcactgagtattaagcgttggatccgcctgaaccctgcttaactgttatttatttctgggtgcggataaaaacaccagagccttcggtgttaatcagcatccaatcggatggtccatccggcgttccacgcttgacgagcatggcctgtgcttcagatggcaacgcatcgctggaggttccagatggatatccggtgaaggtgccacacgggctgaatcctgacttgtcggatttggacttgtcgtcaattttgaaagccgacgcatcacacttcagcgttaccgtgccatctgaattggatgtggcggatgcaaacttaccgctgaacttggtctggatacgtggcgcattcgctgcggaatcgccactgctcatatctgcctcgtccacagtgccggagaagttgccccgatcatccaacgaaatggtggtgaaggcgctgccatcgccagcaatcgtgtaagcgtattgggcaccggccaaatcagaaaacaccttcagtgaggccgcatccggtgtgccggatttcttactgctcttgttggaatccttggaatccttggaatccttggagttgcccttgtccttggtgctgggcgccttcacgtccgcgtccggcagggaatcccaatcgggttcggacgcttcgaccagatagtaggcgtcggcgtcgcttggggccggcttcatcttgacgatgtcggacttactgccgttgtatccgttgtagggcaggaacggattggcgccgttcccggcaccgttgtatggagcggtggtagtgtcgtagagcttcggatcgcggtacagaatgaacggtcgattggtgtccaccgccttctgcttcttggctgcggcaagcgcgtctttgtcgaagtagcccttatcttccaacccctgcaagtcggagccggtaggcactacgaggaacagatcctgcatgtggtattcgccggatgtgggccaagaatcacccatatgcacgccattgccgtcatacattttgccgttggcccaaaagttggtcaggctgatatgcggcatgagctcgaaggcgccataatcttgtgtgactaggtagtcggctttcggactgttgcagtacgcctgctgaatggcgtcgcaggcaatcagagtaccgtcgtaatcgccggtatagtcagcattatcactgccgccttcagtcaccttgtaattgtcgatggtgatgcacttcccatcattagtgcaccactggccgtcggctgcgcgtgtggtaccgagcagcgcgtcaccgcctgtttcggccaaatcatggcctgtaaaggcttctttggtgtcgctggcatcgatgccctgatacagggtcacgtcttcgccggaagacagggacgatcccggagcggggctggcgccggaaaccttacccacgtaatccttggaagagaaacgctgttcaacggtaactgtgtggccctcagactcgagctgggatttgacggtatccacatcctgacccatcacgtcgatgggcagagcggtgtcgtcacccttggcggccacgccaatgtagatgcccttgtctttctcgtcgtccttgaccccagtgccggcggcaggataggtggccacaaccgaaccttcggggttcttcttggcgtcagagacaaacaccttcttatagtggaccggaacgcccatatcggcgaacgtctcagtcaccttattgacctgtgcgcccagagtgtctttcggcacgccggggccggcggattcctgcaccacgaccgtggagccggccttgacacgagcgcccggagcggcgttcttatagccgatgaactcacccgaatccttgccggagaacaccttctccgttttcgcgttgagtcccttggccttcagcgcggccgtgacatccttggccttgacggccgacgccttcttgccgttcttatcggtgacgctggaggcgatggatgccgggtcaggcagcgacttgccgccccacacctcggaacgatatgtcaggaacaaagcgacacccgcgatgatcagggccgccagcaccgccaccagcatgatgatgagtttgtttgggccgggcttggtcgcggcggttgtggttgccgttgccggggccgtctgcgtggccgtggcaacggtcgcagtgggctgcgtagccgccggtgcggagacgaccgccggagccgacatgccagcagcaccctgcggcataggaatcggcggcactgccgcaccgccggggccggggactgaagcggcagccggagcgggagtcgctcccgctggcgtgggcgcaaccggcgcgtcctgcggtgtcatggaagcactcgacgctgcagtattcgcttcggtggcggtgagcggcgtgccgcatgtttcgcagaacttgctaccttccgcgttatcggtatggcaattggggcaaagcataaatggaatctcctatgaatcaacgagactgcggagccgaacaataatggtctgattggtgcggccatcggcaagcgcagtaaaaacactgccccggcaaatatgtcggcaagtgtagaaggacgggattgtttcagccgcgcgcgttgtagtcggcggacagatcgttcatcgcatgcagcagcttgtagaagtagaccagcggtcccacgatgatgaaaattcccaagacgtcccacag

SEQ ID NO: 765 - DNA, 9729 bp, Unknown
  R14_18m  MAG No. k141_1252
ggcctgatctgtggcgccatcgccgagcgtgtgaagtacagcacctggatgatcttcgtggcgctgtgggttaccttcgactacgctcctatggcccacatggtctggaacggtggtctgctgtctgctgacggcgccatctccaaggctatcggcgcggccgcccacgatttcgcaggtggtaccgtggtgcacatcaacgccgcagtcgccgccctgattatcgtgctcatcatcggcaagcgtaagggcttcggcacgcagccgttccgcccgcacaacgtgccgttcgtgatgctcggcgccttcctgctgtggttcggctggttcggcttcaacgctggttccgccttcgccgccaacggcaccgctggctacgcttgggtctccacttccgccgccactgccgctgccatgctctcctggggcttcaccgagaagattcgctccggccactacaccgctatgggtgccgcctcgggtatggtcgccggtctggttgccatcaccccggccgccgatgtggtttccccgctgtgggccatcgtgatgggtgccatcgctggtgttctgacctgcctggcctgcggtctcaagttcaagttcggctacgatgactccctcgacgtcgtcggcgtgcatggcgttggtggtttcaccggtactgtcctcgtcggcttcttcggcgaaggcaccggcctgctggctggcggcgactggaagcagctcgtcgttcagctggtcatcgctctcgtcgccatcctctactccgcggtgatcaccgcgatcatcgccttcgctctggagaagaccatcggttggcgcgtcaccgaagctcaggaagtcggcggcatcgatcttgccgaccagggcgaacgtgcttacgattttgctggtactgccagctctgttctcaaggaggtgaggtgagatgaagctcatcaccgctatcatccagccccataagctcgacgacgtcaaggaggccctcgcggccgccggagtgcacggtctgaccgtgtccgaggccaacggctacggccgtcagcgcggccacaccgaggtctaccgtggcgctgagtacaccgtggacctgattccgaagattcgcgttgaagtgctgtccgatgacgcggatgccgagacgctggtcggtgtgatcatcaagtccgccggcaccggcaccatcggtgacggcaaggtgtgggtcgctccgctggactccgtggcccgcgtgcgtaccggtgagaccggttccgccgcgatctgataacacagacgtccatgcctagaaggggatggactgcatgggaaaggtccccgcacgccgcgaattgacgccgtgcggggacctttttggcaatgaaagatgaagcaatgacttcagcagtagatggcttgaaacaacgattcatggatatgagccagccggatgacgatggtgtctaccggaatggtgcgaccaagcgtaaagcccgcacggaactggccatgcaatgcctcacggagctgtggaatgcggcctgcaaggatgtctctttccccgtgcccgactccggcatcggcttcgccgcggtaggctcgctggcacgtggtcaactgggccccagctccgacctcgacttggtcatcatctacgagcctcgcacgttgaacgaccagcagctcaacgagttggccaacaaactctggtacccgctatgggacagcggtctggacctcgaccactccatccgcacgcgcgcccaatgcgaggaagtcaccgaccatgaccttcccgccgccatgggctggctggacgtgaagcccatcgccggcgacactgctctgattaccaccaccgccacatccatcctcgaacgctggcgcaaggccgcccgcaagcgcctgcccgaactgctcgactccgccaaagcccgactcgacgaattcggccgcctccaatacgtcaatcagcccgacatcaaggagacccgtgggggtttgcgcgattcggtgctcgtctccgcgctcgccgtctcatggctggccgaccgcccgcacggcatctacgacgaagccgtggaacgtctgctcgacgtacgcgactgcatccatctggtggccggcaaggataccaacctgatgctgacgccctatcaggccaaagtggctgccatgcttggccttgccgatccgacttggcccgaaaacgagcgtgccgcctactcgatcgacgatttgcagacgctgcttgcccgtatcggccggcgcatctccttctcgcttgattccaccgcatcccgcgctggacattcgctgacccacgaaaagccgcgattcgcgttcttccagatgttctctcagcgctctggcggcaagcgtgaagccccgcaattcgacgtggtggctcccggcgtggccaagcacgaaggcgaattggtgttggcacccggtgccgagcctgccaaggatgccaagctggcgttgcgtatggccgtggcggccggcgaattcggtttgcccatcaatccgtctaccttggttaatctgaagcactgcccgattcacgacaaccagtgggatgacgaatcgcgcgagctgtttattcgcctgcttgcatgcgggccgaatcttatggaagtgtgggagagcatcgacttcgtggacattccgggtcgatggatgccggaatggctcggcgtccgcaaccgtccgtccgcctcggccgcccaccggtacaccatcgatcggcatatggtggaggtcacgtcgcgtctgggtcgtgagacaccgtccgggggacggtatgatgacgatcatttcaaggcgttgctgttggccggtattacccatgacatcggcaagcgcgcgttcgtggccgatcacgccgccgagggtgcccgccatgtgccggtgattctcaagcgtatgggctacgcgccggacatcgtcgactgggccaccgtgctggtgcgtgagcatttgaccctatccgaatttgccacgggtaaggacccctatgatccggccgtggcggaggagttggccgaccgcttgcaccacgacaagatgctgttggatatgctgttcgacctgacccgggccgacggctcctcgctcggtgccaccgccggtgagaccatcaccaagcaatacggctggtccaagtggcgcgaacaaatcgtgcgcggcatgtattccgccgctcgcgccgcgatgtaaacggaatcgcccagcacttcgcgcggccgatacctacttcatccatgcgtccgagcgcacgcgcagcccgttggacaggccgcgcccgcccatgagcaccacgttgaacgcggcccagagcacggcggtacgcatcaggtcgctcgtcagcgccggcgtcaccatattggccagtatgagtatgagcgtcacatacaccacggcggtcagcgtgcaggtgcctgccagatagcggtagtcgcgcgcgccgataagaatgccgtcgattgccatcatccagccttgcagtgggaagaagatgcccatcgtcaccatgccaacggcaatcaacgtctgaatatttggcgtaggggagaagaagtgcccggcgaacaggccgactaccgcaaaagccgtgccgattaccgcgccggtgaccagccccgcacgcccggtcgcccgcgtcaaccgccgcgcctgctgcacgctgccagcgcccagcgttgtggccaccagcgtctggccggcgatgcccacggaatccagcatgttcatcgcaaaattccaagaggagttcacggcctgaaacccggccaacacggcagtacccatgcgcgcggcacaggcgaccgtagccaccatggccgcacgaatcgccaatgtacgaatgaacaatggcagtccgtcgcccccggctgccgcaataccggccaaacgaggccgcagactcgcaccgtccgcccgggaccacagaatggcggggattaccaggaacagccccatgaaccactgagctatcagcgtcgccactccggagccggcaatgccccaattcagcacaataacgaacaacacatcaagcgccgtgttcaccaccgcgccgcccaccgcagcgatcagcgtgatacgaaccttctgcaatcctcggaaaatgccgttcgccgcatataccatcagcatgcctggcgcacccagcacgattgcgcgcgtataggtcacggcttgttccaacacttcgccctgaccgcccagtgcccggcataatggctcggcagccgcgaacaatcccaatcccagtacggtgccgatgctcaaggccagccacaggccgtcaatgcctgcctgcagtccctcgcgacgacgacccgctcccagcagatgcgccacctgcgcagtggtcgagtaggccaggaatatgcacagtccgactgccgtgaggatgatggtcgatccgatggacagtccggccaaagcggcatcgccaatgtgaccgacgatggcggtgtcaataaggataaaagtcggttctgcgatgagctgcccaaaagtcggtagcgccaacgcaatgatttggcgatgaatgctggtggagttgctatgcacgctcacacgcatatcatgcttagctacgttgcgcaagcacctagtgcagccgtacaaagttatcctcagcttgtccaccaagttatccccaatatgtggataaatgagtggattatccccagacttatccccaaaatgtggataactattttttctatccacatttgacgcttcagcgtgtcgccgcgctgaccgcaaggtgaaccaacgatgaaattggtgcgcgatgattcggcacgacttgcactttcacgcgttcattaggtcgattgtgcattcattaggtcggtggactttgagagatattgatcgagcgcctcagaatgccgccattccaagcgcatggtttgtggtgttaccaagcacagtgacctaatgagtgaggaatcgacctaatgaacgtagtcgtgcgatatcttccgctcgccacgccacctcctatacttgagggctatggcagaaggaagtgaacactcgtatcagaatgggttcggcagtggctcggatcgtggcgatcgtggcgaccgcgcgggccggggcggcgcgcaggcggcggcagctggcgacccgattttcgaccgcgtgcccccgcacgatgacgacgcggaaatggccgtgctcggcggcatgctgatgagtaaggatgccatcggcgaagtttcgcagaccattgacgtcaccgatttctaccagcccaagcatcagacgatctataacgcgatcatcgatctgttttccgccagtcagccggtggacgtggtgctcgtggccaaccagctgttggcggatggcaacctcgacaaggtcggcggcgcggactatctgcacagcctcgtcgcatccgtaccgaccgccgccaatgccatgtactacgcggagatcgtccatcagcgggccattttgcgcaatgtgatcgccgccggcaccaaaatcgcccagctcggttattccgccgagggatcgcaggctgaggatgtggttaacctcgcccagtccgagatctacgagatgtcgatgggcaaggtgcgtcaggactatgccgccatcggcccggtggtccacgacgcgctcgaccagctggacaaactgcagcagggtctcgtcaacaagggcgtgccgaccggattccgcgacatcgacgacgtgacccagggcctgcagcccggacagatggtcgtcgtcgcaggacgtccggccatgggtaagtccacgctcggcatcgacttcgcccgcgccgccgcgttgcaccacaacatgacttccgtggtcttcagcttggagatgagcaaggtggagctcgctcagcgtattatctccgccgaaaccaatattccgatggccgccctgcgccgcgccgacgacatcacccccgaacgctggaacaccctgaaccagttctggaccaagatgcagaatgcgccactgttcattgacgacagcccgaacatgagcctcatggagatccgtgcgaaatgccgtcgtctgaagcagaccaacgatctgaaactcgtagtcatcgactacctgcagctgatgacctcgggcaaggccgtggaatcccgtcagcaagaggtgtccgaattctcccgtgccctgaagctcttggccaaggaactcgaagtgccggtcgtggccctttcccagctgaaccgtggcccggaaatgcgtaacgacaagaagccgcagctctccgacctgcgtgaatccggctcaatcgaacaggacgccgacgtggtgttcctggtccaccgccctgacttctacgacaaggaagaccgccccggcgaggccgatatcatcatggccaagcaccgtaacggcccgaccgaaaccttccacctcgccttcctcggtgccacgtccaaattcaaggacatgccgcaggactacaacagcaatcagggggtgtgatgatggcaagcaacgtttcacgcgatgtttcgcaagaccaatcgtccgtggtgcagacccgcaaaccgtggtatgcgttcgccaccgtggccgcaggccgcttcgtgcggtttgcatcccgcgtcaccaaacatggcggttcggctttgcccggcaaagtcgtagaaaagattgaccccggcttcctgacccgtacgctcgggcagttgccgcttggcgtggtattggtgtccggcacgaacggcaagaccaccaccacccgcatggtcgcctcgatgctctccgatctgggattgaaggtgttcaccaatccgaccggctcgaacttcgtgcgcggcgtggtctccgcactgctcaccgaagtcactttcggcggcaaattggacgcggacatcgccgtactcgagctcgatgaggcgtacgccgtccacttcgtcaagcaggtcaagccccgttatgcgttgctgctgaacgtgatgcgcgatcagcttgaccgattcggtgaaatcgacaccacggccaaactgctcagccatgtggctgcggcgactaccggcactgtggtactgaaccgcgaggacccgcgtatcgccgcgctcgccgcgaaggccccggctggcaccacagtgcgatacttcggcctcgccgacgatttgcgccactatttcccgtccgatgacgacatggccacgaccgtgtcggtggaaggtatggccgggccgctcccttcagtcagtactcccctcagtccgcttcgcggacagctcccctcggagaggggagcttccgcaggcacggcagaactccccgccgacgtgacacttaccgccgtgggcgaccacaaggccaccttccagatggacagccaggactacgccaccgacgtcaaacttgaaggcgtctacaacctgtacaacgcggccgccgcgctcgccgtggtacgtgcggtgatgcaagacaatgccgccgcatccaaggccactgccgcagccaacgcctgcgccgtgtccgccgacgagctcatcgccgccgtttcccgcgtcacgccggctttcggccgtggcgaggtcatcgacgtcaacggttccccggtcgaactgctgctggtcaagaacccgatgggcttccgcctctcgctcgccagcttcgacccggccaacgcggacaccatgatcgccatcaacgacgaatatgccgacggccgcgacatgagctggctatgggacgtggacttcacctctttgcgcgcgtccggtgtcgccatggtctccggcgtgcgcgcctgggacatggcactgcgcttggggtatgaccaagtgccagtcgccgatacgaacaccgacctcgaacaggctgtcaccgcattcgtcaacgccaatcccggcacacgcaagcacatctactgcacctacaccgccatgctcaaaacccgtgccgtactgggccgcatcaccgaagtacgggatgcgggcgtgggcaagtaaccaccctctagcgcccgcgcgccacctctcgcctgcgggaggacatggtgaggaataagacttccccttagcgggaagacatcgacaaggagaacgcgacatggccagaacaatcgatgtggtgtccctgtatcccaaagacatgaacatctacggcgattccggcaacgtgctgactatccgccgccgtctggaactgtacggttacgaaccggtcgtccaccagtacaatcaaggcgacgactggcccgaccaggtggaccttattctgggaggcggcggccaagacaccggccagaagaaaatcatcgacgacttctaccatcgcgccgacctgctgcgctcgcttgccgcagacggtacgccgatgctgatgatctgcggcctgtaccagctgttcggcgagtactttgaaaccgtggacggcacccgtctggatggcatcggcgttatcggtgcttataccgtgggccagaacgtgcgtatgatcggcaatcttgttgagcattccgaccagttcggcgatgtgattggctacgagaaccactccggccagaccttcctgcgcgaaggcgttcagccactcggcaccgtcgatcaggacagccgaggcaacaatggcgaagaccataccgagggcgcgcgcgtgcacaacgtgatcggcacctacatgcacggctcgttgctgcctaaaaaccccgccatcagcgatttccttatcgaaaccgccgtgactcgtcgttacggtacgttcgatacgtccgatcagacccccgaacaagccaaggagctcgcccggatcgatcaagtagccaccaacgcgcgcaaggctgccgccgaacgtcctcggtgaattctcggtgagtcctcggtaagtaccaatcagcgaaaaatcagtcgaaatcagtctgagggtctagtacattgccctgttgtttgcgctaggcttggtggtacgagacatggcaccaggccatgtcggacctcgaaggaggggtatcatggctgattttgatcttctgggtgatggcctgcgcaaggtcctgctggcgggcatcggagcccttgctaccggatatgagaagagcagcgagctcgtcgacgaactcgtcaagaagggtgagattacggtcgagcagggcaaggcgctgaacaccgagctcaagcgcaaggtgagcgagacggtggatgacgccaagaaggccgccgccgaagccggcgacaaagctgctgccgcagccgacaccagtgccgccgacaagcccgccgacgagggcaaggccgagtgaccaagcccacacgcactacgccggaatcagagtcgaccccgctttccagcagggtcgaccctattctgacgcctgcgaaagccgaacgtgaggcggcggcgaaccggtccgtcgacacgccggacacgctcaagcgggccgttaccaaggcgactccgagcgtatccgacgaaacgctggcactgttcggacgcaggaacgatttcgccacgcgctaccatctgacgcgccgtggcaagatcaaacgattggggcagatcaccagaatcgtcgagcaattcgacgtgctgcacggcctgactccggtcaagatgcgcctcatgttcgaggcgctcggtcccacgttcgtcaaagtgggccagattctgtcgatgcgctccgagattctgccgcaaagcttctgcgacgaactcgccaaactgcgcgccgacgccgacccgatgccgtattccacggtgttggatgtgcttgccgccgaa

SEQ ID NO: 766 - DNA, 29508 bp, Unknown
  R14_18m  MAG No. k141_1258
cccacgttcgtcaaagtgggccagattctgtcgatgcgctccgagattctgccgcaaagcttctgcgacgaactcgccaaactgcgcgccgacgccgacccgatgccgtattccacggtgttggatgtgcttgccgccgaatacgggcgtcccgccgacgaggtgttcgcgcatatcgatcccaagccgttgggctctgcttcactggcgcaagtgcatcgcgccacgctgaaaaccggcgaagatgtggccattaaagtgcagcgcccgggtgtgcgcgaaatcatggcccaggacgtctccatcatgcgctccatagccaaggccgccactaaggtgattcgcacctcacagatcgtggatctgaagggcgtggtcgaggagctgtgggacaccttcgaatcggagactgactttctgatcgaggcccgcaatctcgccgaattcaagcgtttcgccgcccgattcaaatacatggactgcccgacggtgtacgccgaactgtgcaccgagcatgtggtggtcatggagtacatcgacggcatctccgtctcccacccgggccagctcatcgacgccggttatgacttgaaggagatcggcaccaagctcgtcgacaattacgccacacagattctcgacgatggcttcttccacgccgacccacatcccggcaatatcctcatccggggcggccagatcatacttatcgacctcggtatgaccggtcggctcgaccagcgcacccgtgcagtcctcaaagaaatgattttcgccgtcgccaaacaggattcgcccgctctggccgaggggctgctgcgatttgccggcaccgaggccgatccggaggactatcccgcgctattggccgatctggacgtgatcgtcaaggaattcggcaccgtggatctggccgaactggacatcgccgctttcctgaccgcactgacgcagatggccggccgccacaacatcgaggtgcccagtacggtgaccaccgtcggccgcgcgttggttacgctcgaaggcttgctggacgagttcattcctgatgtgaatatgatcgaaatcatttccgaccatatcgccacgtcgaaatcgctgaagaacgccaccaaagacgagatcaagtcgctgggcgttgaggggcatcaggctttgcatgccacgctcggcaccatgaccgaactcaagaccgtggcccgtatgctgacccgtggtcagttgcgcgtcaacatggaactggtcggctccgaagagccgttccagctgctttcggatatggcgaatcgtctgacgatggccctgattgtggtcggtttgttcgttggctcgtcgattgtctactacgccggcatgaagccgattatcttcggcattccggtcatcggcttcatgggctacgtcgtggccttcgccctcggcgtatggatcgtcatcgacatctacttaaagggccgcaaaaccaagaagcggtagggtatcgattgatatcagtccagcgggagggtggattcgcgctggataaggcggcagggtacgtagtcgacaccgtgatgggggttgccttcgatggcatcgaccaagtatcgtgccgcgcggcggccgatggtctcggtttcattgtcgatcgacgtcagtgcgggcctcgagctggaggtcagcacagaccagttgtcatggccgataacagcgacatcatccggaatgcgcaggccctgctgcttgagcgcatcaatgcagcctctggccagctggtcgttttgacagaccacggcgtcgaacgtgacgccctgatcgagcagcagacgggtggcggcgcggccccaaccttcgtcccacttgccgtaccggattggcccggccggttcgatgcccagctcggccagtgcctcgaccgcacccttggtgcggtcggtggcggcggtataggtttcgtcgccaccgataatggcaatgtgccggcgaccacaagagatgagatggttgatggccatgcgcccggcgtccacattgtcacaggtgaccgaacaatcttcgatatcggtggaggggccgtagacgtagaccagtggcacgccccagtcatggccaagcgtgggccgggggttggtttcgcactgcacgatgagcaggccgtcgaccttgagggacagcagtttcttgacatgctgacgttccagcgcggcgtcgccacgagcgttggccaacaatactgaggtcgattgtgctcgcaactcgttctctgcgccgataagaatcggtgtggagaaacggccctgcagatcggaggtgaccaggccgatagtgccggtggtgccgcgggccagggattgggcgagtttgttgggggagtagttgagctggcgggcggcgtccagaacgcgctgcttggtttcttcgctaatgcggggcttgttgtgcagtgccttggacgcagtggccaaagagactcccgccaaagcggcaacgtcttcgagccgtgccgcgcgtccggtcaatgtctgggccataatgcctcgattcctcgtttctttctcagcagtatattgctgcactctttcgtgcgaaagtagtgattgtaccgatacccctttgtattgttttctattgtagacatgacgcgaaaactttcgcaagtctatttttttggcgtggcgcagtgatcatttttgtgcggttgaaaagagaatgaaagaaagcgttgtgttcacgttcgaatatgttggcttttggcgacacgccgtaagaaagcgctaaaaataagtgtttgtttgagtcaaacaatcgcgcaaaatgcatatcaaacctgttcgatatgcgaaaatatgcgaaagtgcgaaagcgtttttgcaaaaatggcgatgttcgtttatattgagaaaaggctttcgcagtgttacctgttccgagcaaaggagcgagcagggcgaagaccaaggaggcggaccgtccgccaccgcctctcatagttgagcggataaatagagaaagaagcgaacatggtgtctttcaataaactgacccgtactcttgctggcatcgctgccgccgcgttgattgttccgctggccgcctgtggtggctccggcaatggcggtaccgccaccgccgaaggcatcccggccaagggcaccgacgatggcaccgagatcaccctgtggacccgttccccgctggagcgtcaggccaagaacgtggtcgaggcttacaacaagagccacaagaaccaggtcaagctcgagatcatcccgaacgacgatatggaaggcaaggtcggcggtgcttcgcagaccgactctctgcctgacatcctcgccggcgacgtggtccgtattccgtactgggcttccgagggcatcttcactgacatcaccaagcagatcgacggtctggacaacaaggccgacctgcagcagggccacattgaggccggcaccgtggacggcaccgagtacaccctgccgttcatcaccgatgtttccgtgatggtctggaacaaggccctgtacaaggaagctggcctggacccggagcagggcccgaagtccatcgctgagttcaccgagcaggccaagaaggtcgccgccctcaacaaggatggcgttgccggttcctacctcgccggtcagtccggtggtgctctggtcttcgacctcttcccgtccgtgtgggctgacggtgaatccgttatgaacaaggatggctccgaggccactctggacaacgactccatgaagggcgttctggacgcttacaaggaactggccaacaccaccaacggtttgggcgcaggctccaaggaagagaccggtgccacttggaccgctccgttcgcgaacggcaagatcggtgtcatgccttacccgaacacctccaccactgctctgttcgatgctgagaaggacggaggcttcgaggtcggcgtcgctccgatcccgggcaccaaggaaggcaagacctccacgttcctcggtggcgatgccatgggtatctccaaggactccaagcacgttgctcaggcctggaacttcctctactggctgatgcagtctgacactcagaaggaagttttcgctgaccggggcgacaccgcctccaacatccagaccctgaagaccgcttacaacgacgctgacccgcgcatccagaccatcaactccgtgatcatcgacggcaacggccagaccccgaagtccccggccttcaatgaagccttcaacgccgctggctccccgtggcagctgctcgtgcagaacgccgtgtggggttccggtgacctcaaggccgacaacaaggccgtcaccgacgtcctgtctgcccagtgattcggtggtgatgctcctcaccatcgctcatcaaatcacagcaataactgaataacaactgaacagattgagccggtcccttccttgtgagggcaggggccggctcaaccacataattgaacttctatcttcttcttcattccttttcttccttcatcattacatacctcttgaatgcggtgtgttggcggggcttcggagtcctccttcctcgaagccctgacatcggattgcattcggattccgtgattaccatttcacagttattccccaaaggagagagaaacatgtcgagtgtttccaagagcgccggggcggtgcccgtgcataagtccaaggcgaaggcggccgagacgcgtcgcggcctgttgtactcgctgccggactggttgatgatcgtcgtcctgttcttcgtgccgatcgtgctgctggtggtgatggcctgctcgcgttggagcctgctgggcggcaaccgcggcgtgaacttcccggacaacttcgtcaaggtgttcgagaacaaattgttctggccctcgatctggttcacgttggagtacaccgtgatcgtcacggtcttcctgctggtcctgggcctgggcatggccatgatcgtgcaggagagctcgaagtggaacaacgtgctgcgtacctgcttcctgctgccgtccgcgacgggcctggcgtccgcgtccctgctgttctacgcactgtattccccgcaggtgggccctgtcaccaagattctgagctcgttgggcctgatgcaggagggcggttcggtgctggccaccggccagtcggccctgtgggccacgattatcgtgattgtctggcgattctcgggctactacatgctgctgatgatgatcggtctgcaggccatccccggtgatctgtacgaggcggcccgcatggacggtgccggttcctggcgtatcttccgctcgatcaccctgccgctgatgaagccgaccatcgtgatgtgcctgatctactgcgtgaccggctcgatcctcgccttcgatcagttcttcattctgaccaagggtggtccgaacaactccaccatgaccgtggtgcagctcatctacaacttcgccttcgattccaagaaggatctgggtatggccgcggcgctctcgctgatcgtgctggtggccctggtcatcatcaactccatccagatgcgcggcatgcgcgacaacaccaagtgagaaaggggaggtaacacattatgactaccccattgtggaagcgcgtcatcgctcgaatccttgaggctctgctcgccatcatcttcatcagcccgctggtctgggtcatcatctgctcgttcagcccgcaggccggttcggcccagtccaagggctggggcgtggccaactacctgaccctgttcggttatcaggaaggtctgcccaagtatctgttcaactcgataatcgtgaccctggtcgcggtcgtgttctccgtggtcgtctgcacactggccggctactcgttctcccgcttcgactacccgggccgtaacctcggcttcatggtcaccttgtccatcctgatggtgccgtacgcctcgctgctgatcccgctgatggtctggtacaaggacatcggtctgaacgacagcctgctgggcgtcggcctagtcatcaccctgttccagctgcctatgagcacgttcatcatgcgtaacgcatttgacgcgatcccgaaggacatggaagaggccgccatggtcgacggctgcaacagcctccaggccttgttcaagattctggtgcctgtggtcaagccttcgatggttacggtcggcctgctcgccttccttgaagcatggaacaacttcatgattccgctgtacttgagctcttcgtccaagtccaccctgccgctggcgatggtgaacatgcgtcagcagaccatgggtgttatcgactacggtgccactgaggccggcgtcgtgatcctgctgattccctgcgccatcctgttcctcgcactccagaagtactacgtcaagggctttatggctggagccgtgaagggctgatcatgaacgttacaatcacttccccgttctggaagcggcgtcgcgaccagattgtcgaatccgtcatcccctaccagtggggcgtgatgaacgacgaaatcgacaccacagtgcccgacgacccggccggtaaccagctggctgacagcaaaagccacgcggtcgccaatctgaaggttgccgccggcgaattggacgacgaattccacggcatggtgttccaggattccgacgtctacaagtggcttgaggaagccgcttatgcgctggcctaccatccggatcccgaactcaaggcgctgtgcgatcgcacggtcgatctcatcgcccgcgctcagcagccggacggctacttggacactccgtaccagatcaagtccggcgtatgggccgaccgcccgcgcttcagcctgattcagcaaagccacgagatgtatgtgatgggtcactacatcgaagccgccgtcgcctaccatcaggtgaccggcaacgagcaggcccttgaagtcgccaagaagatggccgactgcctggatgccaacttcgggcccgaagaaggcaagattcatggcgccgacggccacccggaaatcgaactcgccctcgccaaactgtacgaggaaaccggcgaaaagcgttacctgacgctctcccaatacctcatcgacgtgcgcggccaagaccctcagttctacaccaagcagctgaaggccctgaacggcgacaacatcttccccgacctcggcttctacaagcccacctacttccaggccgccgaacctgtgcgcgaccagcagaccgcggatggccacgccgtgcgcgtcggctacctgtgcactggtgtggcccatgtgggccgactgctcggcgatcggggactgatcgacaccgccaagcgtttctggaagaacatcgtcacccgtcgtatgtatgtcaccggcgcgattggttccacccacgtgggcgagtcgttcacctacgactatgatctgccgaacgacacgatgtacggtgagacctgtgcttccgtggctatgagcatgttcgcccagcagatgctcgacctcgagcccaagggcgaatacgccgacgtgctggagaaggaactgttcaacggttccattgccggcatctcgctcgacggcaagcagtactactacgtcaatgcactggagaccacgcctgacggactggataacccggaccgtcaccacgtgctctcccaccgcgtcgactggttcggctgcgcctgctgcccggccaacatcgcccgactcatcgcctccgtggaccgctacatctacaccgagcgcgacggcggcaagaccgtgctgagccaccagttcatcgccaacacagccgaattcgcttccggcctgacggtcgagcagcgttcgaacttcccgtgggatggccatgtggaatacacggtgagcctgcccgccagcgccactgacagctcggtccgtttcggactgcgcatccccggctggtcgcggggctcctacacgctgaccgtgaacggcaagcccgcagtgggttcgctggaagacggcttcgtataccttgtggtcaacgccggcgatacgttggagattgcgctcgagctcgacatgtccgtgaagttcgtgcgcgccaactcccgcgtgcgctccgatgccggtcaggtggccgtgatgcgcggaccgctggtctactgcgccgaacaggtcgataatcccggtgatttgtggaactatcgtctggccgatggcgtcaccggtgcggatgccgctgtggctttccaggccgacttgctgggtggagtcgataccgttgatttgccggcagtgcgcgagcacgccgacgaggatgacgcgccgctgtacgtggatgccgacgaaccgcgtgcgggtgagcccgcgacgctgcgcttggtgccgtactactcgtgggccaaccgcgagataggcgagatgcgtgtcttccagcgtcgataaatatcggcgatatgccggcctgcgcgcaactggccggcaaaataatacttatgccgccatcgtctgcaataagtcgatgacggcataggccggatgtcagtatcgattggagccgaaaacacatccggggaatgaggtctcctgtgtggggtaatacccgtgcaggagatttttaattatatgctcccgctgtgagagctgtcggcggagtcgactgagggtggtcataagcggtaccgtgtaagccaccctcagtctcgctttgcgagccagctcccgccagcgggagcctgttggttcctgattcagcgaggctgaatcggcgcgccgtaggtactgcgacacggcgaaacgcagcaatgctctaatgcgaaagtaaatgcgaaaactgagaaattgccgggtttttgttgtataagatggttgatatcgctgagggaaagttgcgaaaccgtattcgctcggttatgatgtggaatcagcttcggtgaattgctccaaccgtgatatccatggcggatatcacaccagattcactgaagatactcattccggtgaacccaatagccaataaaggaaactgacggagaacgggctctgcggcccagcatccacagaagaagtcctggtctcatagatgcgacgtagcctgagcgaagacgcgaaagaccggggcggagaggtccaagcaggaatgcatcaatcaacacgaaagcggtggcttgcgtcaatcggcgcggttgcagcggtcgccacactggccaccggcggtgcagtcaccgcgcaggcagccgatgcgcccgtcatcaagaatgcggatgtggcatatccgtcgttcaagggatctgatgatccgatgaagacggcggcgaacaacaccacatataaccctgccgtcagctatctgcaggagacattcgataacgacgtgaagaacctggccggcatcgacaccgaccatgacttctggatcgataagattctcacccgtactggtgcacagccaactggtaaaggcacgaacgacaagggtgcttactcgtatgaaggctccgacggcaacaactacctgttcacccgtggtcgcgccgcctacatgtacacgcacacgcctaatcagctcggttttgtgggtgataccgcctactgggaccagaccagcaggagcggcttcaccgttaccgtaaacgctgatggatcaaaccagacccttaacgaagacgcctcccagcgcaagcagacgccgagctacttcacctccctgttccagaccggtggcaagagcctcaagatcaaggaagtcaagtacatcacctacaacaacgtgatggttgcgaacctcaccgtggaaagcacgcaggaccgcgatgtcacactgaccacggcctcgccgttcgccgccgagggtgctgatggtgccaccgaacttactggccgcgtgaacgtcaagaacaacctgacgaccatctatccgcgcttctccgccaacaaccaggacggttccaactggatcgtcagcggtggcaaactcaccagcacgttgagcctcaaggccaacgaaccgcagaccgtcaagattcagctcggcctgatcgccaacgaactgcctgactccaccaaggaatatgaggcccgttacaccggcgaccttaaggatgctgccgcctcctacaaggattccgtgaccacctacaacaagtggtgggtcgataacgctccctacgtggacactccggaagacaatatcgataagaccgtggtctaccgctggtggctgagccgtttcaacatgctcgacgccaacatgcctggcaacaccttccagtacccgacctccatcgagggtgtgctcggctacaacaaccaaatcgtgctcacctccggcatgttcatgatggacaccaagtggttccgcaaccccgagtactcctacggcacctggctttccgccggcgataccgccaagaagagcaaggcgggctattactactaccacgacaatccgggcgacccggccaactggaaccatagctacacgcagtacatcacgcgcgccggctgggactcctacaaggtgcacggcggtccgtccaccgtggccgaggagctggccgaccagggtgccgaggacgtgcaaggtctactcgcttccaagagcgagccggacaacaacgacaaccagaacaacaatgacaacagcttgattgactggtcctggtggtcgatgaccggtaacgatgccgacgccgtttccttctctgagccgggtcgctccggccagcgcatggatcgcgccgatggttccgccaatatgtgggccaacgccaatgcggctgctcaggcctacaaggccgctggcgataccgccaacgccgagaagatgcaggccatcgccgacaagatccagaaagaagtcaccactgaactgtgggacaagtccgacaacctgctcaagcacaagtggctgaacgacggtgctttcgccaagtacaaggagatcaataactactacccgtactccgaaggcctgatgcctaccggcaacgaagattacaacaaggctctgcgcctgttcgaggattccaacgagttcccgatcttcccgttcttcaccgccaaccaggcggacaaggcggcgctgaatttccccggttccaacaacttctccattatcaacgcacagccgctgctgcaggtctattcagccggcatccgcaattacgatgcagccaagaacggttacatcaccaatgagcagttcaagaaactgctgtactgggtggcgttcgcgcactatcagggcggcgataacaactaccttgatcaaaacgagttctggaacgaggataacaacaacgtcggcgatgtaaacggtgacggcgtgatcaacaacctcgacaagaaccttgacgccgcacagaacggcggcaagatcacctaccgctcctggatccaccacacccagctcggcaccacgaactggacgatggtcgaggacgtagccggtatggtgccgcgcgaggataacaagattgagctgaacccgattgagatccccggctggaactacttcacggtgaacaacctgagctaccacggtcaagatgtttccatcgtgtgggataaggacggcagccactatggtggacctgctggctacagcctgtacgtggggggcaagctcgccttcacttccgacaagctcgcacacctcatttacgatccgtccacgggcaccgttgaggatgccgacaaggccggcgtaaccatcaccaatgccgctggttctgatatcaaggccgccaaccaggttgccttcaccgccgaccagcgtgtgaccgacctgttcgccaagtccggtgccaacgtcgactccgcttccaagtccaccacgaatgtggccaaggacgcggacgtgaccggtaccacctacgccgagaaggacaccgactacccggccaagaacgcggtggacggcaagaccgtgatggaatcgttctggggtaccaagggttctgagaacaagaccgacacgctcaatatcaagttcaaggacggcaagcagaagatcgacgacctccgcttgtacttctaccagagctcgtccagccagaccatctccggctatgccgagcccgccaactacaagttggagtaccagaaggatgacggcacatgggccccgattgcggatcaggtgcgcaccccgaactacgcgggcgcgaactacaaccgtatccagttcactccggtggagaccacgactatccgcgtcaccttcacgccgcaggccggcatggccgtcggtgtcaaggagatcgaagcctacaacaccggtatcaaggctgacggcacttccgagaaccaggctccgcaggtggatgcttacgtgtcttccagcacctcatccggtgccaagctcgtcggtacggtgaaggatgacggtctgcccgcagaaggcgacgtcaccaccaagtgggagctggtttccggccccgagggcggtaccgcgaagttcgtggacgatactgctgccagcaccaccgtcaccttcaacaaggaaggcgactacgttctgaagctcaccgcttccgatggcgagaaggaaggctccaaggaaatcaccgttcacggcatcccctctgacggtaccgtgaacgtagccccgcagtcgagcgcctctgccagctacaccaacggctaccagccgaaggacaacgccaagaaggtcatcgacggtcaggtggtatacaccaacacgccgaacgagacctggaacaactggggcgacaacactggtgtggagccgtggctgcaactgaagtgggccggcaaggtgccactgaagaaggccaaggtcttcttctggaccgatggcggtggcgtgccgatggcctcatcttggaagctccagtacgctgacgctgacggtaactggcaggatgtgaagctggctgacggccagtcctacacggtcaatcagaacgaaggcaacgaagtgaagttcgccgacaccgtcgaaaccgacaagctgcgcgtggtcttcccgaagggcgccatcgtgggtgcttccgagttcgaggcgtacgccatcgagccggtgagcgtggacgaagtcaaccgactggtgcagaccggttccaaggccgatgatctgaagctgccctccaccgtgagcgccgtatacaccgacggttctcgccgtgacctcgccgtcacgtgggataaggtgaccgatgctcagctggccgccgatgccgtattcgatgtcaagggcatcgtcgctggtgcgctgagcggtacggttgcacacatcgcagctcgttccgataccgcattgcagaccgtgggtaatgcgcagccggttgagcagaccgtctaccagaacgccaagtccatcgacctgcccgccacggttccggtgaagttcccgaacggatacaacgacgaccgcaaggtcacgtggaaggatgccgacatcaaggccatcgacctgaccaaggttggtgactacgaggtggctggtaccgtcgacgacggttcgtcttccgcagctgccaagctcactgtccacgtggttgccgacccgaacggttcctccactcctgagcctgagcctgagccgttggtcggttggattgaaggcaaggcgaccaagaccaccatttcgcctgattccgaggcgacctggtcaccggccgaaggcaagctcaacgacggcgtagtcgtcgatgatacttggccgaccacggatgatcagaacgtcaacgacaaggtctggggttcttggggcaaggcaaaggacggcatgtacgcccagtacgacttcggtcagtccgtgaccgttgaccagagccgcgcccagttctgggccaacttcgctgagactgacgattcgaagggtggtctggaagtcccggacgcttggaagattcagtacctcgccgaggatggttcttggaaggatgtcgagcccaccgaggattacaccattgtgcgtaactcgccggcttctcgtgcggataccgatgccaaaggttggagcactgtgaccttcaagccggtcgccaccaagtcgctgcgactcgtgctcactccgcacaccggcagcagcaccttcggggccgccgtggccgagtggggcgtgcatggtattgacggcaccgagcctgaacctaccccggtcgacaagaccgcgctcgagtcggctcttgacacagccaacggcctcgatgcaagccgctacaccgccgcttcatgggctgagttccagcaaatcattgacgctgcccaggctgtgtacgacgatgccaacgccaccgcagaacaggtcgccgagcaggtgaccaagctcgaggacggccagaaggcactcgttgcgctcgccaccgacgtggagaagtccacgttgcaggcggccatcgatgcggccaaagccgaggccgcttccggcaagtacacggataagagtgtcgaggccttgaacaaggccatcgaggctgcggaaggtgtgctcaaggtcggtgaggtcggtgaagtcactcaggccgccgtccaggaagcgtccgcttcgctgaacaaggccgtcaaggccttggaagagaagcccgccgccgaaacggtgaagaaggagtccctcgaggcttccatcgagcaggccaagaaggctgacaagtcgaagtacaccgaggaggcatggcaggctctgcagagccagattgccgccgctcagaaggtgtacgacgacaaggatgccaagcaggccgatgtcgatgccgcacaggatgcccttgacaaggcattttgggccaccaaggttgagcagaagcccggctcccagcagcctggtgtgaccgacactgataaggatgataaggacaacaagggtgatcgtgtgcctccgactggtgccgcggtttccgtagttgctgcggctgccgtgctgctcaccgccgcaggcgtgaccatcctgaagcgtcgccagtccggcgaccacggttcggctcgccactcggcctgacccgcaacggagtcattctgccgagtgagccccctcacagagggggctctagccttttccttctacccatcattactcttttcactcactcaatgaggagcactatgagtttccatgtatccgcgcaatcggttcgcgcggtggccggtggactcgtcgccgcagcgacattgctgtcaggccttgcccttgcgccgaccgcaatggccgccgattcagccaccgctgacaacgcgcccagcgttgccggtcacgcgtataacgaactgccgtataacaatcctgatgtcaccgtcacccaaatcgacaatagcgcactgcccagctacatgcgcaaccccatcgggcagaacgagggtattgacaccccgaacgatctttcgcagaactactactctgcagatgcatccgcgcagagctatgacggcaaactcttcgtcttcaccggtcacgatgaggcttcgcccgactacggctccttcaacatgaaggactggggcgtatacgtcaccgatgaagacggcctgaatcaaggcaaatggacacattacaagaccatcgccaaggcagacctgttcagctgggccaccggcgatggcgcgtacgccggccaagtcgtagccgacgataacggcaccccgagcgacacttccgatgattggttctactactacgtgccggtgaaggacaaggcttctgaggcggctggacaggacccgttcgccatcggcgtggccaagtcgaagagtccgctcggcccgtggaaggatgccatcggcaagccgctgctcaccacatcgcaaacccagattgaaaccatcgatccggcattctttgtggacgaggatggcaccggatatttgcactttggtacgttcggcactcagctcgccatcaagatgaagaaggacgccacaaccggccgcacctcatacaccgaggtggaaaccaaggctgatggcaccacgccgaacctccacaccatgaaggacgtggacagcaacgcgaacggcccgaagggattcttcgaggcggcgtgggtgttccgtaagggcgatacctattacaacgtgtacgacggcggtaagcccggttcgggcacggccacctgcgtggaatcgaactatcaagcttgcatccagtactccacttccgacagcccgctcggcccatggaagtaccaaggcgtaatcgtgccttctggctcggccaccacgatgcacccctcggtgctccagttcggcgacaaatggtatgtgacctatcacaccggcgacaaggaaggcggcaccgatttccgccgtgccgtgtgcattgatgaagtcgattggaccgccgacggccagatggtttccaccgcccatccaaccaaggccgagaaaacgcagccctccaccaacgtggctccgtacgcaaaggtgagcgccacgttcactgaaacgcctgcttggaagggttcggtgaacgacggccgtgtgttgcaaaccgctgtggtcccgccgaatcactggaccaactaccgttctatcccgcaatcgcagtccggcgattctctggtctaccaatgggatggcactgtgcgcgtcaactcgtctaaggtttggttcgacgtggattccaacgctctgcgcgcgcccgcctcgtggaagattcagtacttggacgcggacggcacatggaaggatgtcaccaacccgagtgcctatacaacgaccacaggcaaggccaaccccaacgccgtcaccttcgatgcggtgaccactactgccttaaagctcgacatgaccggtcaagctgtggatggcggctatgcctccgtggccgttgctgaatgggaagtcggctccgactccagcgaatcgccggcaatcactgcgccgaagagcgtgaccaccgccaccggtactgcgcctactctgccggccacagtggatgtgaagtacgggaacccaaccgttgcctccccagtaatttggcgtccagttgatgcttcctcgtatgccaaggtcggttcgtttacggcctacggcgtggtcgccggcgtgcccggtgaggcaagcgagcagggcaatgtgtcggtaaatgtcaccgtgcaggacggctaccagcctgccgctgataccacgaagccgactgtaaccgttgccgttactgctaacgcaggcaatagcgagtggctcaccaccgctccgttcgccaccgtgcaggccacggacgacaccgcacctatcgccaagctggagatttccgctgatcaaggcaagagctggaccaccatcgccgcgaatgcaaacgcggccattgccacgctttcccagcagggcgatgtcgaagtgtgggctcgcgccaccgatcaggccggcaacgtttccgacgtggccaaggccggcggcaaggtggactccgccgcgccaaccgtgaccgccgccgccgataaggaggagcgcacgctgaccttgaccgctgatgacggcaccggttccggtgtcgcatcaattgaataccgcattggcacagacggtcaatgggccacgtacagcaagccgattgctgcaccgagcgcgtcgcgcgccaccgtgtactaccgcgccaccgataaggccggcaacgtgtccgcttcggcgaaaaccgacattccatccgacacttccgtgccgctgaccggctacattgagggcgatgccaccgccaccgatgtggacggcaaggcatccggctgggtcaagggtgccgccgcgttgaacgacggcaagatcattcccgatatcaccattgccaacgaggatgtctggggcacttggcccaacaccggtgagatgcgcctcgactacgagtgggaccgtgaagtgactatcgactctagccgcgtgcaattcacctcggatgatggaggattgggtattccggcatcgtgggaattgcagtactgggacgccttggcgaacaacggtgccggcaacttcgtggatattcccgacgccacctacactgtgaccgccaattcaccgtctgctggctgggccaccggcgatgccaaggggtggtctgatggcacgtggaacactccggtcaagactaccaagttgcgtatggttatcacgtccggctcggcttctccggctgttgccgaatggcaggttcatgccattgacgacagtacgcctgagccgcctgagcccacaccgatcgacaagaccgagctcaagcaggcgctcgctgactcgcctaaggctgacgatgcctccaagtacaccgagacttcatgggcggagtacgcggcggtattggattcggcgcagcaggtgtataaggctgaggatgccaccgaagctgcggtggtggatgccgcaacccagctgaagcaggcagcgaagaagctggtgcttgtagctacggtgcaagatcgtgccgcgctgagcgctcagctcgatgccgctgctgccgtggatcgcacaaagtggactgatgaatcgctggccgtgcttgattcggcagtcgctacggcgaatgcgctgacgagtgatggtcaggccgcccagtctgacgtacaggctgcgactgaggcaatcagcgatgccatcgcgggtctggttgagaagagcaccacgaagcctggccagggtggcgataagcccggttccggcacggacaagcccaaccaaggcaacgattccaaccagaacaagggtgatgcagactccggcaagcacaagaagatacctgacaccggtgcagccgtgcttggtgttggcatcctcgccgtggtacttgctgttgcgggtgtaatcatcctcaagcgccgcaagtccggtacctgctagtcccactcgctcggcctagcatcaccaagcccccgcgcatgaacagcgggggcttcacttttgttcaataacaagcattatgtgcgcgtatgagactacgatggtggggaatctacgaacaggggcagcaatgacggcatacatggaccataaggatctcgccaacgaagttatcgatcaggcgcgcgcacaagagattactgatggtgtgcatcgcgtgcttgaccggattgcctcagcggagtccgcagccgggcgtgctgccggttcggtccaattgctggctgccaccaagacgcgcgatgtcggcgagattctggcggctatcgatgctggtattcgcgtgattggtgagaatcgtccacaggagattactgtcaaggctgacggtctggcaaaacgactgggggagcgtggttattcgctaggcgtgattgatgccgctgaggctgacacggccaatgccgcagctgcaacgcatattcccttccatctcatcggccagttgcaagccaataaaatcggcaaggtgctgccggtagtggacaccatcgaatccgtggattccatcgaactggcggaaaagatcgcccgccgtgccaccatgcgcggcatcacggtcggcgtgttgctggaggtgaacgaatccggcgaggaatcgaagtccggctgtgcacccagccacgccatcgacttggcccagcgcatcggtgcgatgggcggactgcgcttgcagggattgatgaccattggcgcccatgtggatgatgagcgcacgattcgtgcgggcttcgcgcatctgcgccgcacgcgcgaccagattattgcctccggtgccgaaggcacggccgactgcaccgaactgtccatgggcatgacccacgacatgacctacgccatcgaagaaggctccaccatcgtgcgcgtcggcaccgccatcttcggcgagcgcgccttcatctgattggagctatacgaaaaaacgccgcttgatcaatagccaagcggcgtttttcgtaaggattttcggcgtatcaatcacgcatagatattgcgcggacgcatgtcctcgggcaggccgtcgagcagaatcgccacggaaccttcctcgaacacggagcgaatacccgcggccagcagcggtgcgcaagacagtacggtcatattcggcaggcgcttctcttcgggaatcggcacggtgtccataaacacgatttcatgcgcgccgcagtgagacaggcgctccacggccgggccggagagcaggccatgggtggcgaccagcgtcaccgacttggcgccggattcgttcagggtgcgcacggcttcgcagatagtaccggcggtatcgaccatgtcgtcgatgaccacgcagtcgcggccgtcgacatcgccgataatgccatgtgcctcggcatggttcggacgagtaatatcacgctgtttgtggatgaatgccagcggcagattgcctagcttggcggcccactgttcggacaccttgatacggccggcatccggggacacgatggtggtgttgcccagatcaagggtggaacgcacgtaatcgagcagcaccggcatggcggttagatgatcgaccggaccatcgaagaaaccctgctcctgagcggcgtgcagatcgaccgtcataatgcggtctgcaccggcggcgtggaacagatcgaaaatcagacgggcggtgatgggctcacgaccgcggtgcttcttatcctggcgcgagtagccgaggaagggcgccaccacggtaatcgacttggcggaggcgcgcttcaaagcgtcgatcatgatgagctgttccatgatccacttgttgatatcgcccgaatgacactgcagcacgaacacgtccgcaccacgcaccggttcggtgaaacgcacgtacatctcgccattggcaaagtcataggacgtggtttcgaggatttcggttcccaaacattcggccaccttctcagctagctcggggtaggcgcggcccgtgaccaatacgagtcgtttatccggagtgccttcaagaatcgccgacatgcgttcgcatcctttgtttgagtcgctgtgtgatttacgccttaaccagtgtacaagcaccccgccgcagcgaacgccacggcggggtgcctatttcgtaagagtgttgagattgccgaaattattcggagaactcgacactgaccttattgtctttgatggtgaaggtgccgtataccgagaaagtgctggaatcgtcttccggttcccagccatcgctgtaacggtactcgtaattcgccgtcacatcaccttcgtcggtgctgaacgagctatccgacaggctcacgctggtgaccttcggataaccgtcaatcgtccacttgaagttgcggtatcggctggaattggaggtgtagtagctgaacgggcagccctgcggttccgcatcggtggaagccgcgcattcatccagcttgctcttcaccgccgtgtcgatttccgacgtcaacttgtccgtaggctgagcgtcaagagtgccgctatcggagctgttggtgctcagagacacggtcttggcggtgtaatagtcggacttcaccacgccaactttgtagacgccggggtacaccttgagccggtagttgccggtttcgtccgcgtcgttgttcacggcgttcttgggcgttacggtcacgccattgacggtgatgctgcccagcgagcttggcgcatataccgaaatggtcttgaccaacggttcggcgacggtccagttcttgaagatcaggaacttgctgccgttggccaccatcttgatggaatcgccggtgacctccttgccttcaagcgtgtacgtcagctgggcgctcacggtgccatcggcattgttggaagtctgcgagatgcgcgcgttggtgatgtgtgtgttctcgcccgaggatgccttgctggtcagcagtgcgcgctggttcgtatccacgtgaggatcggcgatggtgttggccttgtcgtagtcgccggaggagatggcggccacatagctgttcgccacgctcttcgcgctgaacacggcggaagacagcacgccatacacgataccgaacagtacgaggaagccggccacggcaccaacgatgatgaagatcttcttctgctgctcattcatggtggtggaggtcgcgccaggtgcggctaccggtgccgctccgggagtggtgggagccgcggttgcgaatgtggtgcccggagcaccgggggttgcaggggcggccggagcacccggggcagcgggcgcgggtacaccgacaccagcaacaggaggctggccggcggacgtcggcgtgacgttgacgtgaggctgcgcagcgtttgcgcccgtacccacgccggcgcttggcgtgccccacgtgggccacttgccgaccattgcgccgctggcatagatgtagtcgaccacaggctgaggcgtggcacgcacagtgccgcctacaagtagggcccgcagtcccggcatggaaaccaccatggtcgggccgaacgtcagtgcaacgacctcaaccaggaatgcccacaggcccatgaccaggaagtaccacatggcaggtccggtggtctgaacttgcgtgacggaggtgcggttgcccatagtacccatcagcagcgtggcaatcgcccagaacaccatgatggcgatcggggctttccagcagtgctgccagcccatgtaggcacggtcgtacaggttgcgtgcggagacgcgcaatgccgtgtagaaggtgaggaccaggaacacggcgaacaggatccaaataggccatacggtaacgctgaggttgatgctgaacaggctgagatcctgcggcagctgaccggactcggtcagtgtaatggcgccgaaggttccccaggtaaagaagaactcgccgatcatcagcagtgtgaccgggaacgtcagtatcaggattccctgacctgaggagaatgccacggcgaacagggccaccaggccgacgatgaagagcaaagccagctggaagctcaagacgctgaccaccgtgcgcgtgtatccgcgaacgcggtgtgcccactgccaagtagctccgaacacattcttggaatcggaagcatattgggccagtgcatagccggccagagcgccgagcgcggagagcaggtaggccataaagaacgtacgcactgtggcgccggtcaccttggccacgatggtggtgccactggcgagtggtgccgccgcgatggccgcaagcagcgtgatgaccacggccggcagcaatccggtgataaagccggagatcaggccggtgaacttgaatcgaatgctcttggaacgggccagcatgaatgcgccgaatgcggtgccgaccagcaatgccaagccggtgagccccagtgggtacgacatcatgttgctggcgtccatgctggaggatgagaggtcgacgatgtcgaaatgaataccgccagacaggcccatgaccaacgataggaacaggtagtggaagaagttcatgccgttgccggtgatgaacatgccgccaacggcttggttcagtgttgaatcggccccgaggctgggtgctgcggtgctcatggaattcattgcgattgcagggaaaatcgaaagcaccaaggcggctgccgtaccgatgccggccgcaatgccgatggtctgcatgttgggggcgccgaacagttccttgaccagtgggctggaagagatgggttgtgccggagcggcgggagccggcgatgagccgggctgccctgggttcggaatggccgtggtcggtgcggtgaatgccggtccgcctgcgggctgggcctgcggctgtgcagcgggctgaggcgtcggctgcacagccgctgcgccgggcaacggaatcgatggtgcgggagccgcgggctgtgcggtcgtgggaacggcgccggtgggttgaccgggcgtgggtgcggcgggcgtcgctgctgctggagctgacgccgcggcaagatggttgccgcaggaaccgcagaattgcgctccttcgcgcacagctgcgccacaattaggacagaacatatagtccccctttcttctgatgcttcttcgagcactatcgtacccgcaaaatcagcgccatgaccatagggcgaggctcgaaatggacaatactgggtgatggcgcgcgggcttggctgcgcgggcttggccaaaatggtgggcatcgcgaaaccggcaggaatatggccataccctgtcccgccttatatatagactgtccaagttgcccgaagatgcggtgccggtttggtgctgcgtcatgggctaacacgcatacacactcctgccacggaacgtccgtggccgaatagtccgaaggaggtgggtgatgtctgcgcacaagtacgaactgatgttcatcgccgatcctgagctggatgagcgcggtctgaagaagctgaccgagcagtatctggaactcgtcaccaaggaaggcggctctttcgatgagcccgattactggggccgtcgcaagctcgcctatgagattgccggtaagaccgaaggcaactacgtcgtggtgaagtacaccgccgagcccgctaccagcgatgagctcgaccgtgttctgaacctcaacgaatccgtgatccgtacgaagatccttcgtaagggctgaatcaagcgtttagtcagctgaacagctggtattcaaggtaagtaagaaggaccgttatggcaggcgaaaccgtcatcaccatcgtgggcaacctcactgcggatcccgagctgcgcactattggcagcggcgcgaccgtggcgagcttcacgattgcttctaccccgcgaacctggaatcgtcagaccaaccagttcgaggatggtcaggcgctgttcatgaggtgctccgcttggcgtgatctggccgaccactgcgtccagtccctgaagaagggcatgcgcgtgattgccaccggtcgcctccagcagcgttcctatcaggcacaggatggttcccagcgaaccgtcgtggagatgcagctcgatgaaatcgggccctccctgcgttacgccaccgcacaggtgactcgccagtcgtccggtcagggcggcttccagggtcgttccggtggtttccagggtggtcagcagcccaatcagggctatggcaaccagggtggccaaggtggttacaacggtggctatcagggtggtggcgctggatactcccagcagcctgccgctcccgccaacccgtccgctcctgcggccgacccgtggagcaatgccggtgcatctgatgccggtagcttctccacgttcggcgcttcctccgatttcggcggcggcgacgattccgacccggagttctgatcagtacttacctcctcgctgccagcagcaatcaatatcaagatttataaggagaacatcatgtcacgtaagaggccgcaaccgccggtcaagccgttcaagaagaagccgaacccgctgaaggccgccaaggtcaccgagatcgattacaaggacgtcgcgctgctgcgcaagttcatttccgatcgcggcaagattcgttcccgtcgtatcaccggcgtgaccgtgcaggaacagcgcgagctctccaaggcgatcaagaacgcccgcgagatggccctgctgccgtacgccacctcgggtcgctgagttagggaggctttgaacaatggctgaaaccaaggttattctcaccaagaccgtgtccaacctgggccactccggtgacgttgtcgacgtgaaggccggctacgcccgcaactacctgttcccgcagggcctcgctttcgcgtggaccaagggtgctgaggctcagatcaccgctatgaagcgcgctcgtctggccaaggccgtcgctacccgcgaggacgccgtcgccgctaaggccgccatcgagggcaccaccgtcgagatcgccgccaaggtgtccgagtccggcaagctgttcggtggtatctccaacgaggccatcgccatcgctctgtccgacaaggccgcggtgaacccgaaggccatcgaggtcgagaccatcaagaccaccggcgatttccccgccaaggtggccctccacccggagatcaccgcttccttcttcgtgaaggtcgtggccgagtgagtcattccggcctagtgctggaatcacacagaccaagagtctgagcttaagcatcatcccccgtgcggttcgcgccgcatgggggatttttgtattggtgtttaaaaacgctggaaataggcgcgacacgccgagagttgcatccgcttcaaatctgagtatatttaacacctgttgcaaggaacacttcaacatctaaccaagcccctgtagctcagttggttagagcagctgactcttaatcagcgtgtccagggttcgaatccctgcgggggcacagacaaccggaatcgaaagattccggttttttgttttttccagcatcagtccgtagctggtgcggaaaggccgtcttcgcgcgtgacggccggacgtgtaaggagcggcgtcatgtctcagatattcgcgttcaccgtatccgaccccgaaggcatgcacgcccgcccagctggccggttggttgccaaagcgcgggaatatgagtcgaacatcaccgttgcctacggcggcaaatccgtggatgccaagcgtatcttcggtgttatgggacttgatgttcaacaaggtgacgaggttacggttcgggtgcagggcaacgatgaagctgtcgctgccgcagagttcgagcgattcctcaaggagcacctgtaatgagaacgatacagggcgtcggcgtatccgctggcattgctatcggcacggtccgcgtgctcgccgccgccgatcatgctgtagaacgccgcgtaatcgacgatccgcaggctgagatggatcgattccgcgcggcccgtgacatggccgtcgctcagctcaagcaactgcgtgacaacgtcgccgctgagttcggcgaaaacaaggccgagctgttcgacgtccatcggcttatgctccaggacccggactatgcgggatgcgtcgaaggtttgattgcgcaagacaaggtgaacgccgaatttgcggtgaagagcgtcgccgaacagttcgccgccatgttcgctgcgatggatagctcgaccatgcaggctcgagccgctgatgtcgaggatgtttctcgccgcgtgatgaacgtgctgcaaggcaaacgcgatagcacggcgcaggatggcagtatacaaggcgatgctgtgcagaacggtactgtgcagaacgggattgcgcagaacggcgaaagccacatcatcttcgcccaagatcttgctcccagcgagaccgcgcagctcgaccgcgctaaggttttgggcctcgtgaccgccaagggctcagcgaactcgcacaccgcgattctggcgcgcacgatgggcctgcccgccatcaccggtatcggcgacgccttcgacccgactgatgacggtcacgttgccgtaatcgacggcgccagcggtgcggtgttcgtcgacccggacgaggccacgctgaccgagtgccagcgcaggaaggccgaagctgaggaacacctgagcctactacggaagctcaaaggcaagcccaccgaaaccaagtccggtcagcgggtccacctgtacgccaacatcagccgtccctctgacgtagccgccgtgctggccaacgatgctgagggcatcggcttgttccgcagtgagttcctgtatctggaacgcgaggactggccgaccgaggaatttcagttcgatgcatacagacaagtcgcacaggagatgggcgaccgtccggtcatcatccgcacactcgacatcggcgcggacaaacaggtcgactacttcaatctggaccacgaggataaccccgcgcttggttaccgggcaatccgcatctgcctgacccgcccggagattttcaaagtccagttacgcgcattgttgcgcgcctcagcatacggcaatatcgccattatgctgcccatgatcacctcggtgcaggaggtgcgcgacgccaagcggattcttgaagaagccaaaagcgagctgcgcggcgagcacaccgacttcaacgagagtatccagatcggcgtcatgatcgagacgcctgcgtcggtcatcatggccgacgagctggccgccgaagtcgatttcttctccatcggcaccaacgacctgacccagtacacgctggcctgtgaccgtcagaccccgagtttcgaacgctttgccgacccgcattcaccagctgtgctgcgcatgatccagatgactatcgaggctgcccatcgtcatggcatctggtgcggcatctgcggcgagcttggcgcagacctgagcctgaccgatacgttcctgtgcctaggaatcgacgaactgtccgtctcgcccaccagcgtcctacccctgcgcaacgtcattcgcaaccactgagattcgaggtcgcttcggctgattccggtggctttctgggcattgcattcggctggacattcgacatcgcatcctgccggcatttcgtcgtggggcaaagtgtacaatcgccacgtttgctttcgcgcccagcgtaaatcgcgtcgccggctccgcgaacggatttccaatcacacagaatgccgtgaacagtcagccatgcctgttgcgcggcgaagagaaaagaagaagcagtggattatcctctctttaccaagctggccgccgagttcttcggcaccgccattctgatgatcttcggcaacggctccgtggccaacgtcgagctcaagaacaccaagggccaccacgccggctggctgaacatcgccatgggctatggcttcggcgtcatgttcccggtgctcatgttcggtggcgtatccggcgctcatatcaacccggccatgacccttgctcaggccatcaacggcctgttcccctggaatgaagtgctgccgtacatcgtcgcccagctgctcggcgccctgcttggccagctcatcgtctacatcacttactacccgcactaccaggagaccgaggacgccgaggcgattctgggcaccttctgcaccactgacgcggacaacaagaaggtcaactacttcctcaacgagatgttcggcacgctggtgctcgtcttcggcgcactgtgctgcctgacgctgccgtggggcaaggccgacgacgccgcatcctccatcgtggtcggcttcattgtgtggggcctcgtgacctccatgggtggcccgaccggccctggcctgaacccggcccgtgatctcatgccgcgactgctgcacgccatcctgccgattccgaacaagggtacgtcccgctggggcgaggcctggatcccggtcgtggccccgatcgtcggcgccatcatcggcgcttggctgttcgtgttcttcttcgccagctgattcgttgattgattcatatatgcaaatggcctccgctcgttttgggcggaggccattgtcgttgaatcaggtaaacgcagagactactgctccaggaacacctgcggggccttcatgaagttcgtggcacagtgttcgccgcagaagtaataggacttgccctcatactcgcgcgtgatcgcgtcggcgttcaccgccacggtcatgccgcacaccgggtcgatggcggtttcgccgtccgcgggggcggtgtggtgcatgtgcattcccatatccatagtgttctccttgttggttggattattggattggtcagatgcgtgattggtgtgattcagcgtggtgcgatcgtcgatgatgacgg
